United States Patent Application Publication US 2025/0179532 A1 - sequence listing, part 2

SEQ ID NO: 10 - DNA, 1016315 bp, Cricetulus griseus
  source 1..1016315: mol_type = other DNA; note = ITPR2 Contig Sequence
  misc_difference 1..1016315: note = N can be a, c, g, or t
ttttttttttttttttttttttttgagacagggtttccctgtgtagcctggctgtcctggaactcgctcactctgtagagtaagctaaacttgaactcagagatccacctgctctgactcccaagtgctgggatgaaagttgtgcaccaccacaccgggcttcctagcagtttttagtgtaccttttttcagctagtcataggttaagaaactttgaatccgtaaaccttgcaggcgtaccaaataaatggaagtgctggtaggtctcctcagcgtccgctttcttactcctctctgcttgttctgagcaggttccacatgggaagccgatgagcaattctgttaatgcttgaaatgcctggagtgccatcgtaattaaacagcatatgaacactctttggccgaactccaaatcagtggttacgtgtctaacattaatccgatgtatccacagaagctattagactaaacatctggactctagtactaccaaagctgaaatactgcacagtgagttaaaaggaaagctgtagagacataccacagagcacagttggggaatgattgtgctttcaggcagataaatatgtgaactacgtcagctgtcttgacttttctaaggtaaaaattcaatgctgtcgaagtgcttagtttcaccatcgagttcctcagccttttgttactgagacaaaataaccaggacaaacagttctgagggaagaaatctttcttgggtgtgataactttgtaggttccagtgagctgtggaggcatagcatctgctagcaggagcttgaagcagccaggaagcacagagcaggtgtgtgctgggagagctcctcagcttcctctgtccttctgtccagcaccccagcccactgactgatgccgcccacattcagggcggggtcttagcccttcacactgtccagtgttccagtcatctctagactcatcctcacaaatacacccagaagtgcgctttcctaatctagacatttctagatccaatcaagacatcctcacaaccccaaatactgtcattaattggagacaaatttcttacgaagttctcagaccatcacagaatcttgctttgttgtattttgtttgattgctggggttgaaccctggcctcacgaagactgagcatgcaccctgctactcagctgcacatagtgtttggagtattgtcagtgaatagggactcactgtcagttgtagggagtcaccctagcctcgcccaatagtcctggggcaggtaccaggtggatccggggactcgcccagaggggcgtggtgaaggaaagccggggttacgtaagggagcttcttaaggggctgcacatggggaccctggctctctcttttgttctggccgcgctggctgggttctataacctagctctggcctgtgtttcaccttgctgtcctctgaaataaagagaccttaatccaatacctggcgcccaacgtaaacgaacctgaaaagccaacgagcacccagagaatttgctgcatcgtgtttttcagcttgacatgggttttgaagttcttaatcaaatacgtgagccttacgaagcccactgcagtacctttgttgtgtgaggctctccccccctctgcatgtcatggggccagcagcaggcacttctgtgtgagatggggagtgggtgtcagaggaaagcgcaggagcttcagggctccgccaaagaagagaaggggtgttttctgtggctttggcttgatcattcccactgggaaaaatgagttttagttttggggagcagtaaagagttactatagctacagagagcctggagctattttatcaggcccagagcgtgcgctcagggacacttccctcatgcctgtgctggcacttcctaccctggacatggttgtggttccaggtcgctaggtttgagagggtgttttccccaggtgatttccatgatggcttcattggctttgtcagtttacatctccgatagatgagagtaagagttcctgtttgccaacgacattaccaacatttgtcatttgcttctgaccagtttaaaaataaggttttcttaatgtgagggattagaacccagaacctggtagacacatggctgctcctgtggtcagctgtgaacatgggattcctgttcatgtgacatttggtccgtgatgttgtagtctggatttgaaggtcaatctgtaagttgactctcatagcatctgagggcatggagtgggagggtgtggggtgagtggcggtgaatctgagggttggggtgggtggctgtgatgctataatgttgtttttctgtagagtcctggggctccaagactgaggtctggacttagctccctgtctattgtggtcatctgagctcccgagcaagtcagtgacctctgctgttggaatctctggtggtttttgtttgatgagggtgtgggtgagtgttacgtaattcatttaaacacctgtcaatacatttggagtttttaagctgaaaatttggaaggcctcatccaggtgttgtaatgattgtgatgttaaacaactgtggcctgcccgactgttgtgttaattctccagcgtgacggcagcaccagtggctggtggtctccaagtcatcttctaccgtcctagacgcactgtgtagctgtgagagcctgttctagtgccctggctgtcctagactcacagtgtagactaagctggcctcaaacttagagagatccatctgcttctgtctccggagtgcacccccatggctggcatgacatttttagtgatacaaatttccattcaacattctggccctgttactctagagaaaacaacctaagacctggagatgaaggtatgactcttgtgttttccttgtgtttacttcataaatgggtttatttaaataaacttatgaccggtggctcaatttagagaaatgaggtgctttacctannnnnnnnnnnnnnnnnnnnnnnnnnnnnnnnnnnnnnnnnntgtttgtcatttgtgtcttcaagatgtaacacataacagaatatctgactctgctggtgtaattagcacagagttcatgaactgaaagtcagatccagtcaggtggtgactcacaccctaatcccagcatgcagaaggggaggagggctggtgggcatctctgaattccaaaccagcctgttgtacagagcaagttccaggacaccagagctacacagagaaacacacccccccacccccatctcttgcttctgctctggttgttgtcagaacatctaagtacttaggatagcgtctgtgttttatttttgtttgtgttctaatgtttgggtacttttgattcttgctgtagggtagatgttggatgcccccacccacaaagtccatttttaaaggctgatcctcagtggaactagtagggtttgtaaccttaaggaggtggagccagggaagttcttaggtctttggtgggggccgtgagagtctgtggtgatcgggtactccccactctgcacccttgcactcagctttgccaacagatgctccaaagcactggctggactctgaaaccacgagcctttctcgataattatctcaggtattctgtgatgcagtggaaagctaacagagtcattttcacatataatgtaactatattattagtcttgatttcattttttgctttgtatgtagtttgcatatgtgtgtatggttgtgcactcactgggtggcctgctttatcactgtcctatgcctttgaaacagtcactgaacttggagctaggctggtgacaagcaagccccagcaactgtcctgtctgccctgcactgccctgttacagacgcatggggccgtggccagcttccgggtaaagtgctagggacacctccaagttatttgcacagcaagtgttctttcccaccgagcatctccccagcctcaatagtcttggtattttaaaaagagatcagaaaattcccaggtccttaacagagtgtaatatatttcttaatgaatagctagaccagattcctggttctttgcatttgatccccgaacttagccaactcaattttctcagatgctctggcactgctaagtaaatttggaaactaggttagtatccatgaggtggtgaaaggttattggtgttgaggtggccgagtgtgtggtagggtgagctcttacctgaggaggaaatgtctgttggcctgaagttacctgaaggcagcagaggacgaggaaatggccttttctgatggacctgggaggggggggttgggaagccgcacagacggcccgaagcctctacccatgcttcagggtcagtggcaggagcagacctcctgactgggaagagctgtgggaggctgcagggcccaggcttccgtagaaccctccctggccaccttggcctggactcctatccctacgctgctgaccttcagacatgcttcttcttgattctctgcttctcgagtggcttctcccacatggctcgggtgcatgtatgagttcattttgttaggcatggtttgcaaagttgtgccctgtgatttacacacacacacacacacacacacacacacacacacacacacacacacacacacaatctgtctttttctttgagtatctaattacactgaagcacaggccagattcttttcaaaagttctcaccattttcaaacgttcagcttctagagtttggcatttgatttgttttctagagtcctgagctttcccttgtagttttgggtggattattattgttgtgaatatgtgaaaattcatatgatcagaaatttctcatcttttttaaattggatgactgtataaacttgaacagcatctcagtcggaccatgcatttcacaagtgtgtgttgtgtgtacaagctcctcatgcctgtggaaagtgatggaaacgtgctctctagttaagtggcaggtaagacagagagagcatgtgtgcatgcatatccaaatacgtgcacacacaacatgcatgtatgtgcgtgtgtgtgtgtgtgtgtgtgtgtgtgcgtgcgtgcgtgcgcgcgtgagagagagagagagagagagagagagagagagagagagcacatgcactgaatttttaccgttttctgagcactgaacattgatttcaatccctgttaggccatgctgcacacctcactgtgttcagtgcttaccatctaaaatacaaggatgtgacagcttttccctagaattatgctatgagcatttcctttaatagggatattttctgaaataatataactatcaaaaattaatttatcctttcttcagttaaaggagagacatatagaagcttatgaatctgtaaggctgataaaagcacctacctctaaacctgagagcctgagttagttcccagagcccacaagttgtcctctggctgctacgtgcaccatggtatgtgcctgtgtgaacacttccatgcgcacacacacaaacacgcataagtaaatgtaaaaaacaaaactgtagtttaagtggcccagatgaaggctgagctgagagtggctgcacgtggagggcaggatgccacccaggtcttctctgggcctcaggggagtgagtcacataggtgaggtctgtgctgatcactgtcacttccattgtttggatttcctcatgtcccttggattatcttcaagagtctcacatcttcactggtgacatttgcactgttttgattaacttgtttttagtgaggaaaaaacttgacttgtgtgatatggaacatctttgctgagacaattgcatgtaatactagtttattttctcacttctaagtgatattagacatagtttttgtaattttttgtctcctcttccataaatataatttgcttagatagttccctaaatattttttttaaagaaacagtatctgtgaaactgaatcagtagtctatctgttttgtctaagctccagggaaactgcagagtacaggtgggaatagtgtgggccctgctccactgagatgagtggctttgggagcaccgttcatcagaaacctccatgccctgtattccccacttcctcttgggcactggctgtgagctctgtgcatctgattttgcagcaatggccctgaaccatccttcagaactaatgttagaattcttggcactcacaggaactgggttacatctctcctgaaacagcattagtgattacatgtgtccatttcctaagtgcttactgtcagagcagacacttactaggaaggtgagcctgggtgagtgtcctagtgctctctgcctcagtttcctcacttacttatgtcttgtagtactcagatgggcaatgaaaggttagaggcaggcaggcaggcaggcagagacagtttactgactgacattctgtcacacagtaagaccttagtgctaagtccttgttgtagaacgttgattgagttagtaaagaagaatacattgatttccatttggttggctttttgtcctggagggagaactgccacagtgtgcttgtcctcagtccaccttccgatatcaccgctttctccacagattttcagtacaagtacctaacgtttgctcactgcccatcgaagtgattagtggcatgttcagtcttcacaggggctctagggtgtacacagcattaggagaggctgcccactcacactaacagaagacacactgcaagacagatgcttttcgtaccaccgcaagaaatgggttccaatagttcattgttttcatatttttttgtttaagagtttttgtgtcaataaaaccaaacagtaggaaaatcagcagccatgtatggctttctcatgctaacattctgtccctggctctgcctctgctgggccctggtcttgaatatgtacacagctgtgccaattgatgctctgcattgctgtggttcttttccagttggttcagtgaactctgagccactgtggttttggatgtgatctgcctgtctcccaaaggcatgcatgttggaagcctggtaccttgagttgctgtgatgggtcattctggacctttaagaggggggttccaggggagatgccctcagaaggaatccaggtagtcctcctaggaccccggttatttctggcaagagggctgtttaaaacaggggcctgttcaccgctgcccagccccatctgacaccttgcttcccatcttgttgacttgtgccactgtgaggtgccctccatagtcaccccactggagggcagactcatggactccctcatcttgtctctgttcagacgaccacagcatcttccgtgtgcctgggggaaatagccggtgaagagcccctagcttcctccacccaagccttcaccaggtagagccaactgtttggggcattcattgataggttagtgatttgaaacctaactggaatatggggaggacggaggggggaaatggcgcatgtgctgaaagcagtgcattgtgggacctggcactcccgtcagagttgacccctagagagatggggactgttaagatctgcttgcagtgggtgctcacactggaggccgtgagctaggcccatggtgtggtagtggcccactgtgctgttttcttctctcctgccgttgtcagggtttgatgtcaggctcatagtcccatgcagaggacttcctatggcagtgcaccctgtcagccagaagccaagagtccattctgtccatggttctttgtgatttccaaaaggtaacccaggcagttgtgaataacgaactacttagtttgtcagtgtacatagaaagagaccggaaagcagagctaatgtctgtcttctgaagtggataaagattttgctcatttttgaattacagttattacatgaaaattgtgcatttgtacttaaaccctagttaagaagcaaaattttacccatttaaaaaaacatttgtgtgcgtgtctttgtttctgtctgtcagagtatttgcacaaatatgtatgcaggtgcccatggaggccaaaacagagcattggattacaggctttgcaagctgtctaacatggtgcaaggattaaacccccagcctccatgatagagcagcaaggatccaaatcccaccctctgtgatagatgatagagaagcaacccttctccagccctgagccacctctctctgcagctcagcacaggctgatgcatgagaaagcatctttctttgttagttaggcacgtgttcccagatgctgatcaaggagctgctggtgaataccactgggtgtggaaataatctcgtgtgactatggagttagtatcatatatggcttaggaacatggatgtgtcaggacagtatctgagatgagcttggaaaaaaggaaatggcctttggaatgtcacagtaagagataaattaaaaactagttactggttacaatcaactgaaaggtttaaggaggggttgtcaggatggctcagcaggtaaaggagcttgctgtaacccttccactctagtcagttgctgggacctagggtagaaaaccagaaccattccctgcaagttgtcctttgacctccacacccatgtgctcccacagacagacagacagacagacagacagacagacacacacacacacacacacacacacacacacacacacacactataatagaaaattttttaaagttgaagaaaataggcccttcttaatagaaggattgatattttcatgccaataactttatctggactcagaatgttttatactgaatgtgatttaaattttaaatatgaatcctttaaaaaaattaaggttgttggctgttcttggatacatgatacaataatttaaaatgtcccttattttttccaaaatttttcattgctaataactttctgtataatagaaatttctattttttttaaagataggatttccatctacagaaataacttgaattcataattcagaagttgcttgagcttgttctgtttgaccatattaatcattctgaactatagagtctgactttagaagaggtggtgggcactggcagtgaagacattccacgatgagggaaagctggactccctccaagcaaaagagcgtattcattatcatttccaggggcctccgtaactgaaagggctgggacacatttccgttttatactttttgttttgttttgtttttgtttttgtttttcgagacagggtttctctgtgtagctttggagcctatcctggcactcgctctggagaccaggctgacctcaaactcagagatccacctgcctctgcctccggagtgctgggattaaaagcatgcatcaccgacgcccggctcacatttccgttttatatacaggcatagttttcacacgatgtggcctgcagcctgtatttcagtaggatgtgttacaggcatgtctgtggtttgcatgtgaagtgtctcccacttggtgctcaccagcagtatggttttgagagactgtggagcctttgacgtgaggtctagcaggcagctgtaaggccatgggattagggtttaaggattctatgccagctccaattttaccctacgtagaattcctgatccactgagatgtgagcaggctacctcacacatgagctatcaggaagcccacatgccttcccctccatgatggacctaaagccaaagtaaagccttattctcttgagttgcttgctacaggtcatctgtcacattagtggaaatgctagtaacagactctcttcccgcatgccacattgctgatttacatttgatacaacttagcccatttctctattgtgggacacaatcttttgttaacgccccaagcttgcccatatgctccttctgtgcttgcttcttgtgtcccaggagttaatttgttcaatagttatcacaaagatgctgtctctgtgaatactcagcacggtgcctgccctccttaaagtctgaatacacagcacagcgcttgccctctataaagtctgtgtgagggctagagagatggctcagaggttaggagcactgactgctcttccgcttgccctctataaagtctgtgtgagggctggagagatggctcagaggttaggagcactgactgctcttccagaggacctgagttcaattcccagcaaccacatagtgactcacaaccatcccttatgagatctggtgccctcttctggtgtgcagatatacatggaagcagaatgttgtatacataataaataagtaaaattaaaaaaaaagtctgtgtgaacacgcatctggtaattgacatttttctaggctcagtgttctatgagcctctgtcacaacagtttgtaaatcaatacataacaacaatcaacccattttacatgctacagttaaaacactcagtacacattctgctgcattaatactgttaggtgtatttttccatcagtcgcagcagactctagacaacacaccattgctgtgcctgggggaggagcagttcagtaggcggcaattcagcctacacagggtgcctgtaatcccagcactcgggaggcagaggcaggcgcatctctgtgagttcgaggccagcctggtctacgaagaaaattccaggacagtctcttaaacctacagagaaaccctgtttcaaaaaaccaaaagaaagaaaggatgaaaggaaggaagaaaaagaaatgagaggctggtggacccggtttagtctctgctgggaatgtgtctgcagcagctcagacttttctctgtgctgctcatggcctgtcctcaggtgactgtcagaaccccagtgctggtttttagggtcaccgttttctgcaggtgtcgtggatcccctgtgggtcttgtgagatacctccacacacttgaaccatcttcacatcctctcgagtccatgcagctcagccgcagactccaacaaaaactaagatgctagaattgcaaatgtagaaatctcgaaagaaaaacaagtacctaggtgtgttgctgctgttggaggacttgactgtgtcactgttgctgctgttggaggaattgactgtgtcactgttgctgctgttggaggacttgaccatgtcactgttgctgctgcctgtatttcagtaggatgtgttacaggcatgtctgtggtttgcatgtgaagtgtctcccacttggtgctcaccagcagtatggttttgagagactgtggagcctttgacgtgaggtctagcaggcagctgtaaggccatgggattagggtttaaggattctatgccagctccaattttaccctacgtagaattcctgatccactgagatgtgagcaggcccatcccaaattctccctgggatgcccaagtcattttctcccttactgctcacctgcaggcagtatagtgtgggccttctaattaccccgtggtcaagtctgggcactgggcatatttctggggatcaggacttcagaaggtttcgcctcctggagagttatgcttccgggcttctgttggaaagatggagatactggctctttaggtgatgctcacaaatgagagtggtttttaggcgagttgagatgatgatagtgtagctccccaaatctacagaagccatgttcacctactgacgtatgtcttcatctccaagtaaggctggtccctccagcccgggcaagaggcctctgctcacagtgtgggtttgtgttagaagtagtgtctctgacatgggctgtgcgtgtgtttgtgtttgcaatcacgattaaaagttcaagtgaagcaattcttactcggattggaaagtatgtggtggtatgccaaagcttaaatagtgatctagaacagaggtgctaaaggttacagtggggtctggaacataggtgctgaagtttaaatagggagctagaccgtagatgattaacagagtgaaatcacggaaagtggggggggggcactgaggacagtgggtcattgcagtcacagaggatgtgagctctggggacccactattaggccatactgtgtctagaggtaactcctctatcatgtacttaaaactgagacatcagcctggaactagagcctgagggctcctttcctgtggtgcatttctttggaaggaaaggatttcagtgagatccagagctttctcaagattaaggtttttaatggaaaataataaaatgttattaactagtcttcaattcagaatctttaatttaacaaaggagtatgtaatgtctgatctaaattttgtccaaagacataataccaagagttatatttttggtgaatggggggttcacagaacagggtatctggtggatgagatgtttagtgaatggagtgtcagatgaacagggggcatctggtgaacaggggtgtctggtgggtggggtgtctggtgggttggggtgtctggtgaacaggggtgtctggtgaacaggggtgtctggtgaacaggggtgtctggtgggtggggtgtctggtgaactggttgtctggtggacgggtatctggtaagaagggagctgtgtcctgtcaggactcctgtctccattcctcagtcatctcagaatgatgatgtgactgtatatctaacaggcatttgccagctagtgaaggcatcaggaagtgtgctgaggaacttgctgaagtccatggacttctttgtttctgtgggatgtgatctctacccctgccctggctgttaacatctcacagggcaccatagagggctgggccagcattctgggaagttagcatcaggagctcccatccttttgtgctgacagaaagttgctttggcgccctggagtcttggttctcttcacttgtccaccacaggccttaaggcctcatgagaatgcacacgggacaagaaaagactttagtgttttgtgtaagatttttaatgttgtcggggctggagagatggctcagaggttaagagcactgtctgctcttccagaggtcctgagttcaattcccagcaaccacatggtggctcacaaccatccgtaatgagatctggtgccctcttctggtctgcaggggtacatgagaagggacgattaagttaagtcttctgattggcacatagtgtggccacattgttttcaaaggactgggtaaacagtgaatactgggaagggcatgttttatattgttgaggtagctcttctgacttaatgaaatcaagaaaccagctgtgagaaaaagacagacatgtatgaggggacaatctccttcagcccggtgtccatagccctggtctcagcagctcacagaggtctgtggaggccaggggaatgtgacacaagaatgcacactggtcagcaggacagcgcagcaagtgtgattaaaacggttcagtcatttatgagtcgctgacactatactgaggaacaaattgagaagagagagacagcaccagcatgccattgagcgagtagacctgggacacaattcaagttgctttgagagtaaagcaatgctaacaagagtcgggtgggcatgtggtcggagccacttacccctaggagttctgcccagactttaaccacagtgcggtatttggtgttgtactgctatagttcatatactatagggaagaagttttcttcatttaaaaagcgatgttttaccttttgtagctaatatagactctgcctctctgtgattccaaagccagagccatgacctgaaaccccgatgaccaccgtcagggccgctggtgaccggcaagtgcatcatggaacttaaagtatgggtggacggagtccagaggattgtttgtggggtcactgaagtcacaacttgccaggaggttgtaatagccttagcccaagctataggtaagtaaaatctgtcaagttaaaccaaacaaacaaaaaacgcaaaacggtatttgatccttgtggggtgtggtagtgctgtgtgtgcaaaagctaattttctgagcatcttgataaaaactcctgaaagttaacttaaggggtggggggagatttgggctcatggcttcagatggttcagcctatagtttcctggcttaagatgtctgggcagagcatccaggtcataggagtgcgtgggtgcagaggggagggggaggccttatttccttcccagccgcagcccaccccagggcctcatccctgcactgactgtccccctggctgcagctttctcagaaggtacctccccagaattctggcgcctctgtcgcaggttccccttcaccctcacagcttcacacattgacctcacagagtggccttccttgggctgttgtgcacagtaagaaaaccctgagagaaacacttctaaggcagccctactaacatgcctccgtccatagaaagtccctcaggcgatggaacgcccactcttgagtctgtgagcgatgtggtatggccaggctctgagattctgtgagggcaattcctgttgacacatcacacgcacatggcttctgtactgttgactggccacgcccttgtccgcagcatgctccttttctagtcattgcactgtatttaaagtgtgctcagccttttccatccagttcttacggtgagcctggctcggtagccagcagtgcctgtgccccagcctcatgccatgctgtcctcagacactccccaccagatcagtgacgccgtcctgtttaaactccaccttccagcaagtctcaactatgaacaaaatgtagacaaattctttgccacaacacagcacaaataaatgacttctaatccagttcccaactgagttttgttctcatctgaaattcccaaggcaagccttcattgtcctcattcccttcagaactctgctcttctgaacttttaccaaaatccccattaactctatttgcagcattctactgcttttgatttttctagcctgtgtctccaaactcttccaagttcatcccacaaactacttcaaaggctttaaaaaccgacctggtcagacttaacaatagcagtattcttggcatcagttttctgtattagttacttttacctcgttactaccagctgcttgacacagaatcttcatgtgagtattattggtttgttttgtagtttgagggtatccgtcccatcacggcagggaaggatgtaacagagctcacttttggagcctatcctagtcattgttctattgctatgaagagaagccatgaccagggcagctctctaagaaaaagcattaactgggggctaacttactggcggggagcatggcagcatgcgggcaggtgcggtgctagagaagtagctgagagctgcaggcagagggagactgggtgtggcatgagttttggatacctcagtgcctatcttccatgatgcaattcctccagcaaggccacacctactgtaataaggccacacctcctaatctttctcaaatagtaccactccctggtcaccaggcattcaaacatatgagcctatgggggccattcttttttaaaccaccacagtgtccaagtcaaaaaagtgaccgtaggaagaggcaagaagtggtcccaaaggacatgatcctatggaccaaccgcccccagttaggctccatttcctgcgtacagtcataagtccatcggaggatggatctgtctgtttggtcagggccctaattatcacctctagaaataccagcacagacaccacaggtctgtgtgctcctagcctaggctctcccagtccatccagtggacctctaacccatgtgtgggtacacacgtgcattcttttctggtgggcttggctccacagctctcggggcactttcctttgtcaccctttgcctgtggcttatcaggctgtggtgaggcttgctctctgacctgctccacgtccagagtctgctctacctgctccagctgtttatcttaagtagtgatctttttaaattatacatgttcccaagtccagagcagattcctagtttccagaatccctcatgagttaaaccctgcttattgtcgatttctgaatacatttaaaataaagattaaagtgaattaaatagtatttctttattaaacagaaatgtgtacttaatttttttttaatatactgaagatgtttcgtgccatgaagtctgtttctagccacatttcctgggtctgtcttcctattctgttttaacttcccttctaatttattttaagcttttctttaaaagtatatatttgaaaaaggaaaacaaattaaaaataagtctctctacatacacactcatgtgctcacacacaaacacacatagacacacacacacacacacacacacacacatatacacatttatattacatacctctgtatgaaaacttcccatgctagtagggattgaacttagagactcaggaaagataaccaagtgctcttcagcagactgacctctgtccccaacgagcttgttattcctgttttgagacagggtaccaccagcttacccagactggccttggactactctgtaccctaggcaagtcttgaacttacaatcctcctgcttgggcctcctgagccaccaggctctgtttaaggttttatcagagtttatacatacttattagttggctttagatttttttggaacacagggcataaacatctgtcgcataaaaaacgagtaatgcgttcagagtttctgtttgcacgtaaatctattatttagcaaacagtattaagaggaagctgcgtccagcaccatgctaagtgctcagttcctctttgtccctgcactcctagtcaaaagtttgcatgggaagcatgtcaggtcagctcaggattgaaatgggtcacctgttgccagcgcacttgcagtgtggcaggtctgctaaatgctgactgagattctttccttttccatagatctgtattaaagcagcgccagatgccaggctttccattagtgaaacacctctcatccaagacctgagcttaactgtggaaggggattaaggcattgtcttttctgccaacacagtcaatattccttttaagaacctcccatgatgttgaattgagacaagccagaattcagcaaagattaagacatcaactagaaatttatcttgaattttttaaaagtaattttttatggtttccttcctctcttcctccattcctccctccctcctttctcatcccaggcccctcccccatccactcctcctttgtttgtattcaggaaagggcaggactcccgtggatatcaacaaacatggcttgtcaggttgcagtaagagtcagcacctcagcttgtagtaaggctgggcaaggtgacccagtatatggaatagattcccaaaagcctggaagagtccgagacaattcctgcccccaccgttaggagtcccacagaagttttaaagacagggtctcgctatgtagaccaggctggccttgacctgtggcaaccctcctgtttcggtcatccaagtactgggtaacaggcacttaatttccttctaggtttgacctctacaaaggtcaaaccagctgagtaggtgcggtaagctgcatcttttcatatgatagccacatattctgcagagaattccgtggagaaaatacctcttcaccagatgtgtgtttcttcatttagaatgaagaatgtacttaacctgtgaacaaatgttttaactgaaccaactaccctgtttttcctttctcgataagtcacttcaagacctgctttgaaatgctgaaaacttgaatatagatgttttatgatgttacttcacatttggcctaaaaaatctttttctgtgtcataaacacttaattgaatacagagctcatctgagcagcgactttgactggtgacagcctgcagctgcttcctgtctgccatgagacttcccagccacactcttaactgctccagctatttaaactgtagtcggtgttttatttgccattacgtatttatgtcacatttacttaacagcgaagactgttagtgccacaggcaactagatgggcagacagactgatggaccttcttatggtctgcttctgagttgctgggggagtgtgcatacccacacatccggatgccatgtatggacagtaatgaagagagtacgctatttgtcagcagcgctcagagtggcttcatactccactctaattgctcgatggcggtctgcgttgtctttataggacagtaactactaatgctcgctttgtttgatgtgtgtgcatgtgtgtgtgttaaaaatgtgcatgcatgtgttacctgcctgttttaagagtcatttctcatgcactgtctgcctttttgtttgagacagcctctcactgccccaaatcccacagggatcataggtgtgtcctgttgttccaatgtgttcggtgggttccgggctctgagctcaggttgttccaatgtgtttggtgggttctgggctctgagctcaggttgttccaatgtgtttggtgggttctgggctccgagctcaggttgtcccaatgtgtttgttgggttccgggctctgagctcaggtgctcatgtttagggcttggattcttactgactgatgtatattctcagcctctaaggtacgtgttcaacaaacccaacatagcacccaccttaaaggaaaatgtttatgaatgtgctcacatctatatcattacattatcttttttcttctttgtattatatttatttatgggaggcagcaaatataccaaagctcatgtgtggaggccagaaaatttttttcaggactcagttctttgtttccaccatgtgtttcccagggatcgccaggcttggtgacaagcatctttaccctcttagccctctttctggcccctatattgtcttttgaaagtttatttcaattctgtaattagtaggtaaagcctattttttatttaaatgattttactgtgttttgtctctaataataaaatctaaattttgctggtttttttttttttttagaagaacctttgaaactattataatcaagactaaaccaaattcctctcatacccccttttcacgggaagttatttggaagggccatcttcactgggcagctacagctgtgtgagctataggccaggggagtactcaggcgtgtgtcctgttgtgtgtcccgaccccccctcccccgcctgggcctgcaatgagcactgactctgggcctctcttgtcaagggtcccacagtaagaatctctgtaccttcagaagctctttttgactcctgggactttgccctctttgctgtgggggaagcattcacaatgctttcctttgttcagtctttcccagaagttccaaacacttagatgtttgaccagagtgtagtgttcttagaggaaatgggaagagggtgtctaacagctaggggatactcacagttcagatgataggaagtggggtgtctaacagctgggggacgctcacagttcagatgataggaagtggggtgtctaacagctgggggacgctcacagttcagatgataggaagtggggtgtctaacagctgggggacgctcacagttcagatgataggaagtggggtgtctaacagctgggggacgctcacagttcagttgctgtgtcacagcttccagagcccccatgttttctgaagctgccagaggaacctggactctgagctttgacatttagatgctgcccgagaacagttgtcatacattatcgtgaggtacattacatgtcccactgtgactgtgtactctgctcttttctgtctaggtcgaactggaaggtacacccttatagaaaaatggagagacactgagagacacttggcaccacacgaaaaccccatcatatccttaaacaagtgggggcagtatgctagtgacgtacagctcattttgcgacggactgggccgtctctcagcgagcggcccacctcagacagcgtggcccggatccctgaaagaactttgtaccgacagagcctgccccccttagccaaactgcggcctcaggtggacaagtcgatgaaaaggagggagcctaaaagaaaatctctgaccttcacaggaggcgccaaagggctgatggacatttttggaaaaggtaaagaagctgagtttaggcagaaagtgttgagtaattgcaggtccacagcagaagagctaaggaggctgatccggctccagacagataagctgctggccatcgagcagcagctggagtccagtgagacagagatacggttctgggagcagaagtacaattccagtctggaagaggaaattgtccgcctcgagcaaaagatcaaaaggaatgatgtagagatcgaggaggaggagttttgggaaaatgaactacagatcgaacaagaaaatgagaagcagctgcaggaccagctggatgagatccggcagaaagtcacggactgcgacagcaagctgaaggactacctggcgcagatccagaagatggaaagtggtcttgaagcagagaagctacacctggaagttgaggaggcgcaggtcaacgaggaggagatgaaggggaagattgaaaaggtcaggggggagatggacctccaggggcagcagagcctgcggctggagaacggcatcagagcggtggagaggtctctggggcaggccaccaagcggctacaggtaaggaagggcccctgtctcagtgcgcaggacacctcatccgtgtaaggtggttctgtagctcgggcctgtctgtcgtagccttaggaaccttagacggagaatttcatgataatcttgctttcctcatgttataaaatagatattactagattcaactccagcatcttatcaaaactaagaacgctaactcttgtgaaccgaactaattttcaataggttataaagtatgtaagagggaaatttgtgaccaggtgagcaagattgtagtagtgctaagatgtatattaaactagtgatttttgatgacagattaagaacatacatttatttttatgagtatgtgtcgacatccagcagggaaccctcacgtaagccaagtgtgtcaaatgagtcctgacagtggccccatctgccaccccctcctctatagcaggctttgtcccacagaccacttacagcatggctggtgttttccaaccaggacaaggaacaggaactggagcagttgaccaaagagctgcgacaagtcaacctccagcagttcatccagcagacggggacaaaggtcaccgtgctgccagctgagcccactgaaatagaggcctcccaggcagacatagaaacaggtaaggccttcctttattctccttggtaagtcacctaaaatgacagccatcaaatgggtagcatttgggaaatctgttttcttggatggtcacatttttttttaaaactgcttctttacagacatgtttgccaaactataaatatgaatatggctatgttaactgcatcctggcaattctcctaattaattctcctgattcccgctcccttccaagtctttgctgtttatctgtcctggagttgaaacttctcctgtatgtactgttccctcagcaactgggaggaagcaacagggcaaagccctctggtctttgggaactggttcatagccacagctcttgtcttcttcttccttgatctttggggtgggaatttaacgagttttctggttatctggttcaccagaccactgtccatttcctgtttagagacaccattccagtctgggtccctgaagcgacctggctcatcgaggcagctccccagtaatcttcgtattctgcagaaccccatctcctctggatttaatcctgaaggcatctatgtatgacactgtcttcaggagaaggatccagccaaggtaccaaggacagtaaatccttcagtttgtgccaactgaacagggtctgttcccaagccactgtgtcctctcccgatcacaaaccacgtggagccctgtgcactgatgctgaacacggagcctgttcacacttcgcagtattgacatgttgtccagcagctgaaatgcaaagccttcgtttttatttgtagcattcagagagcattagaaaagtattaatctatgtttatacacgaataaaccctgcattgagagtaaagttatgtaactgtttagttaatttattccatgtaactgattgatgaatgaatgttgctgttaatattttattagtcctcatcctgtgacttacctgtgttaaatattgtgggttctgactgtgcatgttggcagactccgtccagctttgctcatgtacagctacacagcctcctgagggcttcactccagaccgactccaatggagctcgacgcacttaacactggcgcctctccccgcccctcctaggcgagataattcagctttctggtctggaagttaataatttctttacagtatttcccaacatgaattaccacagcatcacagaaatatcttcagtggggtaaatggttcatgtaaaatgcttatggtcatagactgctggctgcgcaactggaggcggtcctgggtttcctgacacactctgaggccttcctgcctcagcaccacctccgcctcccgtggatcctcgtggtgacagaatgtgagaaggagggatccccgaggatggcgttgctgtactttgggaatggtatgatggatttcagaacaacccacttctgtgtagtccatgcatgcatagcgggggaggtgctgcttgccatgatttaaaacatgggctgtgtgttttctctagtcactgagtcaaatgtagagaacactgcagtcaggtatttttttaccaaggaaataaaattaaattcagagtatgtttttatttttaagtttgactttataggatattagtctccatttatatttatatcattttgtgtattaagccaaaaaaaaagagtcaatgcttttctcatgaacagtgacttagctacattcacaagtgatttttagacgtgctgtcagacgccttgcagccctctgctttttctctgagtacatttggcacagtgtaactaagactttaatctgaaacttaaagtagttttcaattctaaagagaaaacattctctgtgttacttacatgcaataaaataaaagcggattgatacagcaatgccatggtaacaccgaaggcaactctgggtggttggccacacccagcttgcttttaagttaatgaatgtttaatggagctgagaatgctgctggatttaggtttccaaggagaagatttagtagatgcttctcaagaactgaaagccatgaatgttgcctcttacccacataaataaatagcagaccttaactgaaacactatctttgtgtcctaagacttaccaagtagatcttgccgttactgctttgcagcagttgacctgagagggaaccatggcctgcacacacttgccccagactggtaacaattgtttcatatctatgtgtatttaaaaatagtaatttgatgtcaaagtaacctatagctttttgtgacagtggtgactccatgtgcccagtacatgcctttctctcagtctctcctacacagagtcattctgttgttcggctaaattaacccttgatcacaaaggagaacattatacaaatggattgtcttctatttaaaccacagtgttaactgcaagtatgttaggctctatggtgagaaattaaagacaaagctggacatggtggctcatgactatgatcccagcactcaggagactgaggcagcagagttacataagatcctggctcttctaagttacatggaagttctagagtaaaaggggctagagtgcgagaccctgcctcaaaaaagaaagaacaggacctgcacggatccctggcagagcatcacatcgcacagctcacacggttgttaggaactgccaggtttgactagaaactctaaagcaggcgacacacgccaccagctctccgcagtcctggctctccaccagtgtcacacttaacatccctaacaacctcagaactctgaagctgccggctaccctcctaattactcacacaagcacggcctcccagatgggcggggtgcggccatgtgatttcacaaacaggctctgcagttgtctttgtcaccagttaagggacttctgcaagcacacctctgtttacctattatgactacaaatgaattggtttacaagccccgtctttcgccacatctcagcagagaggtgcaggcaatgggattcaaaaaataccaaatgggggataagtatccaggttctaaataataaattaggtcacaaatttttgtgtctttttaactagtactgaagttatattatgcggtttttctacaggtattaaatatattacaagttttattcttaccaatgaataatttgaatatcattggcctgtctgacctctaggtcatcatcattctcagagactcacccacagcgggttacctcagtggtgtgtgtgtgtgtgtgtgtgtgtgtgtgtgtgtgtgtgttttattttctcacttcctttatattttggctgttaacgtcccttttttgtctccgtgaacaggaaagtttttatgtgaggcttcagttggtgttgaagttgccctctgaaggcccagttagttattgaggggcagctcagtagctcctctagttgaaatcaggttgcaccccggcatgtacagtaaagacacagctcatgtatgacatgtggagtgtggtggcacagacagacagatcagcactgctcccacagccatgccctgtgtaacacatcgtttgtaagggcagagtggtccttggagacaagaactcttgtatcagggaatacctttccaagttaggaggacttcaacagattgaggaaataatatggaaaaagacaaggacaagcacctgacttcaggcatgcacagagacagacagtgttggacattgccttcgacagattaggcgcatatatgtattaaatgatgctctgtatccctctgtaatacaagcctgtcttgattagtccataccacactgtggtgatgctaccttagaagtattccttttgtatcatgtcagtgtttttaagttgcgtgttcgtactgtcttatagtgatatccacctccatacctgtaacactgaccacgtccaaaaggcgtgttccaggagaaggctgtcagctgtgtcaagaattcatggccatcagtatttatttagtattgctgcttcacgtttccctagtgcaccttgaacgccaggtcagtggctgcatcaaagctgtgggagatctttcacgtgcatttttttaaaatatatttttagaaaccaaatggctgcagatggctatttagcatactgttaaaccagcagaactctaaaggcaataaatgtatgcatatgtgttggggggtggggagagtgaaaatacaggtttacagccagacagggtgatagcccttcagtgcatttctcagtgtctcatcactgaccaagaaggatttgagttgctgcagctttagacagaaagtgtccatgttcactgactgtgggccataaatatgcttttagtatcgctttgctgatgtataaataagaaatctgtaatatgtattatatgtaattattttcttttgacttcatttcaaaatgtatattttctgattattatcatgagctataaagcgaaagatcaatatctgatattctcccaaataataaattttcaagactcattggggcagtacaattgttgttttctttcttataacacttaatacttcaagatataattttgtttcctttgaaagatggcaaagaaagtaggtctgtgtatcagtgatttaaaaatgacattgttttctaaatgcagttgttaacatgaagaattatgtattgctcagaaggtagcaactaggctggggagatgcctcataggaaaagtgcatgctgcacaacatgagagagacctgagttcagctccccagcacccatgtgacacgtggcacataccagtgctcagtgctaaggatcaaagacaagtggaccactgggctcattagccagccaaccacgctgaaacaggaagttccaagttcagtgggcgacccttggcacacctaagatggtgattgagaatagtacctgcagttgacctctgacctccccacagaagcgtgcacctgcacatggatgtgcacatgtgcacacactgcactcacacacccacacacacccacacacaccccacaataaataagaaaaagtagctgtttcattagagtagaacttataagaaactaatgcacccccccgccccacttatttcaaacatgaaaattagaaacttgccagcttgtattcctagatctcttaaaagctgtgtgagacagctttaatatgtgaacatgaactctgcagtacctggtggggggagggagagtgcagtgcagcctgagtaaaaactcctgtcatagtcagcccaggaactactgtgaataagcagctgctccccttgaaattcagatcttccagcacccagagcactttcctgtgtccctggcaacattgctggagctcacaggacagcatctgatgtgcaatgtgtccatctttgcaggaatattttataagtagaggctaaacccaagttaaggaaatgcgagtgcataatgccagaacggtcactgtaaacgcgactcctccctggctgcttacgctcttcgtgcagggcaccttaggagatgccaggagagtattgagtggactgaatctggcatggcttccccgcctggaggagagcactctctcacgacgtgaccaactcactccacatgcttacttcaattcaaggggtaaggggtagactagactgccatggaaccatggtggaagggcttccccagcagcccaagcaccaaaggacacctgagaaggtgacaggaagcagaagggcctctggcacaggctggggctagatggtgatgggcagaagggaatagagagcagacagacatggccgtgaaaggccctggttaccgcataaggagtttggatatggaatgcattagaggttcatatgttacactttgtcctgttttagaagattgtaacacctttggaacatagggcctagctggaagaaacaggtactggggccaggcctggagggcacagcactacacccactgacttctggcttcttggttcactgggattggagctgtcgtctgctttatgctccgaccgccacagagccacccaccacatgctctctcctccatgacgaactgcagcccctcaaactgtgagcctgggcctcagtaaacccttccttaagtaacaagtgcaggctgcatcctggctgtcattgacacttggagcatggaaatggcatgatcagattattatgtaaggaagacacttctggctaccaatgtggagtcatgtaacaaggcaccatgtaagaaacctagaagaactggccaaaggggggccagctaaggaaggcgccatggaggcttacatattaaaagggctctagagaacacccatttggtaccagaaattcagcagaggctggatggagcaactctcctaagcaaaggctcgtgggcacttctctgtgagtgacgtgagtggggcttcagacagaaggctaggcatattcttgagtctgttttagggatggcaaagtcacacataaaggcacttgtcaccaagctggacaacctgcattcaatcccaggaatccacatggtgggaggagagaactgactctttggatttccacatgtgtgtcatggcatgtgtcctcttgctcccatacaaaagaaatgtaagagtaatttttaggaaagaaaacatgctgtgtagaaagcagtctgttggcacctagtcatcccagtgtagcacagcagtcctactgtgtgagcatcatagaaagtcccagaacaatccaggctatagagtgagaccctgctttgatatacatggatgggtggatgatagattgatagaaagatagattgatagatagatagattgatagatagacagatgatagatgatagacagacagatgatagatagatagatagatgatagatagatgattgatagatatgatagacagatgatagatagacagatgataggtagacatgatagatagacagataatagatagacagatagatgattgatagatgatagatagatagacagatgacagatagatgatagtcagacagatagatggtagacagacagatgatagatagataaatgatagatgatagacatatagatagatagatgatatattagatagacagacagatgatagatagatgatagatagagagatgatagacagacagacagatagatggtagatagatgatagacagatgatagatagacagacagacagatagacagatagatagatcaaccagttaggtaggtagctacatgataggtaggtaatcttaactcttcatttaataaaagtagaaactgaggcccagagaaaatgtcagatggctcttatgaaacaggtgcaataaagcagccaatttaaaaaatttaattgtatgtatataagtgttgtgcctgcatgtatgtaggcatgtgtgtgcctggtgcccacagacaccagagagggaactagatcccctagaacaggaattaaggatggttgtgagctgccatgtgattctgggaactgaacctgagtcctctggaagagcagccagtgcttctgatgacaggaaaagaagacttgttggaaggagagggtgacaatgaataatttaaaatttaattaaaaagtctgtaagagtctacagacccaggttctcatgtcatctctgttccataagagctgcacaacaccacactggcaataattttctctggactgtggtttctacttttattaaatgaagtcaagattatttatttttaaatttatttattatttatgaaaggtttcactttatagtccactgtggcccatgctggcttcaaactcagtcttccaagtgctaggattgcgggtgcgtgcctccaggccaacttatttctgtcccttccagacctagcacaaaatggttttatacagaagacaagcagaagatgaggaaaacaaaaaccaaaacaaaaacatgaagttaaagaacagaggcctggtagatgtcggtccccaaagctacagacaagcagcagccggggaacagaacaaacagctagcctgaaagaagaagggtatctacccccacagcacccgctgaggaagggcttccgtctgtggctggatggagcatcccctagtctctgccatcacaccaccctgcagaatcacacggtcaggaagccgcctgtcactcccaaaggcccagcttgcaagcagtgggcactatgccccaatgctataccaaccccactaactttctaaaatgtactcatgtcttccctcctctgcttcagattaggtccaaccatcataagcaagtggtatcctctgtcttcttccatgcttggtcacaacctggccatgaattgcctgttcctttgacatccatcatccccacagggcagacactagggtgggcttcacgctgctttccttcccgttgccaggcactggttatacgtgtgcctccaagagatgtacgttgtattaaaaggcagatgtttgggtactgtctgctgcacatgagaaaatgagtcaggtcagaccacttgagcatgtggttctcagtggttccacagcacactccatgtctcctggtgatagctttgttggaagagggtgcaaggagatgcagcacagagacgagcagacgggccgggccctttgcacccacatgcctggtacacttcgtttccggtatccactcacctcacctacttgcaagcagtctcctgtctacagaaggcccggcttggcgtgtgatcccatggccttgcttcttcacagggaggaccgggagccagtgtattcaagcgtctgacttctctccttttacctacttcttatctgacacaaatgtcagacacagccactcaggttggagatgggtgagtgtatttctcaggagactcacttcgtaaccagctctcattcctaatctgggcttccatctttggcccagatacatgggagatacagtctgcacctccagcataaattaagaagaacagataatcttgtccaaataagtcttcatttcttcttctcttccacatgacagcatcggtacaaactgccagatgctggcttagtcctttgtgagtttccttatttgttttgtttaccacaactcggggtatgtacacccccgatagcctctcctcaacctgtcaactgtagaagctccagactgctgtcacacagagcgtgtgtagaaagagctgggacttggtctgtgtgaggctctcaggagaggcagacaagtcccttctagatcttcaaccactacaatagagtctattcaacagagctgctttctgagacttcgcactgcagggtgtcgctgcctggtcatctgatgccctctgcaggaagggtctgctttggctgttttggatccagaggtcctcaaggttgtgtattctctcggtcttcatggaaccaacactccatcctgtggctctgaaaatagtatccgtatttgtagccaactcggtggggctgaagttattcgaaagatgcacttgtgcccttgctttggctactggactactgaaacagtggaccccaagaaattagaactccccaggattctcaagatgggagaagagaaagcctagaccctgggccagcctgaggggaaacttcacagttggttagtctgccttacagaaacgggaatagtggatcagaggtggtggcaccacagtgaccagggctgcttgtatgtgcatgaactgctcccctgtttaaaacccaacctcaaatcaagaccctggtgatgggcttggggtagggaaccaatgaatgcctcttcccattggagactttccctttttctgctgttctaattggtttactgagaactaacagctgaacctggctgtctccctaagtccaggaacataattacccactgatccccactatcttaaaatctaagatttgtcttcatgctctaaatttcacttaaaaatgtttcttaaatttacacgaagaatcatactgggagacattcctctatggatgtacgtattctaatttcaatttacttatcttcaaaaatccttcctgtatccaacgtgttgccatcttgacttttctttattctgaatctgtaacccaagtctatttttacttaatcatcctgagagaaatgttggaccttgacaggaacctacctgtgcacatacgtccacatacatgaacacatacaagggctctctctctctctctctctctctctctctctctctctctctcacacacacacacacacacacacacacatgcacagacacaagggttcacacacacatatacatgcccacaaccaacatgcatacacaaacacacacacacacacacacacacacacacacacacacacacacacccatgaagatggcaaaagaaaatgagatggataaatctggggtgcgaatgacacgagggtctaggctgacttctgctgttgacatgacctttggcatcgtcatccagtgaggactgtcccgggtctgaaaatgagcccccattctcactcctagggcctccacccctgttagtatgttaacatgtactactgtattgtgtgttctgatcacagctgtgactcattcttaaagactaaacactcattcagaaagatcaatacattgcaaatgcctcaattatttttattatttcctctatttcccattcttttgttagcaagaatccctgggtgattcaagaactcagtgcctgcagtagccaacaatcttacactagggggcagcagctaccgtcagtcaattggcctaggctacaaagcctggctggtgaaccggtctgagcgaggaaggcctcactcacacaaaggtactctttgcaccaatcctccctgttgttgttttggaaaaagaaaggtctgcttactctaaggacttaagccaatcctttgccaacatagcaggggcacgttttatcagctgtgtgtcacagttctcctctgacatgacgaagtgacatttggtgggatcttttaaaattagtgttttagtatggtcttgtagtaatgggtgagttttacctctgtgagtttgaccagagggagttaaaccatgctgccggggccactagaatcaggagcaaacaggtctgtgtttacaaagagtaaagggttcagagggaggcttgccaggttgagcacggcagacccagactgtcagggagcacggaaggatcagaatgtcacagcagagtgtttgcaaaggcaggtgtattcgtgacttctctggccacagggacaagtacctggcaagagctaacatggaaggaacggtttgcttttgtttgtggtttgggcgtctatcgtggtggggtaggcctggtggcaggagcatgaggcagccagtcgcacggcatctgaagcaggaagcccagagaggtgaacactggtgctcagctcactttctcttttttagggtctaggacccagcccgggcatgatgttgcctgtgatggaggtgggtctttctagtttaaccaattcagaaaatcccttaacagacacacccagagttttgtctcctagagactgttgagatgacaacagtaaccctgtgatcagtgggtatatttacaaaggtacaaagggagcagcaccacctggtgcctgcgtgttctcaaagacagcataggatattgtatccacgagttccaacgaaattttccaactaagaatattacagaaagtagattaaagctccacaaaacagtgccctgtccttctgaacccagactgtttgacaagattcagtacagagtgtctttctatacaagttagtggctctcagctagagcagttctaccagctaggggacatgagaaaatccccatgtctttggtggccccaataattagaggcagtgattctctttaatgtggtagagggataactcatgacaagaaaactgtagtgcaatttttaaagtaggccaaggtctcaattttcaaaccatgcaaatagccagattgatgaaaagaaaatgctcagggttgccaaatgaaaatcacagcgagctagcgcctcacgtagtagaatgacttctgtggacaaaagacggaagtaacattagagtgtggagaatgggagaatgtaaagcagtactgcatcctgggaaacagtggaactacctaatgacccggcactcctctcctgggtatccgccaaataatgagctccattatgacaaaagggtagccacactcatgcccactgcaacatgctcacagcagatcagtggagttacacacacacacacacacacacacacacacacacacacacacacacgtgcacatgcacacccatacacacacgaaggcatattatcctgctccaaaaaggaagaaatttgtaacaaaacaaatgaacctgaaagacattatactaaatcaccttcatcatccagacacagaaacactccatattctcatctaggaggggtgtgtgtgcgcacgcattcatgcatgcatgcaggagctcacatgagtgcgtgtgtggtcaagttctggacttagatggtcgctgggaggaagcagagtggagcggggaagaggtgctggtttgggccagaattaagtaaaaaacattattttgtgtgtgtggaatggtcttgacatcacagcccagcagggcagccagagtaaaacagctagggcagtgtctcactgcaaataagccctgatgttatagggcaatggataagttattagttgatgttatcattccatgtcattcacataccacagagtatcccatcaccctacaaacgtggcatgcaaagatttgtcaatcagaatatgactgacttacaaacacagagggagtaggttatgttaagcgtctatgctacacggaacagaccccaaaatgaagagttatcatctgggtatgtggcacttacccattatctcagcaagcaagaggaatcgggagttgaatactagcctgggctacgtgggaccctcactcaaaaaaaaaaaaaaaaaaaaaagagagggagaagagaaaattattgtcccaagtctctccctgcttttagaacctccctctactctctatgtaatcacaaagtgtttttagcacagctttaatataattgagacaggtgagttgaggagagtgctggttattgacgtcacacgatcaggttgttagctctcacatgctcacaggtaccctaccaccaggctgcatcccccatccttggatttgggggacaatgtcacactctgtattgtgggtaggttcagacccgtggtcatcttcctgcctcagcctctgagtgctgatattcccagtgtgttccacgatgccaggtgagctgttaagtgtctttgacgtttctgtgggactgagtcgtcagggtcagctctgagctctgggttcctggcggttgtcagtgagtagacatgtcaccacacctttctagctgtctcttggagcagcgactgtcaatgaggttcctgggtttgttaaactctaacattttctcattgtcaccttcggggagtgtcactgtgatttgtgtttaacgtgttcactttcttgttttgtttctgtttttgagacagggtttctctgtgtagctctggctgtcctggaacttgctctgtagaccaaactggccttgaactcggatcaccttcctctgcctcccgagtgctggggttaaaggcattcttcaccaccacctggcgtctgttcacttctatacttagatctctttcttccctcttatttattctttatttgtggtttctttttggtcttttatttgttttagtctgtggtgttgggaagatggaactcagggatttcttgatgcttggcaagtgctttccatagagctatgtccccagatttcttatgtttgatttttgagaaaggatctcactgaactgcccaggttggccttgaactcactgcagcccatgtaggccctgaagtcctgcctcagcctcctaggtagattggatgaccatcctgcatcaccaagcctggcccagctttctgctttttatgaagttctagggaaacaacctaaggccttgtgtacaccatggagccatatctgcccctttcctacgtatttaaattaaaaggaatatatatttaaattatatgttatagaatcaattttctatggatttctatgtttctggctagtaaagtactagaacaaaatatttgttatataaaagggatatttgatctcataggtttgagagatgcaactgtagaaatcccctcctgtataaactcctgatcactgcacccagccaggaaatagcaataagaaataattactaagccgggcatcatggcccacacctttaatcccagcactgattcaggaggtagaggcaggaggatctctgtgagtctgagaccagcctggtctacttaggaaattctaggccagccagggctacatagtgagatcctgttttaaaacagcaagggcagaagtggtcactattctctgtcaggtgggaaggcgtggctgtaaagacttacttcgtcagttcattgaacgtgcgtgttacttactctgagcatcgctcagcacagagcaagagacgcaggcaggcaattgtagttagaacatcttttttggtaccagaaacatgaacagcatttgtcataatcagcacccaaacctgagaggacagccttgacctctctgcttcctcggaggacccacctcatgcccttgacgtccaagggtacaagggacaagtctgtactgagtggtttttgtgtgtcaacttgacacaagcttgagtcatcagaggaaggagcctcagctgaggaaatgcctccatgaactccagctgtaaggcattttctcacctgagttcagctccccagcacccatgtgacacgtggcacataccagtgctcagtgctaaggatcaaagacaagtggaccactgggctcattagccagccaaccacgctgaaacaggaagttccaagttcagtgggcgacccttggcacacctaagatggtgattgagaatagtacctgcagttgacctctgacctccccacagaagcgtgcacctgcacatggatgtgcacatgtgcacacactgcactcacacacccacacacacccacacacaccccacaataaataagaaaaagtagctgtttcattagagtagaacttataagaaactaatgcacccccccgccccacttatttcaaacatgaaaattagaaacttgccagcttgtattcctagatctcttaaaagctgtgtgagacagctttaatatgtgaacatgaactctgcagtacctggtggggggagggagagtgcagtgcagcctgagtaaaaactcctgtcatagtcagcccaggaactactgtgaataagcagctgctccccttgaaattcagattaggaaattctaggccagccagggctacatagtgagatcctgttttaaaacagcaagggcagaagtggtcactattctctgtcaggtgggaaggcgtggctgtaaagacttacttcgtcagttcattgaacgtgcgtgttacttactctgagcatcgctcagcacagagcaagagacgcaggcaggcaattgtagttagaacatcttttttggtaccagaaacatgaacagcatttgtcataatcagcacccaaacctgagaggacagccttgacctctctgcttcctcggaggacccacctcatgcccttgacgtccaagggtacaagggacaagtctgtactgagtggtttttgtgtgtcaacttgacacaagcttgagtcatcagaggaaggagcctcagctgaggaaatgcctccatgaactccagctgtaaggcattttctcgttcagcaattgacgggggagggcccagcccatggtgggtggtgccatccctgggctgctggtcccaggttctaacaagaaggtggactgagcaaaccgtgggaagcaaagccagtgagcagctcccctccatgacctctgcgtcagctctgcctccaggttcctgccctgttttgtgttcctgtcctgacttccttcagtgatgaacagcaatgctgaagtgtgagccaaataaaccctttcctccccaacttgcttttgaatcatggtgtttcgttgcaataatggaaaccctaaacaggacacagtccaaacatagtttagccctgtagaactgacacgtccctaattgagttgtcatttgggagctctccatagaaaaagcgaagattggtgtggacttccgacctcagtgtctgttagtcacagcacactgaatttcccgaagacatgctgagtgacctcacactgggtgagccacttcctgatagacggttactgacctgatacagcctgagtctctagacccacaggcgagacctggctagatggagagataccaagaagacttgtgcaacagtcaggtgagggtgcaagtgggggctaaggcttaaaggctgggcgcaacacaaggaagagcaggaatctggggtcatcattgtcagagaaagggatgtcactcctccatgctaataaaagtccacttcccaccatgctcatgactaacgaactcaccaggaagacacgccagtatagttcccatgtgtcatttaatcctggccactaccttcagagagaggatcgtcctctttacaaacataaatacagagaagtcacccagccaagggcacacacctacagtgagacttgaaccaggcggtcacacagaccagcacacagggcctctgccctcctttacagccccagctttaccattctcaaagctgagaagccacgttattctaaggctcatcggtctgccctcaccactgtccctataaactggcaggcaagaggcttccacaagctgacagaagtggctggaggagacggagtttgtgatgcaggatttactggagtatcaaacagcagaggggtgagctatacggagcacaaggggtaaggaggcggagttctgaggtccagtccttagcctgcatggcttcccctgcccagacatgcacagtctgtgtggaaagcagcttccgtccatgttttgacaagacagggttacctagccaggaacttgcgtgtaggttcctgcttttgcagctctgtctagatggcatgagggttgggcaatcagaatgtcacttctcctgtgaagatgggcatcttggaataacacatttgaatttaaacggtgtctctggggtaccacatcagttacatgagaaaatcccctgatagttaatggaccctgtatctgtctaatacaccaagtgtcccaggaagagaccaaaacataagactggtctcccctctacagactgaatgcttgactcctcccccaaattcatatgtggaaatctgacccaaacaaatgtatttgttgatcgtggtgcctttgggttgagggttgagagtaatgggagagtttattagaagaggccagaaagctaacttgctgtcttctggcccatgagaagcccaaagcctggcccccagaagaggcctcaccaaaccccagccctgctggcactatgccttctgatctccaccttgtagaactttggggaagggatgtctggggtttcttggcccacagcctgaatgtggggagcgacgcttctgtcctctatcctgtaatcaattgcttcctgtagacctgaggtggtctaaagatggcagggtttcggaatccgaggagactgaagtcaggtaagaaaggaaacagtggctggaaagacggctcagaaatagtctaccactcaggcaagccccatgtaaaagctgacatggcggtcagtgtagacaggatatcagaccaattaagaactccatttacaggtcagtgctgagggctggagaatggagcctggtggctccctgaaggtctttggccagtcagtctaggcagatcagtgagaccctgtccccaccccaaataaagatggagagattcccaagaaaaacagttgatgagctctgacctccacgtgcacacatacatatacacactcaacatgattttgtgcatatactacatagtgaacacaccaggcacagacacacatacacacacacacacacacacacacacacacacagagagagagagagagagagagagaaagagagagagagagagaagaagaagaagaagaagaagaagaagaagaaggaaatgccctacagagacctctgctaatgtccactcctctgaggaccttgagaccctgtggcagggtcacagcctgactggaggaggcagtgtctgcagcctctcagagcccacagcggctacatgaagaagagggtttctgggatctgtcacttcacagctactctgccacattcctttggcaaggtgcacacccaagcacactcatccccacacaagcatattcacacacacgatgcatactcacacacaagcacactcacatacaagcacactcacacacaagcatattcacacacacaatgcatactcacacacaagcacactcacacactagcacactcacacacatgcacactcacacactagcacactcacacactagcacactcacacacaagcacactcatacactagcacactcacacactagcacacttacacactcacacacaagcacactcacacacaagcacactcacacacacacaagcacacacacttgtcttaaacactgaattttaggtgctaagaaagaaccatggatatccaagttgatgttttttagccaggatgaaatagcccagttattgggcattaatacaatttcaaaacaggaacactaagtgtgaggccatcagaagtgtttcaggtctagctgtcgggatgtaactgaaaagtagccattggagatgctcttcttacccgtcacgcccggtctgtgctctctgggcaagctgtgcccaggctccccactatgggagcagaacagggcctccatgagcaacatggccacgagttgatcttcactgttaacatggcagggttaggatcacagaagcagacatcgtgtatgtgaaggtgtctcaggaaatatttacctgagggagaaccactctgcctgttgacagcaccaccccatggactggggtccaggacgaaacaagaaggagggggaaagcattcatttctgcttcctgactgtgggtgcaatggacaagctgtccctccctgccaccacggcttccctgtcacccaactgtgatccaagttaaacccacccctgtttgcacacgcccagtgtgaactcgtggaggtcaagagggaaccagttttctcattctgacacatgggtcctgggaatcaaatgaagtctctttcttttttaagtaaaaaacattattttgtgtgtgtgggggcggtattttggctgcatttccggctgtgtttcatggaaatgcctatggaagtcagaagagggcatagaatgccctggagctggagttagatagtaacgcacctccacatgggtgctgggacttgaacctgggttgtctggaagagcagccagcgcttgtaaccactgagccgtctctccggcaggaactcaggttcataagctgtgcagcaagcctttagctgcatttcactggccccaatgctcaagcagccagggtcttggcaagcttcctatcaggtcctggaactagctcctgaaggttgggtaacgtggggatatgtataggtctgccaagggtatggggttgaccttttagttgtagcaaccaagctacacgtgcttgagatggaccacggggcccagtggggtgcggtgaaggcagtgggacaaacctctaaccctcagcaggtagaaactcaaggcggccaccttcctcccagcgagggtctgacactgccatctacaaaggaaaccattccctcttgctgcctccatgtctactccctggaatctattgtgccaagtttatgatatatttgggtctccccactgcgctttggacatgggacattctagacatgttccaacttatacatgttctctgagctggagnnnnnnnnnnnnnnnnnnnnnnnnnnnnnnnnnnnnnnnnnnnnnnnnnnnnnnnnnnnnnnnnnnnnnnnnnnnnnnnnnnnnnnnnnnnnnnnnnnnnnnnnnnnnnnnnnnngtgtgtgtgtgtgtgtgtgtgtgtgtgtgtgtgtgtaagacagcagaggctcagaatgagtcatgtcaagatgaccgtcctccgcattcctctctaaggcctgggggaggactggtttcctactcgccccttgtctgtgagatttagcccttggccttgggacagaggtctccgccggtcagctgaaggctgtttgggtttcccggcgattcttacaatcttagcatccaccgccttcccccatcttcaacactagcaacagcaaatgaacccttccacacttcagagctctccagatcccttctcttccctctcactgtccaggaaaggtcacccatccttaggactcgggggatctgggcatggacgcatatgcctgtatgctcagcacccaagccacaaggccaaaggcaaaggatgtgactttgaggccagcctgaggtactggggggtcaagactacatctatgttatcctgtctcagaaaaaagtaaagatgaagaaaagacaagggcttgtgtgataaatttgggggtgccagatagtccctaatcaccccacctcacacctagtggccagaacatgtacatggggggcactgataacatcaaatatcatgacaagtgcccacactggaggtatcgattctaaaatcaactgtcagttccagagttacccagagaagaaagtttttaaatagttgatgtctctctctctctctctctctctctctctctctctctctctctctctgtgtgtgtgtgtgtgtgtgtgtgtgtgtgtgtgtgtgtgagacagcagaggctcagaatgagtcatgtcaagatgaccgtcctccgcattcctctctaaggcctgggggaggactggtttcctactcgccccttgtctgtgagatttagcccttggccttgggacagaggtctccgccggtcagctgaaggctgtttgggtttcccggcgattcttacaatcttagcatccaccgccttcccccatcttcaacactagcaacagcaaatgaacccttccacacttcagagctctccagatcccttctcttccctctcactgtccaggaaaggtcacccatccttaggactcgggggatctgggcatggacgcatatgcctgtatgctcagcacccaagccacaaggccaaaggcaaaggatgtgactttgaggccagcctgaggtactggggggtcaagactacatctatgttatcctgtctcagaaaaaagtaaagatgaagaaaagacaagggcttgtgtgataaatttgggggtgccagatagtccctaatcaccccacctcacacctagtggccagaacatgtacatggggggcactgataacatcaaatatcatgacaagtgcccacactggaggtatcgattctaaaatcaactgtcagttccagagttacccagagaagaaagtttttaaatagttgatgtctctctctctctctctctctctctctctctctctctctctctctctctctctctctccagttgtcagtgtatgtcctaaattgtcctaaatgccagagaaacgtgttgtccttcaaggtgtcaggtgtgtctgggtcatgagcccctgatgcccacagttgttgagaagaggagctgggtcatgaacccatgacattttctcttggtcagagctgactggaagggggaaaggctttttacccaaaggctatttgtgatgggtttggggtgtcaacttgccacagcctaaaattgcctgggaagagagcctccacaagggatcgcccaggcaggctggtcagcaggcttctctgtgtggagtttgttctgactgctgatgtaggaggacaagggcagcacatcccctatgcaggggtgctgacccgagtaagacgagagagaacagcaggcatcatgggtgagcttgatgccctctgctcgtgactggacgtgctgtgacgcgatgcttaagtccctgtctcaatgtcccttcaccctgaaactgaaagctgagacaagctccttcctcttggaatttgtctttgtcggggcgtttgtcacagaggtagaagtgaatggagaatgccaactcaccagcgattctttgctgagatgaaacaaattaaatgtttttcagaatcgcttactgggttccaggcctagggcagctccttccttcccttgactgcacagcagtttccagtatgggtgagggatcccagcactattttaattcttcgtgacaggaatcgcatgtgtgttcgtgaaatgtgtctaggtgccttgcatgtcaagtgacaagtctctaaatgtggcatctagccacactagcatttatgtttcgtgctactcatgaaacccttctacagacgactttgaatcatgaaattagagtaaaatcttaaaacatgctaatttcacttccctggagatagacaatacttttgaggtagaaacaaaaggaaatggccatatttatccaacttggaagggtacataaaaaaaaagtacaagaaggacatacatcagttctggaagatgctgttgttgcttcttggtttttgtttgtttgttttgaggccgggtctcctgtacccaggctggcctgcaactccatagcatcctaagatgactctgaggtttgcaccctcctgtctcctgggttctggggttacaagcatgtaccacacactcagtttttcgcagtgctggatttaacccaggtcttcagcatattaggtgtaatggctgaccttggttgtcaacctgacatacttggggaggggggatttctgttgaggaattcatcccatcacattggcccatgggcatgtctgtgggacataactgactttattattttatgtgtgtaagtgttttcctgcacatgtagctgtgccctacctgcaagcttggcaccacggaggccagaagagggcacctgacggtggaactgcagttacagatgtttgtgagctgccgtgtgggtgctaatctgtgtgtcctggaagaacagccagtgatctgtctctccagccaatcccccctgcccctagtacattttcttgatcattaattgatacaggagggaccaccttgggcagtgccatccttggttaggtgagcctggactgtgtaagaaaggcagctgaagaagccagaggaagcaagccagtttgagcagcatttctcctgggcctctgcctcaattcctgcatccaggttcctgcccccgctgtccatgatgatggcctgtaccgtgtacgctgaaatgaacccttttctccccaagttggttttggctaagtctttaattacagcaaccaagagcaggctagggcattaagcaagcactgtattaagtcacgttcctaacccacgtgcaacattggttcttaatttgggttaagaatttgagagggcaaaatatggtggtgaaatgtccttcttgcacaatccactgtgtgcctgaaatccatatgatttaccacaggcgatgctgaccttgagcacacagctatggtggagcttgcccggcctctccacagtaaagttgctctctttctcttcctatactctttggaagggagtccctcaaggggattgttctagttgtgggttgtttttgttttttctgtttctttctttttttcttgcacaaacctagacctatgaaggaagaggaaacctacctcagctgagaaaacacttccatcacgcaagtctgtgggacattttaagattaattattggtgtggtagggcccagcccactgtgggtggtcctgagttcagaaagcaaactgagcaagccatggggaacaagccagtgagcagcactcctccatggcctctgcatcagctcctgccccgacttccctccgtgatggaatgtcaccggagagctgaaagctgaaagaacccttttctttcccaagttgcttttggtcatggtgttttgtcaaagcaatagaaactttaactaagagagatgctttgttcactctttggtgtaaaatcttttcagtgagaacagcacacttcagaagtatactcatgtacacttcctctagactcaaaatggtactttccgatatctgttatatcgtcctctttcttgtgtactttatagaaacattctatatatagttatatttaagtagggttgctatttgtgctaacactttgtctgggcctttgaaagccagttgataatgatttaccccgaatacttcatcatcaatagcccaagaattctctcacagccataacaagatgatcaatttcaggaaatttaacgttaatatcacctctgtgttggaatccctggggctggccctctttccttacccataaagctggacagactacctaaggcaagtgtcacactggagaaaaagcaaaaccctactgtgttcccaaagacttggaaaccaaagaggtgagcctcatgacaaacctggctccctgcccagaggacttttgtgacttcttggtggccatccacaacccaagcagagtgagacattccctgcaggcccgggaggagaccagcggctttgcaaggcaaagccctggagatctggagctgtcagggcacagggatccccagaatgtggtccacttccccttacccccacttaatctaagcttccttttagaaattcagtttgagagcaggctagcaaggtcatttccagagtcaactttagggtgtcaagaacagggacatggagagagaatcaatagttagaagctaggagaaatgagggtgtagaagtcccctaaataccagcctcctgggtgagaaagtgccccaaccacaaacagacaagagcctgtttactaagtcctcatcactgtgtggtttcagcaatgctggtagtttatttttaaagggactcatgaggctagaattgtggttctagtaggtagaacgcttgtctcactcacacaaggctctgatacccagccctgcttaaaccaggtgtggtggtgcaggcctctaatcccagcagaggcccagcaggatggctggaaatgcaaggtgggaaccagcctaggctacccaagattatctctatagcctggatctctaattaccccttaaaacagtttcttcactcctgagttgaatccatttttgtgtggtttcccttgattcagcaattctcagctagctgcatattggaaagatctagagccctgtgagcattgatttaggccagctcagtcggatgttccgagggcagaagcctcatcatcaaagaaaaagccctcaagcaacgctgatgtacgaatgtacaaggtctccaggacctctcagggctcttggctcagaggttgtgtggtccagtctgggaactgggtgtgggggtggggtgggggtggaggtctagaggctgagcactgggcactgggcactgggagaagggtgctgagtgctgattgctgggtgctgcagtaagaggtcacaacagagttccaagaagtagctggaattagaaaaggctttagtgtgtctccctccctccctccttccctccttccttccctcgctctttttcttttctgtgtgtggtactgtggattaaccttgggcctggcataccctacaagctacataagctctggaccactggcctgcatctccagaccttcctgtactctttatttggggacagcatccctcagccttcccaggctgaccttaaactagtccaggcagagcctgagggtggctactgccccagcctctagagtagctgggaccaccaggttgtgcctctgggcttagtttgcttctgtactttccagttccagagtgttcactgaaacaaatttgcaactctttggatttattttcttaattacatcctaattttctttccctgagaacattgaacttgagagctggtgtttcttaagcttttctaggcaccaaaaccatctgtcctctggtccaggtgcagactatgactcaacagggttcacaattactgaagcatctcttagctgctccagcaacagcagagcagctggctcacagcacacttccagtagcatccgctcaaacctcgcctgtgacctctgccccctgtcccccccacccagtcactgcttctctttaggggggctcccttcttactcctacaacacacacaaaaagtctcttcttagcttccaacttcagagcttctaagtcacatgtattaacaaggggaatggttacttctacttgacataacctagaacctagagagtctcggtgaggtgctgcctagatcaggttggcccctgggcttgtctgtaaatgactgtcttgattgcaaggcggctaggggtgatggaggttgtctagtgctttggcaagtatgttccctggcataaccatgagaaaagtctgagagtggggttaagcatatgtacaatgtatgataacttacatggatttgaagtatcatcaaaacatttttggaaatctttagaggggaaaaaagaacagaaaaataaatacctagaaatgcacagagaataagagaccttggtctttgtctatcaacagtgtagtcccgagtcagagggacagagcacaattgggtaccttagccatggaggttcccccttgctctcctctgcaagttacagaaggtcaaccccagcctgggtaatcagagaggacacataggaggtgccctcacagctggaggccccccatctgaccaagagaaactccctggtctccagtggcattccctcctagcttatcacctccaaatttagcccacactcccatcagagggacggactccctgtaagaccaaggactccttgccagctgttgtctggggtctctagaaaaactagacaggcacagcctttagattttttccttaaaagggatttactcaaaatgtttattgggtgtgtctcctgccccagcagtggactagactccagggaccatggaggtccctcagagatggcgacagcatcagcatccagagacccacccagactaggcttgagcatggaggcttgatgcatgatgatttgtgtggatataagatatcaaaagatactttcagaaagctttagaggaaaaatgaacaggaaaaaaatatctagaaacacacaaagactaagagaccccccccccagtctgttttcgaatgtcagtggcaaaagggaggggttggctggagcacagtgggttgacctttccctttgcagctggagagagatatgaggattcagaggtggatgagcaatgaggggtgagggtggggaggtgtgcccagggcctgattctcaccaaggtgtggggtttcctaacagtgagagctgggagctaagcagaggtcttcaagtaagtgttgtgggggtggggggtgtctgggaggatcctagagaccctgagctggagctaagccaagagaaccagctgacggacagcagccagggacgagcacagactggacacctcgccaaccagcatgacattaccagggtggagacatgcacaattcatcacacatggcttggagtgtcaacgtgacaggagaatttagagtcgctaagtcctcattgcacgttcctgagacgcccgttcaagaatggcttccttcagggacatttggggttaagtacttaaatccccaggcgagtaccccgtttttctccttgaacgcagaggtcctccagctagccttctcctggcagaactgcgtgttcgcagccacgttttgtttgcagtgcagattctgaagtttgctaaaatagtgggtgacctgagaagtggatgcacacatggtctaaatctgaggctggctgggggaaaattacacggtctcccagccctgagctcaaacagcaaccgagctgccgttggttgagcctctgagcacactgttcttgacatctgctaggctaacattcctcacttacatgacctgagactctctaaagtcagaggtcatcccagggaaggaaaaggcggaagcaaaatgctgcaagtcacgggtgagccacttttctagagtcccagagccccagacagaaggggacaaccagcattggcagagaggacacagcagctggtgtaaccgctgacacccttagggacatctgagaaggaagggattattttttttaagccttaaaaattgtttttaaaatggtatatatgtgtaggtgtgtgtgtgtgtgtgtgtgtgtgtgtgtgtgtgtgtgtgtgtgtgtgtgtgtgtgtgcaatcccatgggaaggctagtagagggcaccggattccatggagctggagttacaggctgctgagagctggcctggacaggttctgcaacagaactcaggtccattgacagagtggcaccatttcaacatcccaagaagggattgggtttctttcactcgcagaccccagatctgtgtgagaatcccagagggtagagcaggaaggaagcccacagcaacaacttttccagccttggggacatggctttaagttaggcataatgacagaaaacaacgttcaaaagtcatctctaccacacacctgatgtgccacagatgttaatcaccaaaatggagactaaagaaagggccacgcacaaggagaccgttcactgagtttcgactgagatggtttgcaagtttgcatggatgaggtgcagtttcagctgagttttgaagcatgaggggggcctctgcgtggaaattattctgtcaatgactaaacacttgagaactcaaagcctaagggacaagtgctagtgaagtgtgacggggccatcaagtatacccatctttgggtcggagaaatagggaaaagagaacagaaagacaaggactgggactgcctgccttgacctttggcccacaaacccccaggcaacagagtgcagtgagactcagaaccagaaacctacttaacactacaagggcttaagggctttggcagtttttgcttgctggggtttttgacctctaactctgtagagttcagtgttacgttgcaaggtcaaagcaaggtcaaaacattaggcacacctgggggacttgctgtcctagggagtctagcttcctgtgatcgtccttttagaatttaatgatgctggcatcaggtcagggctgggggaaaggaggattgggcaaagacacttaaggagagacttgcaacagtctgggtgagggctgataagggtttgaaggaggacagtggctgtgggaacagagaggagagtttggctgtcaacagtccctcactgagtacttgtcatgtgccaggccttgtggcaggtcctgaggatccactgataagtgagggcaaaggctaaaacccctggccagccaatcagagatgctacagggctgtgcatgccaccagcggtcacattcaggtccatgtggaggtcagcttgttaggaaacctgtcctctgcttgaccatggcagatattctcagtgataagcagggaagtgaccagcaacttgtttaaatctcacctgtatagaatttcattaacaatacatttgaatgtaattttaaacatgacttggactaaggtgaaagtaatattaatgtatattatagtggcgccggtggggttgctgggtgtatggtcctgggttctcaggcgtggtcctgggaacccaagttctgttggcctcagacttgcagcagtcctcttgcttcaggtgttcaagccctgtctggctaagtgactaattacttcttattcttgtttatttgaggggctgggaataaacctggggcctcttgcacctcaggacacaagaccagtgctattccattgagctacatccagagcctgtggccaagtttcatgctgtaatgtaaatccaaacttagaggagatcactcgccttctaaaccatgcccgtctttcatttgtaggtacagaatgctagtagcttgtctgtcctttccttccgtgtccccaagtctttattattgagccacagggaaggaagcccagagtagggcaggggaaatgaattcctaacaccaaatgggttttgagaagtttagggttgttgtctttggaagcaatcaaactgaaatggttgccagaggcgtccatccatccatccacaaaacatgagtaaggatcaatacacacttataaaaggctgcagggtggggtggtgggtgcacacaggccatgttcaaggtgatcctggctacgaagaaaagcaaacataaggactgctgggcaggccgacatgctgcttgctgctgcttaaggatagcctgtctggagtgggatttgaataaaaaacaaaaagcagggaagatgttaaatttagccatccggatacttcggtgggagagagcagaggtgttgcagacagaagaactggcgagtggagactttctggccaggaaatggtcctcaagggcagccagcagccaggaagcgggtggggaggcaaaggccaggggatgggtgcgctagctagacagggattgcatcattgtcttgtcttcttcctaagagtcaggtgagaacatcgcaggcagagggacacatcactaattagcaaaaacagcaagtgattggcaaaggccaggacttgaggggctcagctgtcaacaccagaagggatggagcttgtatgatccagtccgtgcctgatacaggactaaatgtttgccgaatcaaggctagaaagcctggccgtttttactgcttcatattaaccatattagacaagcagtcttgtgtgtgtgtggagggaagggcatttttcaaattcaacctacaggaaaccatgcatctatgtcactaaaaagcaaactgaaagccttgtgcttcgcttatgtctgctctagacagaccataccctcacctgacctgtccaaatgtcactattacccgagataatttcccatcacatgaccgaatcctaattggccagggggtgatggtgctggaattgctttttgcagcatcccgggggagaattatgtaacagcattaaccctccccccaacacctccaattcattcattttggatcgtttaatcaatgtgttgccggaagtattatataatcaaataatacggtcacttccaaaagccaaagtctgagaccagattaattttcctgcatggacttggtaaataactctttaatatataatgtaagagaacatagcacgggttcattctacagacaaaatccactaattatacccgcgcccgcccgcccctcactaggaggactctggtttactaatctgcacctgagaccagagcaagggatgcggggcctcagcagccagcttggctccagcgctcactccgtgctcccccatcctggaaggctgagaaagtgcagcgtcatcagatgcaggagcccgagtttcctaaggcccgcgcaagcgcactgggcggcagccccctcacgtgtggctcagcgtgcgcagagacacgtgtggaagcacgcgaccacgcctggcccagagccgggcttgctgtactgtgaaccccgtggggggggggggtgaatgacatcattcccgtcttgtcgctaggcaacttgagaaggcgtcttcctgccctgacttcagcagctccaaaggcggacatcattgtgccccttggaccgggctttccaatgagcgagtgtgcaaacccgtcgctcaggagtgtgttattacacacccagtgtgtctgcagagaacctgggagtgtgagcacagccagtcacgtgcttctttctacctgtttggtcacgtgcagttacaaattatatagtattgctccagacaattcggacatggaaatgggagtcctccctagtgacctatggaatccggagtctggggagcgccatggtttagggggcctctgggagggggactcaggcagagctactgccgggaaagctgctgcggggtgacagaagcagagtttatcacagaactgcaggatgcccgcaggatgcttcatgcaaagggcctagaaaccgaaccccagctggagttcaccaaaaataccctatataaaaactgggggtggggggctgggaagtggctcacttgcctggctgggatgccccaggctctgagctccgtccccatggcctcaaaaatagttaaatgcaaggtaatgcttatgggatgtgtataacgcgagtagacctggttgacactccaaccaagtgtgtggttcagtagtttgcatctcatggagtttgaatccagcctaggatgtgagatacacacacacacccttttaaaagtgttaaaataacaaaaatcgatgtcctccctttctttcccacgtgctcaaacccttttgcccagttccaagtcatttggttccaggtccctttagtggaaaaacgtagctgagggagggccactagggaggaaagggggaaacaggcctgatcatgcataggagctacacacttctggatggcccccaaaactgaggggacaagagaacaatggaaccctgtaagggactctgaaaccaatgtctcaggatttcatcgcatgggtactgctgctgtcctgatgtatagagaggcaactgtcagggtcacctctgcccctgcacggtggcttccaattagcacacagttgctcttaaggtcacttgtggcctagctcaattcattccaggacaaaaactaactcttctcaaattatgtgtatctgcactcgggaggcagaggcaggcagatgtcttgaggagaccagcctggtctacagagtgagttccaggacagccagggctacacagagaaacccagtcttacaaaaaccaaccaaacaaaacaacaacaactttttctgtaatagtacgaagagccataaattccccaagccaacaaatctagttctcatcttggaagtcctcaaggttgcttgcctgcgccctctccacaagtgtttgaaagagttgttctttggatgcctgtttcctccttccctcctgagtggagaattggtcattgatcccatctatgaagggacagaagtcaccatggggtatttttgtttgttttgtatgtttgcttagaacacatgccacacaggaggcaaggcaaggcagagctgactgtgaacaaatacatttccccctctgcactatgacgtcaacacgcatcagtgcaactatctctcccactccaggaggggtcaggaccctagtccattccacaggagactctgaagcttagagccagcatggcgataaggggagggggaggagagagagagagagagagagagagagagagagagtaggaagtcctccctcagacttcaaattaatataatttatgaaactaaaaagcaacacaaacttggggggtcagagtcttcacacgaaagcttgtccactctgcaaaacccagtcacctcctctaagccttggcccactgcacccagaggaagccagcaagccctatgcgcggccccagcttgccatgggccactgcagaacatttgctatgtgcaatttgtcagagtctagttctatgactcccgaggcacggagagagacagagttaatctctgatactccagcacttaccacagcctcttggataaaacaagagcaaagcagatgtccagctccccatacctactgtcttgggctttggaaaaggagtgtgtgcagagggcctggtgcctctccccagaggctcagccatgggtgtgtccgaatacaaaagccccccacccccactctgacagtttccagaatgttcttgctggacctgtacctagcatgttccatggtaggtgttacaacccagaaaaggggttcagggtcacccgtgaatggaaatgcccaatcggtcttcatgaatccctttctcactgacctgaaagaaagaagcatccagcccgtcacataacttatttctaacaggagaatgttatcttatcgtttgctacagtctgaaaccattggcaagtggattttattttcacctaagaaagtaatggaaatgcatataaagaacttgaagatgtcaaataatccgatgtggagcactgctgagaatctgagagttttagaaaacagagagagcttgtgaaagaaaccatggctaagaatataagctcacataatttgcttacagcaaagcccttggggcctctgtttgaacctgtttactctcatttttgacacacgttgcaaattgggtgtggttctgtcccagcccacagtaaacaagtaccaaatcaggcaagcattggaggtggcactctggccactgagaagtgacggttgacagactggctgtggaaacaggctggaagtcctataaaaagcaaatgtaaccaggtgtgctggcccatgcctttaatccaacactccagaggcagaggcatgtggatctttagggagtttgaaggcaacttggcctacacaggagttccaggtcagtcagcgctacatagtgagacccccgtctcaaaataaacagattcaagagctctgtatgggtcagcccaagtgcaaacaccgaatacaaaattcataatgtaaaagtgatgcttttaatacccagattattagcaaacatttaatttgcattggatatctttctaggacatttactatatctaaggtagatatagtaaatttcagtgtgtgttctaccaagtttttctaagggaaaaaaatagcattaatctaggagctgctgttgtttaaggcagaatctctagattcagagttttaaaacatcagcttctttttaagtagttttgtatttgcttggagtttgcactgaaatataaggaatacaattttaaggggcatgaaattccgagaatagtatgtttgtagtgcaaatcccttctctgcactccagaaactgttttctgttactccctcactcagattcagccatgaaaagctggctcttgaagtgggtgtgagcacagacaagtctacctagaacttgcttaaaccgtcatgagaacggttgttgaaggtcctcaatatattgatttgaaggttcaatggattggggagaaaaatagtaaagacatgttgctgagagaaaaatccttctttcacaataaggaagcagtcttaattcactctgctcatctctacctgaaataaaaagccctttatagcctgtttgcccagccctgtcttcccaagtccctcatgggcagtcacctcccgcgtagaggacaaacactgacctgtgacagacaggacagggctaaggtcctgcttaccacatgacaggaatcacaaacgctgtggtcccggaagtcagccaggggtttaaatgaaagcagtttcacagtgaggcactccaatactagccagattttcacagctgtggtttctaacgccctgaaaataataaagtttggaggggtagtggggcatttataaattcagtaaaaagttggccaagcaatctatttctgcacaactgaggactactgccaactgcattatagtttaagttggaaaatcacatgacatactacattcagctaatgcttccagtgggcagacacagagaccttctgagtgaattctaatgactcgcaggtaattcattaaaatccaccaatgactcaaataatagtttccaaaggccgagggcctgggccagtggtagcgctctggccaagcttgcccaaggtcctgagttccaccgctagagacacagaagagcacattttcagatgtaatgtgggaaataatgtactttcttttttgccctaatttcacagttttatcctgtgactgtatacattgcagactaaataaatgacctataaaatctggccaaagttaaaaaaaatttttactacatgatacaaaatcatgcaaatgtcaactgttttatcttctgatttactgccatcttctttaggtcatgacgaccgtggcaacaaaatgtagatcaaaatacttaaaattccgtttcccagcttttagttaagagccagccatctttcttgtgactgactctttaccaaggctctccaacccttctgtggttggttaaagtgagcatgcctggcctagagctcgctagagctcggcagtagcacaagttatctagcagaaggggatgaggccaagcactggccctcagcgtctgtgtgaccttgcctgactttcagtacacacacctcaggggactgagctagcagatgtctgaggctgtggcttaggtctgctctgccgggtttgcttgtcacggccggcagaggnnnnnnnnnnnnnnnnnnnnnnnnnnnnnnnnnnnnnnnnnnnnnnnnnnnnnnnnnnnnnnnnnnnnnnnnnnnnnnnnnnnnnnnnnnnnnnnnnnnnnnnnnnnnnnnnnnnnnnnnnnnnnnnnnnnnnnnnnnnnnnnnnnnnnnnnnnnnnnnnnnnnncctacatcttacaaactgccgcttacgggcttatacaccttcaatcaaggggttcaacaacaccactccaaagaaaatggacagccctccagtgcactttgtctcaaaccacagttttgatcacacacttgagaaaagtcttgaaagtgtttcctgaactccaaggagaagtcccataccagggttattttgtgaaagttaagaaggcaaactatactcatgaatgaaacatccgcctgaggtggtagtgtgtttagaacctgggtgagagagaaacaccagaccacacaggagaggctatctgaggtcatggaccaaaacctggtaaatcagaaaaacattagccgactggggttaaggcaaacaagccaccagtgactgctaggtgattccttttgtagttttcattgatagactggagacaagctgggacacagggccaaaaccaggagtctccctggagaccaatgacagaaaaccaaaaccaaacagacaaaccttgtctgatgaccccggatgagctcttgtcctgatacacacaagtctctgtgggggtattcagtattgtttaattattagacaacctcatatcatatataaagtttttattccttggtaagaagttttaaatcacaaaatagtgtggcaatatttagataatagaatttaaggagtgctgaaaataccagagtataaagatagtttctagcttatctttacatactaaacttgtctaaaccggctggtttcttgcagacgtatttatttgtttaataatttaagacagcaaaagcttgcaccaagcattataagcatcgtaaccaaagtgcaaacactctcaccaagtccccccccaaaaaaagatattttaactcaaaataccattagtacatatcttctccctacaaaaatagcatgtcagacgtcattaattgggtgtattaacagctatgtacatacagccaccttggtaggctaagagtttaacgttgtttaaacacagcgtttgaggcaaacagtagcaacagcagcagcagcaaacggaccgaacacactcacagacccagataatgtcttcactccagacttgtgtctcaccccttacgtaacattcaagtgagatttctcagtgctaccttggcaacaaactaaaaatatctagacaaggtcttggtttatgccttattttttttttttaacaagctttccttctgattatctggcatctggtttggtctccagaaaaatacatacagacttgagatggcaggcctgacagggctcccctatgcatcttcacagcacttctgaacacaggggaccactagccctctcctccacttctgccatctaggaatttgagggcaaatcagtcggtctgggtttctctttttccagcccagtgcacttggaaaaatttaaagaaataaaaaataagaacagtaacgctacaaaaatttgggaccacgattgggtaaaataacccgtggggggggaggggcatgcatcagaaacacaaatatatgacctatgacatatatatgcacatgaattgagaaattaaggggacaaggggtttgaggtcaatttgtcaataaagtgcgagcaaaggcgccaaggactccaacctccctcccccagctcccacctggacatagtgcctgaacagggcccaactcccagtctctccaaacaagtgcaaggtatcaagaccactccaaacacctctcaacagggcaacctggcatcctcacctctctgaaaggcaggtacttctcaaaaaagccagaaaacacaaaatactgacccgtaaatttaactctcagaggtcctcagttaatctgagtgcctcctaaagaggcagctgggagacacacctgctgctccacgccctgaagtcaaaggaccctagtgccaggcactctgcctggctccacatggctctcctacccaacagactcccagaaccaggcttgatatctgggaaggggagggggcgtggactaaatttacggtggataataccacttaaccagtacttctcacagaggatctgtgacagcgggggcgaggggtggggtgggtgtgagcgggtagagggtggggtggcaaaaagggtgagaaacgggcaaaacaggaactccaaacgtacacaaaacacctgttttcgtcctaagcctgtcgagcatctcttactcttcctccctggcacgccttagggggcctttgaacttggaaacctggagactcctcgggagccccctgcccctgttcaagaagggctgcggggctcagggggcgtccttggcgggctgcgaggcatcttcctgagagctctccggattcccagcgcgcggcaggtgggtgcggctgtgcgcgtgctgggggcgcagcggccccgggggcgccacctcgtgtgccaggagggggaccagtagcacaagttatctagcagaaggggatgaggccaagcactggccctcagcgtctgtgtgaccttgcctgactttcagtacacacacctcaggggactgagctagcagatgtctgaggctgtggcttaggtctgctctgccgggtttgcttgtcacggccggcagagggaagctgggtggccacggcgtgcaggtggctgacgagctgtgcgcagcgcggctccctgggcgtccagctctcaaagcgcgcgaggtattgcaagacttctttggcgcaggtttgaaaccccgagtggaacgcatccaagtcggcctggaccggcgatttcagagagcgctcccctagggtgcacaggggagggaggcgagaagaaaaaccgcggcattaagacatctgctcatcacgtgggccctgctgcctacagtgagctcggcttttcctgggcattccagcgatataatccgcagactgccgaaaggagggggtggcgggtgatgcgctctccttcgggttgaaaaaacccaagtagagaggcgtagccgacactttaaataaaaacggggtcccttcagctctgcagaaagcctctgggatgctgtgggtacttggcaccaacgggaaagcagaggcaatgttcactaggaggagaacgcagtggggagggagttccagcactgggcccccaacgctccccggtatttgttttttgtttttgaaatcagggcaggcttccttagattcacttaccattctgtaaagcaattatcttctgatgctgctgctctgttaaggctgttagcgcttttaagtgcttcaaagttaattccaaaactacagctttctccaaatgccccagtgtctacagtggtgcagaaaggaggagggcaggggttactttaaaacacacaaattttacttaattagctccccacacagcccatcgacttaggcaaataaaaaaaataaataaaaaaccactgggaaggaagcgctgctcagcgccccacaaggcaggtcatcaatgatctctgccttcagcccggagcccctgttccgagtctctgggaaactccattcctgcctaagttggaagtcgggcctcttaatatttacatttatggccctatctctgggagtcgtatcaggccaacaccctggaaaccaccaaagaatgaaaacgcgcatcttactgtcaatttcagatgttcaggcagcaaatctttcagctgagcaatgcattcattaattcggtctcttctctttttttctattaatctgtgcggtaatttgtaggtatccttcatacatgagccggggggaaaaagagacagccgtaagctaagcattcactcattcacttactagatagaaccctcccaccccaaccccgaaacacaccatgcaatgaactaatgcccaggaactctctcctctagacttctaaaatgcaatttaaattcaggtgcggtgttgaatgtcccccgagtatccaccaaaccacttaaaattcacagtcagggaagctcggggctggaatatatttgcgggcagagtttccctgcgaaatcaatggccctaattaactaccaggcagattatgggaaacttaagacttaccttggtgtcgtctcgcttcaagctccttttgggtttacacatatacaaagcggaataatccagtctgcaaaaacagaaatcagcatcaggcccccattccgggaggggctctgccctcgcccgctccatgtcactttgtgcaggaaaaaaaaaaaaaaaaaaagccaaaccgactcctagacagaaattcgcaacggtgcgtacaccttaccctataaaatccctatgttccagtaactgtctctcctgcaaatgagggattccttcgtccatgttcaatggctgtccgtttcctccttttcgatttggagggttctgtcctgtaatctgtgggacgttcgcctagggagatcttggggggatgtgtgtgtgtctccaggctgtctcgctctccctcttcggcgcagtgttgaaagtgtgaagcagttggccgcccctccgccccgtgctcgctcgctcgctcgccctctcgcacacccgcgcgcgcacacccgcgcgcacacacacgcactgcgctggtagtttgctctcactccaggcagtgtttgcaaggacgcgacttcccggtggctaaacttcagccgggaaggaaatttccgaggctttgctcactgctcgggttgggagggagggaaggagggagggagcgaggggagagagacacccctcctggcgctggctggagggctaccctgaaaaagcgtgacttgcaatccgctctctggaaggatttaagatcagtgaaaatgcactcgctggttctgagtgtcgcattccaagtggcttcggcggcgacacagtgtccccgggctacctaaacttcccgcagcagccggaattgcggtgccactcatcgcagcggcggatgacgtttggggcctcgggtgctcccgggggagtgcggagagggggaggggtggcacgtaagggctgctgcgggaaagccacgcagtccaggtcctgcctgtcccaacttgtgtgacgccgtgctacccctcccccgcccccgtgcgataagccacgccgagagtgtggcgagcccacgtttactactggcacctccgcggcctccctccttaatcccgtctccggcgggtaccagcacagggccggcaacgtgatgcgacctgcggcggcgggcggctgccacatcagcgcgcagggatgccgtgcgcgcgccctgcggccccgggagcccggtgccgtgcggcccaggacaggcgtccccaggtgtcagggttcccgcaactcgggatgaatacgaacccgagtcccaccccggtgaaggtggagaccccgggttgcgcctgccctgaattggcagtcacgttctctgggggcattcgagagcgccggtagcacgtgagcgcagaagggacctgggccccaaatgcacgcgcactggagcgcagcagggccagggcagccgcgcttgggttccggggacggatctgggtcgccggccacggcggctggggggggggacggttcccgggccgccgagcctcctcccagcctggcgcgcgggcgacgagcccgagtcctgggcggagccgcggggatgagttcctctccctctccagcaccctcccgggttcctcgagcgggacgacaccgcgcgacctacagcaggcgattaattaaagataacagtgaaagtgttttttaagatgcgggtttttatcttacgccccggcccgccgtctctcgtctctaagtggtttatctttctgattccgaggcaagttaaagttccaaacagctcattggtgcagcatagaatcactgcttccttctggttcttaaccggccaggttagctgcggcgcgcgggagattgaggtgaatgattttaaaagggaaaaataacagccccaggtccacgtttctgaaagttcgcggtactcaacaagcatattccagagccaatcctccctttaaaataatgactagggcgttagggggatgaataggcctgggtctctgcgtcttggccttgccagtagagcggtcacaagggacagaggactctaggactaagtcgcccagcttttagctgaagctgaaacaggagtcttgaggtccaagggggaagggctgaggtgagcatgtaaactaaccgtccctgaaaagactctgggctgtacccctcagccttctccaacatttccccctccctagcttcctccccttctggtccaaactttaattctaagtcagcagttccttaacctctcccgctcctgatgcagcaggatgtaaatgggctttttgcccattttattttttagttgggtgaatgctttattctcttgggacagggtcgcagtgtgtagtcttggctggcctggagctccctataaagaccaagctggcctggaacttgaacacttagagatggcttgcctctgcttccagaacgatggagtcacatctggcttttgctcaccctcaagttccccgtttaatcgccattgttaagttacccttggatctttctcatactttttttctcttgtccttcatgctcaccgttttgtttggctttaccttgttttcttttccacacagggtttttctatgtaacagctcaggctgtcctggaacacactctggaaaccaggctggcctccaactcccaaacatctgcctgcctctgcctcccgagtgctgggattaaaggcatgcgccaccagcacccggcctcctttaatggttaggatatttcctgtatttcccctctcttaaacttgagtcggttgccacatctgtctcaaactcttgcctgtgggggccagtcatcctcttgtgccaccagatgtcccttgacaacaggccatcatagcaatgactaacagcggcagagcatttaggatgagagaagccggttccctccatagggcttctgaagtgtgaacttactaatgcatgccatgaccctgccaggtgttattagagcctctgtagatgaggaggatacgtccttattggaggctgacatgtgtcagaggtcccacaagcagactttcagccagacagtgtgctctcgagttgcctgctcactccttcacacgaggtctaagtgcacactagctgtgccacaggtgtgagagcgagtgttgggtgtgcaagagagatgggggaaggagagaggaaagtgtggacgtcacggttggagagatggctcagtggcttaacagcactcactggctgctttcttagaggactggggttcaattcccagcaccccaatggaagcttataaatgtgtagcccccaattccagggaacctagcacccttttctgccctcctttggcaccaggcatgcacacgcatgcatagacatacagcaggcccaaagcaacatttacacacataaaataaatgtaaacgagtcttactatttacttctttaagcatgggagctggcatagagatggggagccttgggagatgccgttgagaagtgcagccagcatttagccctgcactgacttagcgtttataacgtcacacgggtgcaccaaagttagttcaactgtgaaaggtgacggtgctcaaattcaccatctttactgagcaaaccaagccaaggcagacatgaagagtctgggttagaactggtcagaactggaaaaggcggtacctgatcagacaaggagcagaaccctgactgtcctcttccggtatgtttacaaacagatggagtcttgcctaatactatctgaagccagtaaaacacgagatgagctcagatccctttcctgattacagtccaatcattcgtgagtgtcccacttgcagttacagagagcctagcttcactagctcttccgcagacgggtggagtgcttgttacctttgctgcttctctgggcaccactgtagtgtctgcctcctcctcagcatctggcctgaaggtggtacctgtagcatgtctctctctttggctctctgtgtgtgtctctttctgtctctatctctgtgtgtggctatgtctctctgtgtgcatctgtctgtctctctgtctctgtgtgtgtctgtctctgtctatgtctctctccatgtgtctctgtctctgtgtctctctgtgtgtttatgtctctctgcgtgcatctgtctgtctctctgtctctgtgtgtctgtctctgtgtctatgtctccatgtgtgtctgtccctgtgtctctctgtgtctgtctctctgtctctatctctgtgtgtgtctatgtctctctctgcgtgcgtctgtctgtctctctgtctctgtgtgtgtctgtctgtctgcctctctctgtgtagttctgggctccatggtccacatccgggctttccttccactgcacaccatctcattttactgaggtctctcatcaaatgtggagctcattgtcccagccaggctcactggccattgagcattgcactcctagctctggcgtttcaggtgtgtgtccacatgcttcctgggcaatcagaatctgaattcaggtcctgtgcccatggagcagacactttacctgctgaggcatctctctagccctctgcctttttattttaacacaggcaaagtcgctccctgtagagactgtggtaaaatgaggcatctagtcccatgtgccaactatactatgccctaaactccaggcacccactgtgtggaggttctatgtgtctcatttcctacagaaactgggctctccctagaggaccatgttcctgctgggaacaggttcctgccttgtcaaggttctccaggcctcaccactcttcaggagaggtggtgtgtggctacttctggattccagatctgaggcaagtgactatctctgatggcccaaagaactgaggtctgcccagggtgtatcccgccacctgtgagctatgaggaagttctttgggtgggcacatgcctttcctctcagagcctagggagggaagtgagggcctggagcactctggacaggtgccccaccctctacctcagtgccccagccctggttgcattttttactgaacatgttttggtgatttagcaagtgtaatttaccactattccacacaactccatgcggaaagaaagcagcttatgaagcaagagtcctcagaaaagttaaaaatgttttgcattggtgcacacattgaagccttggcactgaggctctgaaaagggagggggatgcccatggctcctctcagagtccaaatatggctttaaaatattgatgatgctgtttgctgaaggtactagatttcaggtcccagaatagaaggctgggtttcccagctgcttgctcagcacattggcccaacagcacacacccccatttattttgtaaggagctggtctctccatagactgccaatggatgtgtctctgtgtctgtaaggtgacttaacaaatcacctgttatatctatgtaactctcccggagtgtttatacactcactagtctgtgcagcaccaaggagattggacataatacaacatgcttatgttatactctacatatgatattacatagattgccttgtaactatatcagtaaaatcatacatctagatatttctttctgggcaaatgtctggagccctggctggcctcagattcgtgccaggctcctgcctcagcctcccaagcattgggattgtaggtgcagtagactacttgtggctgggctgatggtattatgtgtaagcagtaaatatttcttttgctataataatttccgtctgtataattttcacaaatgctcaggctatcccaatttctgtatgttcttaaaatccctgggtttttctgcatacagaagatgattaatgaagaggtatgcttgagtccatgaggagtaccgcgtgggaagtactctgacacttccatttctcattaacctggtcaccctcagcatttgtgctcttcatactggttgagactgatctgtagtgatatctaaaaatacaggaaggcaggccgacagcctgcagggcattgcagagtgaccgccactcttgctctgggttctgctggcctggctggagggtgctccctgcactgcagccagtgggagtgctccggaaaaggtcctggagcagcagtgctggacccattgggcaggatccaacagccctttcacagggtcgctatgcacattacaattcataacagcagcaaaactgcagatgtgaagtagcaatgaaaataattatgtaattagggggtcaccacaccatgagggactgtgttaaggggtggcagcattcgctgacccaggctggacctttgttcctgtggagtgcaggatctgtggagcacacatctcagcattgtgtatctggaaaaggacgtcttctgtctggccctgtcctcttctgtcatctcctcactgcgtccgttccctctggggtttgggaaaaggagaaacgcttccagtacaaggatactctctgtagtcgttaatcttcattgccattgaccgaatttagagtcaccatgggaatctggcccctgtagtatctgttcccagaaaggcttagctggagagggaagaccttccctgagtgagtgccagcatccatctctctgcttcctgtctgtggatgcaatgcgaccagccacctcacaacccaccccaccccacccctctgcctccctcaaactgtttgtcccccagaccctctcctcctcaagttgcttcttgtcagatatttgtcacagcagtgagaaaattgaccagtctaccttctggtaactccctgttgctttggggccagaagataaagaggaaagctgtctggtcaagtcaagctgtgttgtcagggaagaaggggttcgctgtgctcaggagatggttcagagggtaggactggttcagatggttcagagtgaatgtgggaagagctcatctgtgggggtctttgctgcagtgcgactcagccctggttaccagcttgctgggacttacagccgccgtggaaatggatgcccaggcacaagtctgtgagggagtttccaggctgggttggaagaccctctctgaatgtgggtgttaccatcccaatggcctagaccctggactaaataaaaagggggaagtgagctgagagctggtaattgtctctctgcttccaggctgtggatgcacggtgaccagctgacagctcaggctcctgccactgttggtttaccctcaaacagtgagccacataaactcttcctctcttaagttgttccttgctcagttattttggcccaactacacctagagtaattaatgcagacaggcgtggaggcaggtgacactgctgggttctctcagcttcttgcactagcccattcatgccactttacagttgcacaactcagctgcagacgggtgttcctggacacctgagcaatgctctacaaggttttcccaggaaatggacacagggatgagatttgctccgagtccactttgcacagtgcttggtgtttgaaaatctgttttccaagttgtatccatcagtgaaaatgtccgatgtttacctctgccgggctgggggcagcactgaggattcagcattgaactgcatcctaaataagctcatttgggggctgaagaagggttagagcaccagctgctcttccagaggactggacttcggttcccagtgaccatctgtagctctccttccagtgaaccgggcgccttcttccaacctctgcagacaccaggcacacacacatacatttgtaagcgaaacactcatacatgttaaataaatcataaacataattttaaaaaccaccctcacaacctaacatctaatttcttgaaggagagctcctcgtcatattttagcgattggcagcgcctttcccttagagggtctgaggtctgttctcagctcatcaataaatgcacatcagaaatcattccagaaatcccagtcagtggcctctgctgtgggagagaagggcctgctctggccacaaggccactgggtagaaagactgatgagaaaaacactttctgcctcgttcccctgagtggtctggccctttgtcacacccaagctctctcagttggccccaactccctggtgtcagcgttaatttctattgtcaacatgattggcttaagaaacacctagagcattaatgagacatgtgaaaaagactctcctgcagtggggtgacactgtcccatgtgttgggccctagaattaaccataactgataaaagagaaggctacctgaaccctgacatcccttctctgctccccccttgccaggcccctccctgtgtgatggacagttcctgagcaccgagagctcaaacaagcccctctcctttaaattgcttctggtcaggtctgtgttcccccgactggacacgttccaatataagggcgtgttgtttaatgcccagcttcccttggctcctacaacttcacgttctgtgtttccagaatgttccgtctctgattctcgttcttcccatgacaagcagcatggctcttcttgtcatcatacatgagtgctctctctgtgctttggacttgcttggctttgccatgtggatcacagctgggttttcttcttgttccccacaccttggatattctccactaagcccctcctacccatctgctgccccttagctctctcgctcacccttgatcactgggtcactagcaggtggccaagggggttcttttcagagggactgggcagggtttggcttagctaatttcctgtgatccaaaataggctgggtttgaatgagtgacttgttatcacgtccctggaccttccagtaaagatgttttatactgcagagaccatcgctttcttcacttggatgcccttcacactgtgagttgtccttctgcctcagcagttcagcctggagccggcagctggcagcccaaggtacaggctccttccagcacatgagagggcacgggtacattagcaagactctagattttaattttttaggcttatttatgtgtgtgagcatcttgtacacacatgtgtaaatgcaccaggtaaggccagcacagggtgttggatccccaagaactggagtcacagctgctgtgtgagtgctaggaaccagacctgggtcctctccaggtcagtgctcttaaccgtgtagctacctctccagccccaagactaaatagcatttaagccaagtggtcactcgtaaccccatctcttcctttacttcccatgttgacagtcagagatgtccatcaaagccctcttctctttgtggatatgatctactttctagaccaagcagccatagtctcttagctcaatgatgtgacctttgccattgattccagccctcagggtttagtgagaatggcaggcatctgaagcaggagggatttaatagagaggcttgaatgcatcactaacctttgggaaggttgggttcatgaaaaggcaagcaaggagaatgctgactttcaggacatcttgatatggctgctcttggccactaagtccaagtattgggcaaaagcctagagatttggatgaaccacaagactcctggtccttttctgagagaatgtctctcacctttattgtggagcagccttatatacaaatttacaaaaaccccaggtcaaagggttcacaacaggatattgatcccaatggggtgaggtcaggcaaacaggaggtgcctgtttgctggaaaacaactcttagagaccccatggggactgggtgccaacatctccagttatcaagtaagaactataagattttaaccattctatcttagttactataactatgtatcttcaactccatcaaagaccatagaaggataatatataaactctggaactgacagagacaccttgcttcctagacagtcacccaaagtttcttggtaaccttggggcatccatctttagcctacaggccacaatgtgtctggcagacttctccgcaaagcaggaaattctaacctgtcctgcattggaaacagtttaggcaacagtagcttcttgcccaaattatgaataggaacaggagtatttttagtaaatgacaccccctttttgcctcnnnnnnnnnnnnnnnnnnnnnnnnnnnnnnnnnnnnnnnnnnnnnnnnnnnnnnnnnnnnnnnnnnnnnnnnnnnnnnnnnnnnnnnnnnnnnnnnnnnnnnnnnnnnnnnnnnnnnnnnnnnnnnnnnnnnnnnnnnnnnnnnnnnnnnnnnnnnnnnnnnnnnnnnnnnnnnnnnnnttgccatgtcaaagtcaaactctataacgagtttcttggatgcccatcttcctctcagatataattggtgtgccaggagcagttgtgtctcactgtcaagaaaaaccctaaaccatttaaatgccatatattccataggtctttgaatggtagttgaggtacctattttctagtaccttttgtcaatccacctctctcaggagttgaggtacctattttctagtaccttttgcaatccaccctctctcaggagttgaggtacctattttctagtaccttttgtcaatccacctctctcaggagttgaggtacctattttctagtaccttttgtcaatccacctctctcaggagttgaggtacctattttctagtaccttttgtcaatccacctctctcaggagttgaggtacctattttctagtaccttttgtcaatccacctctctcaggagttgaggtacctattttctagtaccttttgcaatccaccctcacaattccttacttgctttccagccttctgagggtgatctctcagggtcccctttctttcccaatctcggtgaaacctccatttgtggctgctcttggccactaagtccgagtattgggcnnnnnnnnnnnnnnnnnnnnnnnnnnnnnnnnnnnnnnnnnnnnnnnnnnnnnnnnnnnnnnnnnnnnnnnnnnnnnnnnnnnnnnnnnnnnnnnnnnnnnnnnnnnnnnnnnnnnnnnnnnnnnnnnnnnnnnnnnnnnnnnnnnnnnnnnnnnnnnnnnnnnnnnnnnnnnnnnnnnnnnnnnnnnnnnnnnnnnnnnnnnnnnnnnnnnnnnnnnnnnnnnnnnnnnnnnnnnnnnnnnnnnnnnnnnnnnnnnnnnnnnnnnnnnnnnnnnnnnnnnnnnnnnnnnnnnnnnnnnnnnnnnnnnnnnnnnnnnnnnnnnnnnnnnnnnnnnnnnnnnnnnnnnnnnnnnnnnnnnnnnnnnnnnnnnnnnnnnnnnnnnnnnnnnnnnnnnnnnnnnnnnnnnnnnnnnnnnnnngaactataagattttaaccattctatcttagtgtgttactataactatctatcttcaactccatcaaagaccatagaaggataatatataaactctggaactgacagagacaccttgcttcctagacagtcacccaaagtttcttggtaaccttggggcatccatctttagcctacaggccacaatgtgtctggcagacttctccgcaaagcaggaaattctaacctgtcctgcattggaaacagtttaggcaacagtagcttcttgcccaaatggatcttcttgccatgtcaaagtcaaactctataacgagtttcttggatgcccatcttcctctcagatataattggtgtgccaggagcagttgtgtctcactgtcaagaaaaaccctaaaccatttaaatgccatatattccataggtctttgaatggtagttgaggtacctattttctagtaccttttgcaatccaccctcacaattccttacttgctttccagccttctgagggtgatctctcagggtcccctttctttcccaatctcggtgaaacctccatttgtggctgctcttggccactaagtccgagtattgggcgaaagcctggagatttggatgaaccacaagactcctggtcgttttctgagagaatgtctctcacctttattgtggagcagccttatatacaaacttacaaaaaccccaggtcaaagggttcacaacaggatattgatcccaatggggtgaggtcaggcaaacaggaggtgcctgtttgctggaaaacaactcttagagaccccatggggactgggtgccaacatctccagttatcaagtaagaactataagattttaaccattctatcttagttactataactatgtatcttcaactccatcaaagaccatagaaggataatatataaactctggaactgacagagacaccttgcttcctagacagtcacccaaagtttcttggtaaccttggggcatccatctttagcctacaggccacaatgtgtctggcagacttctccgcaaagcaggaaattctaacctgtcctgcattggaaacagtttaggcaacagtagcttcttgcccaaatggatcttcttgccatgtcaaagtcaaactctataacgagtttcttggatgcccatnnnnnnnnnnnnnnnnnnnnnnnnnnnnnnnnnnnnnnnnnnnnnnnnnnnnnnnnnnnnnnnnnnnnnnnnnnnnnnnnnnnnnnnnnnnnnnnnnnnnnnnnnnnnnnnnnnnnnnnnnnnnnnnnnnnnnnnnnnnnnnnnnnnnnnnnnnnnnnnnnnnnnnnnnnnnnnnnnnnnnnnnnnnnnnnnnnnnnnnnnnnnnnnnnnnnnnnnnnnnnnnnnnnnnnnnnnnnnnnnnnnnnnnnnnnnnnnnnnnnnnnnnnnnnnnnnnnnnnnnnnggtgaggtcaggcaaacaggaggtaccaggggttatgctggaaaacaactcttagagaccccatgggggctgggtgacaacaccttgacagtcaggaattgggggttgggcatggagaccgagtgtgcctgaggtcactgctagaggtgtgcagtgacgtgcaggaagtgacaggaaaccactgtgaatcttaacaggtggacgcatctgccgcaacttgccgcatttcatgcaagggccccttgttggcagagtctgagctggggccatgtagacaagggtttctggattgtgactctaagctcccctcctgtgacagggccgggcgtgggaggcagtggagctggtacacagtggactgtgagttccgtgcctcacacccacgcacacgcccaccttgtctcaccgacacgcctactctgctcaccatgctttggccagaatgacgtttccggtgcacactgttctcctaacctagtttctcaagtcataaaagcagagactcttctacggcctgaaggatgctgtgggtggctggcgtggcaggtatctgctccttcagcctcgcctgtcacttctctttgttgtctccacatgccagcacagcactcactctacagtttgacttgaattgccccacactttctagctcaggccttcacaagtttttccactttttgaattcctcagaaccccatccctctctctgctcagcctttaggtgacatctgaacatggctttctccaaggagctcttcctggtttgcttaccacactcagcttccagaattgccccagaattgcacctgctgttgttttaaagaattaattctgccgtggctgggtttgtttgcttatttttgtttttgtttttgtttttttttgtcatgtgtgttcatgtgtgtgtatgtgcataggcatatttgtagtttatgtgattgcatgagtatggtgtgcttgtgttcttatgtatgctgtgtttgtgcatgtgtgtgtgtgtattcgcatgtgtgtgtgtatgcatgtcaatgtctgtgcatgtgtatgagtttggtatgtgtgaatgagtaagaggtgtgtgtgtgtagaccagaggccaaaacttcctctattgccgacattacttttttctctttgagatgaagtccttccactgaacctggagctcaccaatttggctagacttttgggctaagggcttctaggatctgtctgtctctgcccacactgctcagaactggggttacagatattccactgtgcacggttttcacacaggggctggggatcctaacttaggtcctcacgcttgctttgcaagcagttcaaccactgagccatctccccagcctctcatttatggtttgaaaggtccgtgaaacttaattctctgtcttcctcattagtctgtgagcccaacaaaggcagactcctcccctcttcattccttcgttgtcaagtctaagtgtggagctcagaacagatacatatctggtttttgtgactcctaaagggactacactaaatcttctatgttgcagagaatcctggaatgacaagtcatatccgggctgtatgacagttgaagggtcttggtgcctgttgcaggtgacgagtctaatgctgttccccgtcgtcctatggccttgatggactcgggtgttcgtgtgtctattttggacagggccaccctcaatgtgcagggcactgcatcctagtttcttggtctcccaagcctgtaaggtttaggaactgcttgggatacagcaggcagcccagtggcctggatctttgaaggagtgtgagtcctggtgggggcagggtctgtgcctctggaatcgttgccagccatcatgctagggcggacgtgttctgtgcccagagggcagaagctgcgccagcaggctccctagcaatctagtgagttggcatggctcacttgcagaacttttgcctccattcacagtgtatgttagcatggtagagagacttcctgaactggagcagagctagttgaattccacaggtgtgccagtggccagggactgagaggtgacatacaggccatggctctcaagggccctggagtggggagtgggcatagatcctgccatagtgaactgttttcccaagtctattgggctttgtggattacaggaggaggtcttggggctcagccaaagagcttggttaccaggagtgcagaaagaaacaagcagtgtgccagggtggaggagttggggctcagactcaggaacaaagtgggagcgtgaagaaccacagaatgaagaagctggcctatccgaatgccaaactagtaggcacagagctaggggacaagcgtcacagaggagcgtgggagcagcatacgggtgactggggccaggtgtggaccatgggcacaatgagactgtccttggggtggttagttaccttacaggctgcaacagggtgagggctgtctcaactgtcagccccaaaccagcaagcacttagcaagcaccgggttcccactcccaaaatcaggtatttggaaggcagtgttgatcttcctggtccagaggctgcagaatcagactgattcctgaagccgagggtcagtggtaggcaccaaggtgtgcaggttccatggcgacctgagaatgcagtcattcttgtgtaacatctttgacattagtgatcttgctgcattagaaaccttgcttcagaggaaccacgcggctaatggagcgaatgaatcacagactcgcgcccctctgtttcttggattccttgttgctgcctggggtggtaggatcctgtgggcttcacaggcaagagacctgggttcactagaagatggaggcaggaggattaggaattcaaggtcgccctcggctacccagtaaaattagttcaaggcaagcctgggctacacaagaccctgtatcagaaacttaaaacggaaagctaggattagtcaaggtgcttgtgatggaattgtggggacatcagtctgaaccctagagctcacatgaagagttgcagagctggagacatggagacagaaggacagccagggcttgctgcgagtcagcctggcttaactgacaagctgagagactgtaaggaggggcttgacattcctgagaatgacaccggaggttgacctttggcctgcaagcgaacatgtgtacccatgcgtgtacaggtggacacacatgcacctgcactcatacaaggccccatcccagagcaaatgcacagaaatcaaattaaacaaataaaaccaagaggtgtagatgctgcgttcccttgacctttgggcaggtgatcaaggagtctgttttctggaatgggacacagagataataacgcctgctgggattgctggtagcactgtctgtgatgaagcatggagatcatctgcagcataatagctgagtgacaattggtcactgctgtttgtgagctgcctggataaaaagtgggggtggcatggacaacatgggcgaatgaaagcagagatgagttaagtaatgtgtttgtaagagagaaacctgtggctttcagctgtgcgatgatggtgatggtgatggtgatgatggtgatggtgatgatggtgatgnnnnnnnnnnnnnnnnnnnnnnnnnnnnnnnnnnnnnnnnnnnnnnnnnnnnnnnnnnnnnnnnnnnnnnnnnnnnnnnnnnnnnnnnnnnnnnnnnnnnnnnnnnnnnnnnnnnnnnnnnnnnnnnnnnnnnnnnnnnnnnnnnnnnnnnnnnnnnnnnnnnnnnnnnnnnnnnnnnnnnnnnnnnnnnnnnnnnnnnnnnnnnnnnnnnnnnnnnnnnnnnnnnnnnnnnnngatgatggtgatggtgatggtgatgatgatgatagtgatggtgatggtggtgatggtggtgatgatgatgatgacagtaatgatgatggtgatggtggtgatgatgatggtgatgatgatgatgatgatggtgatgatgatggtgatggtgatggtgatgatgatgatagtgatggtgatgatgatgatggtgatgatgatgatgatgatgatggtgatgatgatgatgatggtgatgatggtggtgatgatggtgatgatggtgatgatggtgatggtaggatctgaaagagaacaatagaagaagagccagaaggctagacccaccaatgtggatttcccctggtgcactgtggttaggagcccaccatgtctcctgtgctggttggaaggacacagtactggtcataaccttgtgctttccactcctgctcttcagacctctgtgagagatcacagagcttttgtgcagctgatgggaatggcaagtgtcctggcagtcattgtctgtcatacatgaactcccccttaagtcttagataaaacatacagcagatattttgacatcttacttttttatgtccactcctctaataatgaaaaacaaatttttggtgtgtgtttgcatctctctctctctctctctctctctctctctctctctctctctgtgtgtgtgtgtgtgtgtgtgtgtgtgtgtgtgtgtgtgtgtgtctgtgtctgtgtgtgtgtgttttactggggtttgaactcagggctttattctcagattaacttgtaccagggagatctgagtaaacatctcttgctccatagaaggtaccaagtaaaccagtgagattactgggcaaacttacagtgcacaggtgaggaattacttatgggagggtgactggctcctaaacagctgaatcaccacaaagtcccaccttaccatggatgctgacctcacagaagctgcatcatgcagacccttacaaaattttcaggcaatttggctggctggacagtttcctcttcaatcaaccattgctgcttatttaaccttggggaagggctttatgagccttgtaggtttcaggaacttcctaagacttgaaagtttcatttacttcctgagtctgtgagcctcctatctccctcttagagggattgtttcaacttgcatgaaacatctaggcaacacttggatgtactaggcaagtgctccaccatctagttacatttccagcccttttgtaatttttaattttgagaatgggtctcagtaaattgaacttgagcttaacttgggaacctggttagggcttgagcttgtgaaattctttccttggcttctcgagtagcagagattacaggctttgccactgttactctctgccattctcttagagccttacaaatactaactcattaaattactcaacagctgtttggatggatactgggatcagggcatcagaaaatgaggactgagatacaagctaagagtcagtgggagagcagggtctgaagtaggcaggaagctgcaggcagcagagtcatccttacagcccctcagcaggatgtcccaccagacagccagacaaagcagagcaaagcatccatccaccctgggggttttgtttgaggttcaccatgtcagaaggcatataggctttggggtctaaaactctgggcacaagatttaattatgacccatctgcctgtctgggaaaggcaaaatcttgaccaatacagtagttgctgtccacatgtggttgttgagtactcgaagtatggtaagctaaactaagatactggatttttcattgcatttaattttagccaacttaaatttacatagccacaggtggttagtggctgtcctgttgcacagtgaaagtccagctgctttagtcatttctaaataccatatgccagacagcttctcagcttgttcctttcctagcatgtgtgtgatgtattgtgtgggaagaaaaatactaattactaagcttgaagtcaggcaagtaaagagaaccacagccatcatcctcccaaggctttgttatctgattaactgcctgcctatcttctatctatctcagtttctctctcttctatttatctatccatcacctgccaatctccctatctccatttctctttcatctatctatctatctatctatctatctatctatctatccatctatctatctatctcagtttctctcatctgtttatcatctatctgtcagtctccatttctctctcttctatatctgtcatctatctatctatctatctatctatctatctatctatctatctcctgtctaacaatatccatctatcattcattttagtgcagaaagcaatcggctcccttatgacattttcttgcacctgggtcatggtaccttgtatgcgctctcccctgactgccccccttccctcctactctcattgctggtctccccctccctccaaagagtccccttgttgctttcatgtcacacacccacacagtgttccacaatcagagaaaatccccactgtcttctgtctccacattgccctcttacccctccctttagaatcctcttgtgcccctagtctctcccttcagctcctatctttcatgtccatttgaattttactggaaaccaaatggtataatatattaacatataagaatagtggccatgaatgtgctgtgaacatattatctacttcccataaggaaatagtaatatcataattttcatgctggattataatgctgagtgtagtagtcagggttagatgtgagtggcagtgtggtgatgaatgtttagctggtcctctgggaaaagtgtgtgcgtgtgtgtgcgcgtgtgtgtgcatgcgtgcacgctcgcagcgctttcagtaagatgtgtagaaaaggcacacagttacgtgcaataataaaatatgcattactcatataaagttcctgaagccgattaattctcagtgaatgcttttattgatttctgctgagcactgagtcccttgccagcctacagttgcaattaattcataaatgtaattccaacatgaagcttggatgatactttggttggttttactgattaaggtgaaagtactatgtagaataactttttgaataaccttagtcatatgttaaatgtatgagcaatttgttacttaaataataactttcacaccatggaaattgtttcttacattcgtgtgtgtgtgtgtgtgtgtgtgtgtgtgtgtgtgtgtgttattcaaaatgcaacatacagacatgacgcagagtttagcataattggcatggtaaacatttttcactggtctaacaacaaagaaaatcaacccctgaagctcttagcaatttctgtagtgtaaatacttgcaccagtttcaagctgccagcatgcttttagtgagagtgaagttggggtattgcaggcagggagagagcagaaaggagctgcagtgacccatgtgtgcaattctcttcaccacccaccatcagccatgcattctgaatgtttagaaagaaacacctggcatgctggcacgtggaacacatggtatgttattgaggtggaccttgaagtacagtttgctgatttgggcaaatgttgagtaaaaggctcgtgttgtcagctagagatttaggctgcaggatgtgctcatgatttagaaaaacaacatgaaaatgaactctggcctccatgctccaaggcaccaacaaacaaaaccaatggaatgaaagaccccaaagagctcccagcacctagggaactggagttgtcactggaactgagggagcagggtgccttccctgtttagtcacaaggcctgctaaaatggaggcatgtgacatctgagctgtggctctcttccatgacacatgaactgtggccctcttccacggaggccccctcaagaacagaggtgttttccattattctatatgaaacacaaagcaggagccatgatgaacaggtaccaaccactctagcgatttttccatgtgaggcagaccggacggagcaccaggatgggagagagcctgcttttttatttactcctgactcttgaagatagaccggagctcagtaaatacttgtagaaggacgagatgacctcacagaaactttgactctgtcatcacacgattatatattagttatattatcaacattgtacggatatgctgttggtattctaaatactgatggaaaccatgacttggagctgggtctggtgctgtgaaacccagtacttggaaggctgaggccaggggatcatttatattcatcgtcacagactacatgccatgatggaactgttaaacatataatcacttgtatagcaacctatggagacactctcatgcatcacttccattaatgtgtgctggtggaaatgggaatgacccacctaccctctgtctctatggagttacccatttggacgttctcgtgtgaagagaatctcgtgattcgttgccttctgcagttgatttatttaatttcctgtcttcagggttcatccttgctgcggcatatagtattttatttcctttttattgctagatatcattgcattggacggatatagacattctatttgtccatttagcagttgatagaattttcttttgagctcttatgagggatgttctgagccccgggctcgaagctccgtggcttgttttcacttctcttgggtttgagctggggctgctgctgagtcatatagtgacagacagctttgcaaaatggctgcagtgccctgctgcattcttgcgggagtgtatgagagttccattttctccacgtgtgatcagggaaattgcaacacaaaggtgtgatgaatattaaaggaacttctcagtaagcgtaaaacttttaggatttgattgaattgacctaaaatctgtattccaagacatagttttagttataatcctgtaaatctagataatatagaagaataaagcctccatgtgcagttatgtttgttctgcaggctttaacacatgaccaaaagcatggattctggaatctgaacaaggattttaggccagaagggtttaactctctttgtttggatgctctaaaaaatttaagtaaatttataaatacaagttgtggtggagcgcatctgttatcccaggactcgggagatagaggcagagggatcgagagttcagggctagcttcagctacttgagagtcatgtcaaaaggaaacaaaataaaaaaacaaaaatgcaaagtggcaagcaggggtaaggggatcatgcttaatcctggtttctgaaaacactggtgtctgagcttcagctccgttaacaccctgtaacataataaaaccatatatagtataacaaaggtgtgaggagactaaggcatgctgatattacacgacaagaggcctgcaggtgctccttcaaacatgacatagcatgttatcatgtgtttctgtatggcctgaaacgcctggacaaggcctttacatttttttctccccgctcatcctctgccggctgacggtggagggttttcagtggagagagcttgcttttcagggcttgcctgtttgtgatgcctggtgacttcctgcagatacaggtgggcctgtgggcgagtacctcaagtgtatggcatgggcacgcccttaagcgtggcaagtctctcggaatttgtcggatgtgagttcataccacagtctttgcagctgagacaaggttttggatgttttaaatacatgttagttaatgttaatttaatgaagtaaatatttcatgaaatacataccatcaggggaattttttttctaatggtattaacttggactttctgtctcctttttttaaaaaaataatcttattttacatatcaatcccccctcccagttccctctctttcccatcctcccatgcccctgtactaaccccccaacatactccacatccactccccaaggggagtgagggatcatcaaagtctgtcacatcatttgggggaaggcctaggccctcttccgtgtatctgggctgaaatagtatccctccatggggaatgggctcccgaagtccaatcctgcactagggataaacactggttccactgttagaggtcccatagactgcccaggcctcctaactgacacccacattcagagtgcttggttcggtccaatgctggtttcccagcttacgactggggtccttgtgctctcactaggtcaggtcagctgtttctgtggtttctccagcatggtcttgactcctttgctcatcactcctccctctctgcccagctactggatgaaggctctagnnnnnnnnnnnnnnnnnnnnnnnnnnnnnnnnnnnnnnnnnnnngggaagggcatcaaaggtggcctctccactactgcctagattcttagttggggtcatctctgtggatctctggacatttccctagtgccagatttctctttagacctatgctgattccctctattaagatatctcttttcttgctcttctctatttctcccctgactcagtcttcctgatccctcctgttctcctcaccccctgtcttttcctcttctcttttacctacctccctctcctgccccgtgctcccaatttgctcaggagttcttgaccctttcaccttctttgggggaccatgtatttctttcttagagtcctccttgtttcctagcttttctggggttggtaatcctttgcactatgtctaaaatccatatatgagtgagtacatatcatgcttgtctttctgtgactgggttatgtcactcaggatggtttattccagttccatgcatttgcctgcgaatttcaagatttcatttttttcccactcagtagcactccattgcataaatgtaccacattttctacatccattttcagttgagggacatctaggtactggctattgcaaacaatgcttctatgaacatagttgaacatatgagtgggcatcctttgggtatacgcccaagagtggaattgctggatcttgatgtaggctgattcccattttcctgagaaactgccacactgatttccaaagtggctgcacaagtttgcactcccaccacaccctctccttcatagactgtcattggtgtttttgattttagccattctgacagaagaaagatggtatcttagagttgttttgatttgcatttcctgatggctaaggatgttgaacactttcttatgtgtctttcagtcattttagattcctctattagaactctctatttagttctgtaccccatttttcaattggattgtttggtgttttggtgactagcttcttgagttccttgtatattttggaaatcagccctctgtcagatgtggggttggtgaagatcttttcccattctgtgggctggtgttttgtcttgctgactgtgtcctttgccttacagaagcttctcagtgtcaggaggtcccgtttattaattgttgatctcagtgtctgtgctactggagttacattcatgaagtgatcttctttagaaaatcaacaagacaaatctttatccaaactaaccaaaaggcagagagagcatgcaaattaacaaagtcagaaatgaaaagggggacataacagcagacactgaggaaatccagagaatcatcaggttatattttgaaaacctgtactccacaaattttgaaaatttaaaggaaatggaaatttttgtggatagatatcacttaccaaaattaaatcaagaacagataagcaatttaaatagacctatatcccctaatgaaatagaagcagtcatcaaaagtctcccaaccaaaaaaaacacccagggccagatggtttcagtgtagaattctaccagaaattcgaagaagagctaataccaatactcctcaagtattccacacaatagaagcagaagggtcattgccaaactctttttcgaggctacaattaccttggtacccaagccacataaagacataactaagaaagagaactgcagaccactatccctcatggacattgatgggaaaatactcaataaaatactggcaaataagccaggtggtggtggcacatgcctttaatcccagcactcgggaggcagaggcaggcggatctctgtgtgtttgtttgagcccagccttgtctacaagagctagttccaggacagcctccaaagccacggaaaaaccctgtctcaaaaaacaaaacaaaacaaaacaaaacaaaatactggcaaataaaatccaagaatacataaaaaaaatcatgcaccatgatcaagtaggcttcatcccagggatgcagggatggtttaacatacaaaaacccatcaatgtaatccaccatataaacaaactgaaaaagaaaaaccacatgatcatctcactagatgctgaaaaagcctttgacaacatccaacaccccttcatgataaaggtattagagagctcagggataacaggaacatatctgaacataataaaagcaatacacagtaaaccaacagccaacatcaaactaaatggagagaaactcaattgattcctctaaaatcagggacaagacaaggctgtccactctctccatatctcttcaatattgtcctggaagttgtagctagagcaataagacaacaaaaggagatcaaagggatacaaattgaaaggacaaagtcaaactcactatttgcagatgttatgatagtttacataagtgaccctaaaaactctaccagggaacccctacagctgataaacagcttcagcaaagaggcagtttacaagatcagggggattttaaggtgtgtttggggttctattatgtgcatctgttgctagaagggcggggattgatcctgagcccacttatcagcacagtgccctgtgtcccctgtgtgtcggaatccctgtgaccaggcaggggcaggctgctctgccactcactcactgttttcctgctcctagctgggatcacagagcagctgtatcccagtcttaccatgaggtggatttggagtaacttagctatttcctcaaagtcttgctcattctctcctccccgcttttctctcccaactcgtgtgtgtgtgtgtgtgtgtgtgtgtgtgtgtgtgtgtgtgtgtgtgtgtgtgtgtgtttgtgtgtgtacatattcttcatgcatgtgtgttccggtgagtgtgtgggagttagagggcaaccttgatgttggtcttcaccttctgctgagtttaaagcagcgtctctcttttgttagttgtggctgtgtacaccacactagctggcttgaaaactcacaggagttctcctgtctctgtctcccctctcaccatagaaacaactggaattatacttgttcggcaccatgccagctttgacacaggttctggggattcacttttgtgacttcacgtttgtggggccaatgcccaaccgtctgagccattgcctaagctctgcttccttgacttctacttacacagatcggcctctggttaacctgccttgagcaaacagaatgtggaccatctgattctttttctgggcagtggcagagagaagactctaaattgatcagattatgattttgaccaaatcagcctgccgaatggtctagaactgactttttaagataacagataacagtgtgggtttgtgtgaagacccacacagtctaatgccacgtggagtagatctgggtgacggtgagggcttgaagcaagtgctgctgctttgctgaagagtgcacagcttcaggggtttgcattctccaaccgttaactcgatttgattgtttcaagcaccactttctaaacttttgccttcctctggtaaaaccaagaaagacgttttcctctttaaaagcttctggagttttgtgttttcttctccatgcttcgcagtctgacatttctcaccagagacaaatgtagactgttctggaatcaaggtacacaaaaatgctccaacgcgctgcctcatgcccaagtctaggggcatttcacactcatgtttgggcgcctcacactcaagcttgggtgcctcacactcaaactgggcacctcacactcaagcaatgtgtctcacactaaagctaggcacaccacacaagggtctgggttttaaataaaccagtcgtcctccttgtccttcagtaggtattactcaagtaaggtttgcaatttgcaaaactctaagacactttctatttttaaagtataatggagaagcatttatgataaaaatcacaaataccagaattaatccccttacttgctgcatggaaactgtcttgaaactggctatcagcagaggcgctgcctgtctcagccttgattctttgttattgagaattattctgagcttttaagtggtttatgacactagaacccatgcgtggcatataattcatactcagtatgtgttgcttgttgttagtgttgatagtggcagctccaacaaacttaacattttggaaataatattctatgcggggcggcagactctgtaagttgccctagccaaatatccagtgggatatccagttacctggtcattgtgctttgctggtaatacaggaaatatatgcaaatgggtacacacacattggcaggcacacaggacacacatatgcatgcactcacacatatatacatgtacacacacacacacacaccactcaaattcatccatattgagcctggagcttcccagggaatgttctagaatccaagtcctttgcattgtgcacctatgttctcaaggtcctccattcatccctcgtggcttttgaagcggagaaagaagcatgagcccatcactgctctctacagtgttagcacaagccaatcactatgctctacagtgttagcatgagccaatcactatgctctacagtgctagcacgagccaatcactatgctctacagtgctagcacgagccaatcactatgttctacagtgttagcatgagccaatcactatgctctacagtgttagcatgagccaatcactactctctacagtgttagcacgagccaatcactatgctctacagtgttagcaggagccaatcactatgctctacagtgttagcaggagccaatcactatgctctacagtgttagcaggagccaatcactatgctctacagtgttagcaggagccaatcactatgctctacagtgttagcaggagccaatcactatgctctacagtgttagcaggagccaatcactatgctctacagtgttagcaggagccaatcactatgctctacagtgttagcaggagccaatcactatgctctacagtgttagcaggagccaatcactatgctctacagtgttagcaggagccaatcactatgctctacagtgttagcaggagccaatcactatgctctacagtgttagcaggagccaatcactatgctctacagtgttagcaggagccaatcactatgctctacagtgttagcaggagccaatcactatgctctacagtgttagcaggagccaatcactatgctctacagtgttagcaggagccaatcactatgctctacagtgctagcacaagccaatcactactctctacattgttagcacgagccaatcactatgctctatagtgttagcaggagccaatcactactctctacagtgttagcacgagccaatcactatgctctacagtgttctgtctcagacttgaagtcaattcctggcaactgaacactgtcctaaccttggtcacccatggtttatagctctgtcttgattgtgtcagagggctcaaggccaaattcccattagccatataggcagaagcacttttcagaaagtggactgactccaaaacagcacgggggtgcttctctttgcccacccaacacacactcattccatacacatagcctgtctgggatagtgctcctttccttgcctgggtgtttcagttctgaatggcatattccaacacgggctttaggagccaccccaccccaaacgtgtaatctcgaggtttagtctttaaccagctctctatacacatgctacaaaactggtttatgtttccacctaaactattttattttcccaggaatgactatgtagattagttatcacattatacagtttaaacatccttcctgcagggctgttcacaattgcctgtttaaaaagaagcaaaataaaaagatacacttctaacttttgtgcacatctttgcatgtttttaatctgggaagccatctacatcattataaactatctccctactagaatatattaaagaggaccatgtggaccccagagtgtagaaatcaactggattttagtaggaagcataaggctttgggattttctagactcatcgtacaaacctaagaacggagggccatcaccgcaattgacaatgtgttctagtcaggatagttttgcctctgggaaagtcagaggcaggcaggaatccctcctgggattctcaagtctgagctgtttggctcagctccctagaaaactattcactggccagtgtgaacaggcctcaagagatgactcgctgtcacagtcatttccaagatgcttaaaggtacacagctcttttgcattgcattctgggtattagactggcaaatgttagtacagtttcaagaaagacttggaaataagcacacacacacatacacacacacacacacacacacacacacacacacagaaaatctccatgtctatgccccctcctttgagtaggttcctctcccacttttggaaaaacagtcacgttgggtgccagcttgagatcggcttccgtgaaaataccaaagcaaaactccgtgtcagttacttttctgatgctgggtcaagaagcaagaccaaaagcagcttagacaagaaagggcttacagttccagactagtgtccgggatggctgggagagtatggcagcaggggcaggaagctggctggttacatctccatccacacaggaagtggtgggggcagagtggacaggggcaattctatgacacctcaccccccaccgcccctgtgatgctgtccctccttcaaggctgtgccacccctgctcctatccatgttaaatctattggaaatgcgcatgagagcaaaggagcaaggagggaccatccccaggtatgccggccggttctttcctacacaggcctcttctcacttgtaaaaataatgctccctctacagcgtttgcctttttctgttcccctgctttctgagatctggggtggcgttctcagcttctgttcagacacagcttcatagaaaatccccattataagggaataactctcaccctctcattcagtacatatttatgaaatactgtctggccatcagaaacttctcagagttcttaaacatacaagcacacaaggcctattgccttgagggactggcattttcatccccacaggggcttcgacttctgcctcacggcaatatccagccttggatataccttgtgggtggcaagttccaagggggcatttgttacaaatttctcacaacagggtcatgggatttgctgacatacttgccttggatatgtagaacatatcttttgttttttctctatctggtctaatatttcttacgtgatccatacagtagcaaactgcatgcaaaccagaggctggggatatagttccatggtggagcattgcataaaatatgcagaggaggccctaaccctgggtaagaacaaacacttcttgtaaatgaaaacaaaacagctagatttttcttctcatccaaggtgatggattaactcttggctttgggaggcgttgtactttagtttgaaggagacaaggggcaagaggcattcccatcacataagacctttggcaagtggcaggttgatgatcttttgtgctattcataatctactgactacagcctcaatgtgcttccaagtgtgactgtcatctttcagatttccctcatgagtttcttaactctagacaatcaatgaagcaacaatttgacagagccagagagacagacggctcaggggctaagagcacttgctgttctttcaaaagacctaggtttgggacccagcacccccatcgggtggctcataacccggctttaattccagttccagggtctgatgctctcttctgttctctgagggcacccgcacttagattcacatacccaactgccacacacacgtagacataattttagaagcagaagtcaatcttgaaaaaggaaatctgagctctggtttgtagcatttgctcattaccatggcgtggcaactgccagatctgacgtcagagaaagcatgatagcgttatgtcgtgtttccactgaatggagcagtagttgtaaatcgcctccgagaacagcatgaatccaaaggaagtatagcagccaggacgtggtaaatgtggactctatcacctctgcataaatacagtttttttttttaattgcagattgtgcaattcaaattttaacaacggctgggtgggacagctgcttgcaaaatgtccagcaatttaacagttagctcgggagctgtctcagtgtcaggctgaaaatagtgaccaccagtgacttccctctgtcttcttcatctgacagctaatgtgctggctttcctctcttgcctgtctgcagtcactcttnnnnnnnnnnggggaacccaccccccctccactttcacacacccctgcccccacaacgtgttctgtccacttgggaggtgtcatactggctggttttgtgggctaacttgacacctagagccatcagggaggagggagcctcagttgaggaaatacctccatgaggtacagctgtaaggcattttctcaattagtgatcagtgggggagggcccaggccatggtaggttgtaccactcctggactggtagtgctgggttctataagaaagcaggctgagccgggcagtggaggcacatgccttagacccggcactcgggaggcaaagataggcagatctttgtgttgaggccagcctggtctaccaaactacacagagaaaccctgtctcaaaaacaaaacaaaaaccaaaagacaaagaaaggagctgagcacgtcaggggaagggaagcaagccagttagcagcaccctccatggcttgtgtcagctcctgcctccaggttcctgccctgtgtgagttcctgtcctgacttccttcagtgatgaacagtgatgtggcagtgtgagccaaaagaaccttttccctttgggtcacgatgtttttgtcatagcagtagaaaccctaactgagacaggcatctcaggcaattccgcatccaggagccagcctggtcctgaaagtgtgtctcatgttttatcacactgcatcttaaaccttcctgtgagccccagaggaaacctcaagctctcacctagtagccccgccccaccccaccccaccctaaatcatccagctgaggccttcctgacccttcctcttggccatcactgtctgcctcacgcactccgtgccagccatgctactctttcttaatacaacttccctgtagcaacttgaggacctaggtagggtgtgtcccccctgccagggatgctcttcccacacaacattccaggactggctcatcatacagggtccagctaagtgtgtcttcctcagagaatgtccctggccattctattatctaaggtaattcccacccacgtagccccaccctctgccgtatctccagtctcctgaactcaggcaagtcactcggcttcaggatgttgtgtggaagtagctgcggcctcccccccacgtagggttgtgaggatccatggggttactataaggaagcttcgtctaccacctgggtggtactgagcactgtacacccttagtttctgggcttcatcagttatttgggtagtattaatgctgcctccatggtcactaaagtatttgaccacttgtccccatctagaggtgtctgttttctgtctcttcctttgggatttgggctcctggggaacaatggccttgaacaacatatgcaccgctgtggtttagtgtctggcctggtctgccatactctattgtagtagtcacttctgtattgttatgacaaaaccacccgaaagagacaacttaagggagaaaagacttagccacagtggctcttagttcagagggttttagccgggaaggcatgactgcacttagatcaccccagagcaggaagcagagagaaatcagaaccttgaaccaagctgtaatcttcaaaagcccagctccagtgactcactttctagtaggccattccctctggaacgctccacagcttccccaaagagcatccggcagctcgaaaacaaatgcctaaaacatgagcctgcggggatgcttcagaatcaaaccctagcaatacttaagtatctgtgaatgaatgtgcttataaatgagtaagcacagaaattaaggtgaccacattcaagccttgggttattattggaaaatattgtcaaatggtcctgtcatcagcatgattgtgagggcatagatttccattagaaaaggagccctggactgtggctgctcttggccactaagtccaagtattgggcgaaagcctggagatttggatgaacaacaaaacccctggtcctttttgatagaatgtctctcacctttcttgtggagcagccttatatacaaacttacaaaaaccccaggtcaaagggttcacaacaggatattgatcccagtggggtgaggtcaggcaaacaggaggtaccgggggttatgctggaaaacaactcttagagaccccgtgggggctgggttccaatactggactcctccatgggaaagtgtgcttctgtgaattctgggaactgctccttgagtgcttcagttgtgccaatcattagaaatgacgagctaaactgagttccagtcatgaagtctaaaccatgacaatgaacatactgaccctcaagagggacacgcccagatgcagaggagctgggacttggggtctgtggggccttctggtgaggaggttcggcatccactcttcttggaggaggaactacattagctccaagaagctcccagcatttgctcggtgaatggttttgtttcaagcccacttgccttgatgtgagtcgtctgtcacgatgattgacaggcccattttcacatttggtcatttttctttcgatccttaccacgttgtttgctaggattttctgaaactctccctatgtgaaggtgtgaagctgagggcgtgtggcaagctttgtgaggtggactacagtgtctcctacctggtgagggcttagcagggccacaaagcagggagtgaaaagccacagatgcaaggcaggaaagccacattgagcacaatgtctcagaagactgtggtggctcagatcacgggaagcgggagtgccaagcagtcttccctgcccccccatcctctttaagggatcacagcacaggctggcattgaggttaggcaagcgtccacaactaggtagataatcctaagggcagcctaaaaggatgttcagagagctccttaatctctgtgaatcagttttcttcccattttactttcttaacttccttcattttaaaggaaaaaaaaaaaaaatgaggcaggatctcctgttgcccaggctgaccatgaactgacagtgtagctgaggttagtctctccttgcttctaccgcccacgcgctaggattacaggctggtactaccatcctcagatgtctctgagttttttaatttgaaaaataaaattaaaaaatgaatttgtgaggactaactgagatggccctaaaccttacatttactgtgtgttcagcacctgagggtctgaagtatctaggactgtttgggagaaatacctgtggacatgttgtgagggactttttacaccgggctccttgagatgggaaggcccagcctcagtgtaagaaacaccattccacgggctggggtccagggactgaacgaaaaggggaaagcaagctgagggccatccatttctctctgctccctgcccatgggtgtgacatagccagcatctcaccctcctgctgtcgtgactaacctgccatgatggatgaccgtagcctaaaaccatgagcgaaataaaccccttgcttccttactttcacctttatcaggtgtttctgtcacacaaaagagaaaaacagctaacacaaatattccgtttttatatgataaacaagcaaaccaaggagccagtatttgtctacagcaggttagagtcaggtctgtcagcatagggcacagctggtcatgggccaggcctggagtagaagaaaatagagtttgggcccagaggttggggcatttgatgactgcgtgtaggatggccgggtgttgggcatggcagtgtaacgatggagaacagtgggtgcctgggacctgggactggttgggcttctggaggagacactgtctggggactgacagctgagtctgtcccaaccactgcacagctcagttctcgatttaaatctacccagagaaggactttaaagcatcagaccagacaaaagtttgtatttgtcttgtcttaaagacatgacttgtgtgtgtccagctcatagaacttggccaccagacaacatccacatcttcttatgttgggtggatcgaagagcagagttcatgggtagaagttaccagctcaggaaggtgagttcacagatgaagggaggggttttaagacgagaccattgtgaacgtggaagagaaggccacagaagaaagatggctgcttctgtatgaacacaggtgggcccggcgtcatcttgtgagagaaggaagtcaggacgttaggatttaaaaatggggccaggttatccttaaatggctgcagcacaaaaccttgagatcaaaagaattaaaagtactaacccttaaggaaatgccccatacctccagaatagactgacgactctccagtggtttcacagtgtgtgtgtgtaggcgagtggagagagtaatttggcagaaaggggaaaagttaacttgaaagaggaaatttgaggttagaaaaagcatgagggcgaatcactcgtgacaagtgcaaagagaaagagtgagattcaataaggaaccagagagacagagaccagggccagagtgcggccagggaggtcacagaagccatggtgcagagccctctgtgtgctcatcctgcccccccaagcacagtccatgcagcaggcaggtcaagacttgtctgtggagacagcggggaggaagagtctgaggtttggcctgaggctctctgagataaagcgtctatgttaattccttccgttgagggcactatagaggagatgatggtgctgggtggctttcccccaccgtggtgtgcatcgtctcctgggcagaggttcctgaacaggaggtctagatcaggagaaagctacctgaagcaatgagcaggcagggcagcatgggcgcccttctctgctcttgactggatgtggtgtgactagccgcttgagttcctgccttgacttccttggatgatgggatgtagtctggacgtggaagccaaataaaccctgtactcagttgctttttttttttttggtcagagtattttatagcagcaatagaaatgaagtttgaaaaatgaagaaggcagagaagggacagacaggacaaggtacaagggacacaaagagtaaagaacatagaagtcgtgacggagcagaggataaagagaaggaggcggctataaaagagtgggcggccggtgtgtattcaccaccgtgtgggctccagatacaaccctccccttcaatcacaagaaacccgaggtgtagatgagctccgtcttatacagatgaggaactgtgagttcagagaagtcaccgttaaccacacagctagtaaatacccgagccaggattagaaccgctgcctgcagccttagaaagcccacatcatttccatcagcagaacagctgccatggtagggggagcgctcagcctgggtgtgagggaatataaatggcatctccctcgaatggtggggcaaacatgcaaataaaccatgactagaaagatgaaaaagagaaatgagaaagggaggtccacggagtggtgcttggaccataccacctgtttttcctcaggcccaagaggtcgctctcaagagtctgagagataaagcaagtaggtgggtcagccaggctcacagggactcttctgcgggtgctggacatgcagtgcacacggctggagaatccctagcctgtcacgagagagtccaggtggtggatggtggttggctgcagtggacacttgggaatcggtggagagggagctaaggatgcattctgtagacacacgcctggcaggaagtgtggtggctgtgcagggagcccagagacgtggagggtacaaaaaacaaccgtgcacagctgggagggagaatttattatctctagtttgcataggaggaaaccgtggctcacagacttgaaggactcacctggggtcggtccaggcacctaggtttcagaaccatagcctaccatgctgttttcaccttctctcttttcccctctccccttccctcttcctctctcctcctccctttccttctctcccccatctctgacccccttccttttctgagttttcctctcttttctatcccattctccctttcttccttcacccctttcctcctttctccttctctggctaaactggagctcagtatacagcccaggctagccttatccttgagacagtccttctgcctcggacacttgagtgtatacctctacatcccactttatttttattttaaacaaaatgcatgtctggtggtaaaacttggtatcagaaaatgggaagtatttttgagcaaggccttttcatcctatttgagtggggtatttctgtttgcttattttgtttttgtttttacatttgttttgctcacttgtttctagtaaaagcaggtgcactttacaggtgacagtggcattcagctcaggtttgtgtctcgggtcatggtattgtgtccaggcacaggttcacatagagccttagccgtggattagctaactctggtgctgtttgtctgtctgtccctcccccttttcccttttagcatgagtctttggattggcagctttccaggatgcaacagtcagtgggaaatgctaagatctgcctgtgaaactcacccacagaggtttgtatgtggggcactgggtctccagccagcgtgctgtttgaggaggttgtgagaccttcagggggtccctggggagaaacccgtgaagtctacagcccactgtacttcctgtcctgtcctggcttcctgacccacctggatgtgagatggatctgaccaccatgctgtcctcaccatgataagccatattcctgtaaccacaaccctgtatccctgtaaccacagctggcctctcctccctaaagttggttgagccaggtctttttaccaatgagagaagagctgacacagaaggcaattcttaaatgactgacttagtttcattcataaagtcaacaggctgctgaggaatgtctccctgctgactctggagtctgggttctatcttgcagcatttgtgggtgatggaggggagtaagtttggaccacccagcatcatctccaagcccacaaaaattcacactggatatgcttattgctaccagtgccatggtgacaccccccctcagctgctcagattactaatttagattcttttaaggctgtctgggagaatgcccacacatccagatttctgttttagaatgactgccagctactagaaatcacagtcaagatgacttgacatcaatactgaatatctctgcatactttgtggctgtgtttatacctctgcttcgttccagagggctaaagcaggtatttctcagttattggtaaggtttcagttgctccagtgctggctgtgtaagtgtcagggcctgagctcagctctccagcacttgtgtaaaaagcccgatgcagcaatggcgatgcctcccagcactgggcatgtgcaggcaggagtgtccctggggcttgatggctggcctggaccatgtgcaagctataagcccagtgagaaaacctgtttttaaaaataaggtggagagtgctagaggcagaaaactcaacattgacctctggcctctaattgggaatgtccccagccacatatactggaatactctatgaacaccacacacacacacacacacacacacacacacacacacacacacacggcagagagtatattaaatgattaagtgactcagttattacagccacctgaatacacaggacagaaatgtgggatgctagggcaggaaaatcaaatgttgaagccctgtctgagctacagaaagaattcaagaccagcatcaacaccttgatgagaccctagctcaaaaaatattcagatttcttccttatcgtattagaggtgctaagtcgaatcgtgtgtgtgtgtgtgtgtgtgtgtgtgtgtgtgtgtgtgtgttcagtgtcttaaccactgcccaggttcttcctgagtgactgtctgtctcctgagatgatgggtactgtgttcattcctgtttggacatagtttatcaggatttaaataaagctttctgtgtggaaggacaccatgacattcattatccactccctgaattgtgataaagacctctgaaaatggcacccacactctgggtgtgatcgctaatacctccctgaatttttcttaatgaataagcttaacagaggagggatagacaagagcttagactatgagactggagtatcaatcagaagaaaatgttcagaaacttgaaaacgagccaatgaacaaaaggtgggaagaggctcttagaagacgcgttggccaagtctcatttgaagggtcagagtcaatgtcttctgaccactaagcccacagtgtctctattgtaacaactcaagtcttctgatgctgtaaaaaaaaaaagaaagaaaaacagacaacaaaaccttgtctttttttctgcttatgatctcaaatccaaataaataaacaaataaataataaatctcagattcaaggcaacaaagaaggtggatagattttgtgttaggcagaagacacatcaacacagcaacaggaaacagatacagagtgtggactggcagaggctgaagcctggctcaaccaaccctggacatgctcggtgaggaaaagagggagacatcttggctagagagcagaaccaggccgcaacgatggcagacacacctcagtggtgggctgagccctgggtttgaggaagagcagaaggacttttgacagtagcaaggactccccaagcctgactctgcctcaggtactcagtcactcaggcagaagggttcctagacctagaaacaatggttgtaaaatcagtgaactagattaaatagggcagactcaccaagcaaccaggccggaagcagggccagggagggagctttggtgttctgggctctgagaagaggggtgtgaagccccggtcaacatcccttggagccagtagtgcagagaaggggtactagccaggttctccatggttctgtcctcctggactgttccagaagctgttcacaggtgacttgtttcaagatgaaggtcccttctgtgcccattcagaaggcaaagggtgacatggaatgtagaggtgggcattgcccttgaggactccttcctaggggtcagggccccagatggatccaggatgtcagaggcagctactggctgaatattaaacaaatacacgaccaggtgcaatggtgcagtcccgtcatcctagcaggagtattattattcgtctgaggccagattatagtgagttcaaggccggactaggctatgtagtgagatactctcaaaaaggaaaggaaaagaaagaaagccaaagctacctctaaaagagtctgggaggtgacagtcagactgggtaagcaagtccctgtggtgatgtctgtccctaagcagagtccccaggggacacagcaactggaagccaaagctggatccaccccaggagggcatgggtattacagggagtgatccaggctgcagaggatggaaaggggaacagtcctttttgaaagaaaaaaaaaagccaacagcaaagggtatgccctggaccgtccaatgatattcaatatcagagcaaacaaacaaacaaaaatagttagggggtggagagattgtctaggtgaggttgagagccctggctgcttttgcagaggacaggggtttggttcacagcacccatggagcagctcccaacctcaggaggctccagatccagggaatctgatgccctcttctggcctcctcaggcacctgcatctctctctctctctctctctctctctctctctctccttctctctcttcctctctctctctcgtgaaatataaaaccaaatatatatattgagacagggtttttctgtgtacctttggagtctgtcctggcactccctctgcagaccaggctggcctcaaactcacagaaatcctcctgcctctgcctcccaagcactgagattacaggcatgagccaccactgtctggcccagatattattttttaaaaagagaaaagctggaaaaatgatatcttttggtttttaaaataaaaatgggctcttattttatatccctcatttgcccttgtccccacccacaatggcctttaaccttcaaataaggttccatttgtaaagccaacctcccctttcacagactgagtgataattacaataaacacacaaataacactcgtggggtaggtcccagcagaaagaactctgctgtcatcctagagaaactgtcagagcaaacccatctctcactcatgctgtcattggttttgaaaagtaatgcaagcagtggcgttcagcacacactcattggtgtgtggtttcctttattgggagagctggtctggtagctcctgaatcactttcttcctgttggaaacgtgtagcacccaatccccttagcaataacctccactgtccccacctgccagggtcacatcacccagcgctgtgacagggacctcacagagatctctgctgtcttcggcagcttgggtgggaagtttaaactcaggttagtcccatctcgatttgttcaacaacccctgatgattaacaggaaaactcagtgtgggagagatctgcacgggcctcctgggactttctacctcggtgacctccagcctcgtctgcttcccctcactgctgcctcccagactcatgagtcaacccctgctattcctgaacgcgtctgtgcatctgtccggcatctgtcccgtccctgccgcctggccttagctcctctacctggagctctctccagaggttacagcctctgggcacacttcagagcttctcggaatctatgcttaagtcctccccctctgtgtggcctccccagaccattctgagccccttgctcatctgcttcgtgtttttcttcttttcttgattcttgtcctcccgtgacataattcataattagcttattatacttgctacgttaaacctaaaccccaaggtcaatggtttgattcaagttcttagaccagtatctgtctaacacgttgtgggcctctggtccatgctctgtgatgaatggggaccgtgtaaacatgttcagtgtccattccttcatctgggtgtttactgtggatctgtgcatcacatctccagctggtcctcgtggtcaccctttcagttgtccttttccctgtgaccatctcatttggtcatgttgtttgtaaataatatcaaagccattaccatgttagcccatggaactacgctttgtttttacagtccactcttccctgtgtggccttgttaaagcttcccagacacgtgttgcttcctgtagtgacatcttgccttgccagtgaacttgtagtagtggccacaccctttgggcgtggtttcaggtgtggacagacaagacccctttaaagagaggaactgcagcccatgctctcnnnnnnnnnnnnnnnnnnnnnnnnnnnnnnnnnnnnnnactgcatctcctggagtaggaaggccttggcggttatttactctcatctgtgtgagtttccccccaataaaacacctgtttatcatttattctgtgtctggtgaactcatttaaaccctgctttcagcttccaggtcagccaagtcccaaactcttgagtgaactcacatttcaggttctatcttctgttaaactcggcacctttataataacgtaagcacagagcatctggtttgtttcctcgaggtacatcaccgtgtctttctcctctcaaagctcttcacatagtggaaggtcatgaagacagcctgtacaatctggtctgcacatgcaactgcttcagtgttaggagctttccccggatgtggtggtgtgcccctttaatctcagcatctgagagtgcatcttttcgagttcgaggccagcctggtctacatgctgagttccaggatagccagagctacagagggagaccctgtctcccctcaagaaaggctatttttaaagttcacttatatcctttgtggtagcatccccctttgataaaagtcagctacacattactaagcccacatttactgttcctccatcatttgtgaatgtacagacatgcaaactccccagaccttcctttaccaaatgaattctgtaaaccattctatccaaaacagctcttagcgtcagtgaatttgtcttagatcctgtgaaatccagtaaaaacacaattcttctctgtatgtggtttattgcttggcttatataaatgtgcaagcatgaagactggagtttggatcctgagagtgttgtgaccctgccgaaggtctacaagctccaaggcagaaatagggacccagggtacactggatagtagatagtaggattctgggtttaaaaagagacctggtttcaaagagagagcctgttcattaaattgagtggattgagaatactcatttctaacttctcatctctatgagcacaccccatttgtgcacatgtaccaacacacacaaacacaaagcatataacacacacacacacacacacacacacacacacacacacacacacacacaaggctttttgagacagggtcttgctatgtagctctggttggtctggattcacaaggctggccttgaactcacagaaatctatttgcctctaacgactgagccctaggattaaaggtctgttccatcatgcctggctcaaaaacatttcttgggcatattttttgtttgaaaaattctggacttccagttggggtccaggctgattatgccaattttttttgccataaaattaagaattatttagaaaaactctggcagatgatctaagctacctggaaccctcaaagtccatcaaccagaaggtggagaaaatatgtaacaaggttgtggtcacagcaagtcatccagcttgtgtgtgtcctgttaacctgcctcttccagatttctgcgattaatggagaagctgatgtcttagggagaatctggtgattcggggggaggagctggtatcttggggagaagctgatgtcttagggagaatctggtgatttggggagaatctggtatcttggggagaagctgatgtcttagggagaagctgatgtcttagggagaagctgatgtctcagtgaatgttgtgtgttttcactgccagccactgctttgtcctagatgtccacatcgattatttttggttttgtccttggggcttgaggcatttaatcatctagggtacaatataatacttaattgtccccatgcttcacacagtagtggcatacaaacagcagaggctgataaatacccatctgtgaccatgacggcccagaggcaggacacatggtactgggaggcagtattcctgccctgagtcgccttccagtcagaagaaaggtgttttccccatgcagtttcacaatccacaaaaggaaattgctctttgtcttcttatcaacctgggttgcagacttcataatttgcctttgtgtttgaaggtggcagctggccaggtgttcctgggcacagtgaagaagacgatgaaacgtgtttgcctgaggaatattcaggatctgtggagacaccccggagaggccctatggatgcttgtccagcttcagatagacagatgacctcccctccagggttttaagaatatcgtacagagctgggagatcgcatcaagatgatgaagttcttgtccagcagccataaagatctgagttggattcccagaacccatctttgaaaggtgggtgtggtaatgagcatttgccatttctgtggcgatgggaggggaagcgggcgcaggaggctccgggccaatgagagatgcatctcattcgaaaggtggaagatagctcaggagcacacccgaggttgtcctcgatttctgtgtgtgcaagcacgggcataggcacatgcatgtacacacacacacacacacacacacacacacacacacacacacacacacacacaggcacataggcacacacacataataacaaagactggctattggccaactatgatgagattcgagggtgattcctttgcatagtccatttaaagtcaagtggtttagttatcaaagctgtttacctgctccccacaagtgtccaaacccagaaatgaagcaatgaggaatcctggctggatgtaaccatcgacaccaccagcaaaggactgactgggacacaccaagagcctcagcctctgactctagtgtccctgcactctggagtgggggccagcaagctaccagccctgggcctgctgcctactttggaaagtcttgggtgtgagctaagaaagacttttacattttcaggagctaacatttcatgactgtaccagaaaagaaattcaaattccactacatataaagttttattttaatgtataatgccattcactgacacactgctaagaacaccactgtgtggagaccatctagccagagccagccatgcttcctatctggtcttctcctgggagctttgccactgattatctgcctaaaaacaccagcccaaacaacacactttcagctctggagggagcttataacaccgggtcatctggaactgaaccagagcatcagagtgactgcaccccagacagccgataaaagccggtagatcaagaccttggttatctaccagtgttgagaaataagatggttattgtaaactgttgcagctgtgaggggaaaggtatccttggagtcgggagccaaggaataccacagagccacaccacacaacagacctcacatgagacatttactgggagagctacaggaaggtgactgcctctgctcaggtgagaagcagcagggaactgagtgagaggcaggctttatatagggtttcttgggggtgggggtggagttttccagggtggagattggtggaatttctagtcctgagcttgaggcaagcccagggacaggtgagatttcaagctcaggaattggtgaattttcgagctcagggattggtgggtttttgaaacctggaagtgaatttagactttacaccctaacagttgtgtttgctgaaatggaagaaaaagaaacaaacttgtgtaagtataagattatagctttattagtctgttcattgaggtacccaatgagcatatcaagggctagaatattgaggcacagactgaatgcaggagaaagtacaacacagcttagcgttagctgtgattgggtcaaagatggcagtgctgctggcatttccctcacttgcctttgcttttgttccttctcctgttgtttatgttactcacaaattgaaagtcatgcttagagaaggttagaataaaccatcaggggcctgaaaaaaggaaactgtgggggacaggggtgtcactcagagtccctgataaaggccatctttatcctgtcctttaccacgtgtgtcctaaagaaaggaaagagcagacttcttacagcacctctccccccactaacccagggaaccagcaggtatggaagagtacctcttcattcaacaaatacaagcaatcttacttaccaggacttacacatccaagcaataacagtgctctgtccctcctccctccctcctctcctctccccctctagcagccctgctcctctgcccctccctatcctatccccatagctggaaaatgccgctgtttgtccattggaatccttgaaaagtgctcctactcattaccactgttgtctgaatgtttcaagatatataaggataactgcaatcctagccgtgggaagaccgaggcatggggattgccatgaatttgaggacagtttgagctacatggtgagtaacaggtctgccagagctaagtggcactctgtctcaaatcaggctcccacaccgcctggcctgcaggagctcccccttggctcccacacagcctgcaggagcgccctcttggcgcccactctcaacacttgtttactgtgctatagtctttgggaggcaccttgttacttttgtaaaggagccttgtaagtttcaggggcttcctgaggccctgtaaggttcccttagtcttaggagctgcgctccagcagtgtgtgtctcagaaggaagggacaacaacacacaacaaggtaaacagtgggttggcacaggaagtgaatcggaggacactaacaagttattatgaaacacccatagagacaggacagcgatttcagaatgggatagtggatgacccctcctgcccagtgttctcagcctctgtgctgatggcccagtgggacttacacacaccccatgaaggaactggcattgcattgcagagggctttcctcctgaatgctgagtaactaaatccagttcatatttattgagcaccaaccatgtcaggtgcaaggcgtgactgaagttctgggtttcagaagagggaacacggagggtgggggttcctgctactctgactgtgattcagagagacgagcaagaggaagacacacatgtatttcaaagagactctcgtgactcattaaattaaggacattgtgtaaaaatctctctgagaagagtgtgtaccctaagcatgggacggcgactaacataggacctaccatgtgggggtcaaatagggttttgaattaaattgatagttgtgaactgtagagaaatatggtatcactaaaaagattaaaaggcaaggagattgtgtgtatatatgtatatggtgtatatatgtgcatgtgtgtgtatgtttgcatgtacatgtgtgtatgcatgcatatgataaatgtgtgtatgtatagtgtgtatgcgtgtgtatgacacatgtgtgtgtatgtacagatgtgtggctgctcttggccactaagtccgagtattgggcgaaagcctggagatttggatgaaccacaagactcctggtcgttttctgagagaatgtctctcacctttcttgtggagcagccttatatacaaacttacaaaaaccccaggtcacagggttcacaacaggatattgatcccagtggggtgaggtcaggaaaacaggaggtgcctgtggttatactggaaaacaactcttagagaccccgtgggggctgggtgccaacatctcccccttctttatatataacaaaacagttatcaagtaagaactatagtgtgttactataactatctatcttcaactccatcaaagactatagaaggataggtctttgaagggtttgaagaatatctatatatctagaaaacctaactagtatcaacaaatgaagatccattccaatacaaagtatcatttctatgtcatattcctccttttttcttttaaaagtgattgactgtgaccactaccacttctaactgaccaaatttaaatgaaaacaaatatttggatcacctgggccactgcttcaggggatcctgccccatgaaaccataccagtctggaaggaatccacagctcttcaccctccatgggaaaaaaagcagaaatttccctcccaagtaacctgtactttgacgactgttgctccttccccagcaattaacgattcaaagacaacacaatagcattcttttgttaacaatcacacatttatgatcacacttcatacacacatgtgtggccacatcatacataccgaacatacatacatcttttgaacaaaactcacaaaggagaggaggtgtgggagggatggccatccttaccattgcttggcatcttggagggtcttgaggactgccgaagctttgtccattcctgtgtggtcttttgtagggcctgggtcttttctttatccacttggacatattttcctttctcatccgatgcaacagatgatgtggatggcttgcggtgatggctctgggaaaccagctgaaagtccagggctattggggatgaagacattgggttctgcacagggacatcactttctctggagtctttattggagatggaacggtagaggagctggagttaaaggtatggttgaccgtggacaaagacttggtgacaggtgtcttgaaagggagctcactgatgacagtgttgttactcaggtcaaggggtactggctttgcttttccgccaggcttgaggtggatattgaccgggggtgactggttctccttcctcggctggcaaagtgatggggcattgtgctcatgaggatgtcagaaaccgggtttgtgggcacatagttgtcatcagagctggcagtgtctgatagacccacgatagttttttctagagatttagcagaccagcaggcagtttcttcacctcgtgttggatacttgtagtcactgactggaggtctctgttgagggctgccccacagaggtgtctgtggtgctgtggtaggggagccatggctgactccactaggaggtctccaaattaatgatatcaaacacaaaccacttttggagctcttgtttgttgaaggtcagggttcttccaagcatagtgccccaacttttcctcaggaggcaatttctctagccagtctgtgcacaccacatcattgctggctaactagagcccacagcaggctcgagtggacaaaagcatgggctgctgggtcagctggctgctggtgggtagctcatggaggagggattccttagtggcagatttcctacatttctttaaattttcttagcattattacttaatttaaagttaaaattaaatcttactagtaccttgtctctttaaactttatctgtgtgattgactatgatctctgttccaatctaactctcttaggagttgaggcaccccttttccagtgcctttacaatctaactctcttaagagttgaggcaccacttttccagtgtctttgcagtccaactctctcaggaggtgaggcacccccttttccagtgcctttacaatccaactctcttaggagttgaggaaccccttttccagtgcctttagaatctaactctcttaggagttgaggcaccccttttccagtgcctttacaatctaactctctcaggagttgaggcaccccttttccagtgcctttacaatccaactctcttaggagttgaggtacctattttctagtaccttttgcaatccaccctcacaactccttacttgctttccagccttctgagggtgatctctcagggtcccctttctttcccgatcttggtgaaacctccatttgtggctgctcttggccactaagtccgagtattgggcaaaagcctggagatttggatgaaccacaagactcctggtccttttctgagagaatgtctcccacctttattgtggagcagccttatatacaaacttacaaaaaccccaggtcaaagggttcacaacaggatattgatcccagtggggtgaggtcaggaaaacaggaggtaccaggggttatgctggaaaacaactcttagggaccccgtggggcctaggtcccaacacagatgtatgtgtgtgtgtgtatgacatatgtgtgtatgtatgtacagatgtatgcatgtgtgtgtgacatatgtgtgtatatatgtgtgcatatatgatgtatatttgtacaggtgtctatgtatatgatgtatatgtaagcatgtgtttgtatgatgtgtatgtgtgtatgtatacatgtggtgatatgttgtttatgatttattaaagccactggagatgaaaatagcaaagcagacatactagttagctatagaagccaggcagtggtggccacacctttaatcccaccacttgggatggagaggcagatggatctctgttggttgaaggccacactgaactacacaaaactgatccagtcctaaagagaaacagctcacacaaagatgatctcagcacttgggatcacatgcctttaaccccagcactagggaggtataaaaagcaaagggtctcgtgtggagattgattctccagccacactgaggagaggcagcagtctgaggctcaaggagacaggatcagccccttcagcctgagttagaggtgagagctagtggccggctgctttgcttctctgatcttcccttgaagcttgaaccccaatgagtctctgggtactttatttttcatttatacgtgtatatttgtgtatgaatagatgatatatgtgtgtataggtgtctatgtatatgtgtatgtatgtatataaactccatttactaatcactacacaaaaaatcttgtcattcatttgaagagaaaatttactttgataacagggcttttgaaaatgaaaaaatatggaaaaactttcagaagaaaattatggtttattagagtcctggatccaaaacatggttttagaaaaatggaacacacctaactaccaatgagcacaggggacggtcacgtcagacaccttcatgaagaggcatgtttccaaacattcagatctgtgtttatggtcaggctcctacagggagccatcactcttgacccttgtgcttctctgagagggtaggaactttaagccagaggacctggtggcctggtgggtttgagcaggctgggagctgtcagccactcctgtgggaagagtccctgtgttcccagcaggtgggtactgtgagtgctcacacttggaatacaagtgcactcttggcatttggttgacaagaaagacaactggacaacagatgggtcaggctagaagacccactggcctttcatctcctaggaactgactgctcttaagtgacttggggtggtgtcagcagacctgtgtcctgggtttgctctttgaaccaaggttttcctgtgtactgcacgtcagccttgaacatactatagtagttttattttttgatttttaaaggaagaaaagatttctaaaaagaaatacccatgttattgaggcactgtcaaaatagctcagtcacagactcagcttaggatgaattggggaaagaaaatatagtagatatatacaatggcatattatttagctatagagaggaatgtaaatatgcattttggaaaaaaatgttgggattggagtccaccattgtaagtaaacataagtcagactcagaaacataaatatcacagttttatcgtgtatcaattctagactctctctctctctctctctctctctctctctctctctctgtgtgtgtgtgtgtgtgtgtgtgtgtgtgtgtgtgtgtgtggaaagtagaaatgagtttttccggcagagagactggaggagggagatgacggagaggaatcagaggatgaggacaggggatctggtgtaatcaaatgaaagcatctttgttgaactcatcaccatcgacaacgagtgtaagctgatgaaaagattgtgggccttttacagatatttaaggtaatgctgatcatctaagagcaaatatctaccaagcaaccctctggagtccagaggaaatgtctgagatgcctgaaaagcatcccagtatgcagcaggcctgtctctaattttgaaactctcaaaggatcaattctttctagtaaattttcatatctgtctttatgtaaccagcttccacaaacagaagtctctcaggtaatacattattgttgaccattgaaattgcctgaatttagactaatgacagtcagccatcatggggagtttgacacaaatacttaacattttcctgactttaccgttttgcctgaggaagattgtggaatgttgcagaaggaattcagaggactaagaaagcttagtgtttagcctttaagttcactatgggctttttgaagaccttaaaacacatgagtcaagtttttcccagtaagaaagaattttctaaatattttcaccatgaagctgtcaaggactatgttggagaattcatagagtatttttttttcattcacagtaaagagagggtaggcctccctgaagggcagctgagctgtgagagcgactcctgagagccaaggctgaagcctgtcccagagtctggggacaccgaagccctcactgctcccctgtactgaggggactcagtaaggagggattgtgatgctgctccatgttcttgctgctgcactgcctgctgaggctggccctggactgtctgcactggcaaagctccatgtaaatccaagatggagtgacagattggcatggcgcatgcgtggccgcaaggtgggaagagagagaacagtagtttgtgtgttaatcttaccggataaggataagaccactaccacaatttaaagccaaatttgaagcaagctctaattaaacactggccaggtggttgggctctggccctgtccatctctgggtttccagaaaatggacctaaatcaagttttatagtggctggacctccaatccagcctacatccaatcagaggtgaacacacatctgacctaattcctgcctgcgaacctcccacccacaagtgatcaaacacatccagtgcagactggtccaacaaatgtgtttaggggcgaggaaacatgtgacctcttatctctgtaaacagcctccagcatttcaggagctatctttccttgagcaaggggcttgtagaccagagtcatttttgttacatggattccttaggcatagtaattaaaacttaaaatgtaactttgtctctcacacactagactagtgtgatgccctttggaggggttccaggaataaagggatggggtctgtgtagagaaacaacttttgaatgtctcagtatttgggcaaaagctgagacctctaagaatcgatggcaatgaggggcacgatgaattcctgcagatgaaagagggcctacagtgcttgccccagcttttgtgtgtgtgtgtgtgtgtgtgtgtatgtgtgtgtgtgtgtgtgtgagagagagagagagagagagagagagagagagtgtgtgtgtgtgtgtgtgtgtgtgtgtgtgtgcatgtgtattgggtatgagcatgtgtgaacatgtgtggaggccagaggccaatgttgaggtcctcctctgtcactctccactttattttttgagataaggtctctcactgaacctggagctcactgattcatctaggctgctggccagtgagtccaggatcctcttgtctctgcctccgaaggcctgggattacaggcacctgacactgtgcctggctttttatgtgggggctgggcatctgaactaaggttttcatacttatgaggcaagcattttaccaactgagcctctggcattgttgggacccagcctcactgggtctctaagagttgttttcagcataaccacaggtaccgcctgttttcctgacctcacatcactagcatcaatatcctgttgtgaatccttcacctggggcttttgtaagtttgatataaagctgctccacgataaaggtgagagagacattctctcagaaaaccaaccaggagtcttgtcgttcatccaaatctccaggctttcgcccaatactcagacttagtggtggccaagagcagccacatggcttggcctacataactgcatctatttgtgtgtttgactgtgtatagtgtgaatggacatttgcccctactgtgtgtgtaaagacagaaacttggtgaggatgaactagggtgggttaatctcactttctcagttccaatcttgtacagagctgatctaagaaactcatcttcaaatgcatacattaattccaattgccctaattaggaactgtcctgagccattaatgaaccagcttccttccctgacttcaaagcaggaactttggaacttgtgctattctgagtctccttgtgtttagtgagagggaaacaagtaggttgattagcagactggattgctttcagagcagcgaggcactaggaaaacatctacagaggcatctcagccacggcttcacctcttgttccttaattagaccccatcattactctaatttccccctgtggtttatgatttgctgactccaaataatctagaggaaatctgctccgatgcagaacccagttggttttgctttagaattcattgaatatgtacttattgagaaagttcctctttccatttgggagtctttgttccattcttaatcttaactacaagccaaatagggagagtcggggagcaacatctttgccctttcagtaatcgaatcaataaggagagggagtgcgagtcatctgttaaacgtggtgttcagttctgcttgtaacaccgaaaacatggagtgtcaccaaacgtgggaactccacaagcaggaattgttaatccctgttttacagatgcagaaactaagacatggggtaagttacttgggcagaaaccatgttaagcaatggagatgtggttcaagtgttctgggttagctctctagatcctctgaacaacagtacaattacagttaacccttctgggttttgttttgtttgttttgtttttggagacaaggtttctctgtgtacccttggctgttctggaactttcttgttgtggtgtattattttaactgggcaaagatgtgttacatttgtttgtgctgcagaatattgtgtcaaggtgtgttacatttgtttatgctttatttgtttaatgatgtaaggatgtgtttaattgtgtaacaatgtgttgtatttgtttcaccatgcctgcctaaggcacctgattggtctaataaagagttgaacagccactagcgaggcagagaaaggatagacagggctggcagacagagagaataaataagaggagaaatctaggctcaggagaggaaagagaggagagagaagaaggaggagagggacacacctggggccagaagccagacagccagacagtagaagcagtcaaagtaagacatacataaggaaagaaaagtacaaagccccaaggccaaaggtagataaaaagaacaggttaatttcagttagaagagctagaaatgaggctaaggtaggtggagcattcatagtaagaggtctccacgtcttcatctgggagctggctgggggcctaaaagaaagcctactacgctgcctgactttgcctcccaagtgctggaattagaggtgtcaccatcgccaccgcccctcccccaccgcctgcctcagttagccctcctctgtcgagtcccgtgaaccatgctgttgtcgttgctgtcacttctctctgggtaccgttcatgctctgattctgcatgcattttagctggttcccgttggcagctgctgttgtgacccctggggtttgtgccactgactggatgtacacatctgtgatgtctagacacttgctcacacttagacaacgagatgggatgggagaactgtaggtagggtgacttccagcttccatgagggaagcttcgtgctgggacatgaagtgtcagcttctttatttttgatgatttttagagttagaaacagagcagcaggtttcattgtgactttgttcatgctgtaattcatggcgctttcacaatatgaattcagacacctcacttgctcttcaaggacttgcatagtttttaattaccttagagtaaagttcaagtttcttacggtgaacctttacggtccttgttggactctaccttaaggtaataccaatataggaagagagaccgacagaatagatgttctaatggaggaaggaggggcagggatgggggtttgtgtatgtatgtgtgtgtatgtatgtgtgtgtgtatgtatgtgtgtatgtatgtatatatatatatatatgtgtgtgtgtgtgtttgtgttatgtaatgtatgtgtgtatacatgtgtgtatatatatgtatgtatgtaatgtatacacacacacatatatatatcattgtggtttgttcttattcatccccccctgtggtgatattttgtttatgatctaacaaataaagcttgcctgaagatcagagtgcaaagccagccacactagttagccatagaggccaggcagtggtggccacacctttaattccagcacaagggagacagaggcagatggatctctgttagttcaaggccaccctgggctacatgaaattgatccagtctgagagagaaacagagccaattggtggtggctcacacctttaatcccagtacttagggttacatgcctttaatccccgcactaaggaggtagagacaggaagggatatggctgggcagagataggaatgtaaggcagggcagtcactccgaggacaggatcccccttggtctgagcactggtagaggtaagaactccagtggctggccactcagcttctctgatccgtcagctttcacccctgatagctgactcccagtttttattattaagaccaaagagaattcatgttacaccccccccattcttccactcttcaacgatgcaggaccatttccaaactcattcctcttaaaactgcagatgcagagccgggtgcctccctggtgctccccttagagcccttctctttggggctccccaggccccttccctgccaggatgctcttgctctgatagcacctatagtaccctggtgcctgattacttcccctaaatttgttccaaggttttctctccttgaggccatttctatagggtctgggggtgtacacaaacatatgcttgcttgctgtactggaagcctgttgggacccagcccccatggggtctctaagagttgttttccagcataaccacaggtacctcctgttttcctgacctcaccccactagcatcaatatcctgttatgaatccttcacctggggtttttgtaagtttgtatattaaggctgctgcacattctctcagaaaaccaaccaggcatcttgtcgttcatccaaatctccaggctttcgccggatactcagacttagctgtggtgcagtcagccacggaagcccatgtccttctcttgggaagttacttcaaacattgatggataaggtgctctatcttagaatcttatattctaatgactctggaaataaaatcccagggcttttatttcttctgttactatgctgactgtggcttctgactgtgggccattaatctaaatgatgtcctccaggatggatgaaaagacgatgacttgtttaaataatcccacagagcacatagacatgggacatctcagatacagaagtggcagagctgagcacttggcatttgtgggttaaacttacaggtttctattggagcatcttgtctagaagacgcagggagtctgtggctgaaagcgttgtatgtgtgtgggatatgatccccatgaaaataaatgtgccttggttacagcctagtaaatacaaaataaaaatgtatcagcaggacttggtgtggtagctgcggaaaatgccaggcattggctgaggctgaatgcagacttccagggctaccttagtacacacacagtgatctctaagtatcagtttgcttatatattggttgcttttatagctgtacttaaactgcaaatactgatcccattttcctgtgatttttcatggatggctttatttatttatttcttgacagtaaatgacatacacagaaagtgtgccatttggtcagctctgtgtgtgtgtgtgtgtgtgtgtgtgtgtgtgtgtgtgtgtttgtgtgtgtgtgtgtgtatgcttgcttgtttgttgagtgtgcctgtctgagtgtgcatggaagccagaaaggtccaggtattctgtcattatccactgtattgccttttgatgggtcctctcactgggtctcaagtaagagtggcagccagcaagccccaaccactcccaacattgagtttgtaggtgcagttagtcatacccagcttttacatgggtgccggggatttgaactcaggtcttcatgctggtgcagcagtttgctctaaccactaagccttcgctccagtccctgccctgtctttgtagagttagctgttctgatgcaaggagtggtttcccactgtggtttcaatttacgtttctgtacaatgggataggaaacatttttcagctcttgactggccatctgttttctttcacaaaggttctgtccaaaccatttgcttattttcattggatcactttttttaaaattgctgaatttgagaattctttgtatatttttggtctaggttctttatcattttaggattttttacaagccccctctcccagtctgtgagttctctttcactctcactgtctagttggtcttatgtatttatgggcatggctcatgggaaattttattttatttttttaaaattttctttttgaaaagtttttttttttttttggggggggagtaggagtgcactatgtgaccctggatgacctggaactcactctgtaaaacagactggcttcaaattcccagaggtgggcccacctctgcctcctgagctcggggattaaagacctgcatagctacactaccatcgctacgtttctaaacagtacatgtcagcactcagctagatagaaaagctgagttggtgccaaaataatagctcaataaacattttaaagagacagtttgcttgaactgctagtccacaatgggaaattggggtatatataatccacagagattatttttgaaattaaagattgcaaaataaaactaataattttagtaaatatattatattgtaattgtaaagcttatttttttttttaaatttctcagacaaaaccaattcagatctggaaaccctttgagcattctctctctctctgtctctctgtctctctgtctctgtctctctctctctctctctctctctctctctctctctctctccctctccatttgtttttgttttgtggtctcccactctagccatgagcctccacacacactcagctccgcttagctgtctcaatctgaattattgttatgtaagcctgtggtttgtcatatggtagaagagctacagtcactggggggttcctagaacgtctgattttgtgactcacaaatgcatggggaagagattctgggtgacagtcttaaactttttacaagactaacttcttatatatgcagtcacagaattaagacagatgaaatcaggctggtctgccgcctgtgtctaaactggaactgagacctgcttgtggcccttttgagcccgctgatgcagtaagttcagcactaaaactatgtccccagggctggggagctggctcagtgagtacagtgcccgagagcatgaagatcagagttcgtatcccagcacccatgtgcatgatgagtgagcacagccttccacctgtaaccccagctcaggggacaccctgagtactcacctgtctagaccagcagaattggagagctgtgcttcaagtgagagactctgcctcaacagggaaagtaacagagaaaggcactcggcacagcctgtggcccccacacatcatgagtgaacacacacacacacacacacacacacacacacacacacacacacacacgtgcataaagcaacacacatgagcatgcatgtacacaagcgtgcacaccacatatacatagaaaacaaaggcaataacaaaactcttcagtttctgatactgtcatcctaattacttgtccaggttaatagcagtcattcctctatacatagttggttttcatggtttggattctttcaaagtcactaacttcagcaccttgtcctgtgtagcggaaacagcaccctaaaattgttaagtactcaggaatggtttttcccttctcttgttctcaattctcctgctctgtttactccaccggttcactgctggatcgtcatggtggcctcctagtgggtgtcactgcctcctttcttcccttctataagggacccttgttcccttatagaaggatccttgtatataggacccttgttcatgctgcagatcatggaattttcacaacattaatccagatgcttcacttgctcttcaaggacttgcatagtttttatcaccttaagagtcaagtccaagtttctcactgtgaactttcaaggtcctccttggactctaccttaaggtaataccaacgtagggagacaggctggcagattagaccttggaatggaggaaggaggatcaggcatggggttaagtggaacgcaattaatgcggatctcaatggagtcacaactagtttgaaaaacagatggtttattaggaagtactcacgcgacagggccagtgctgtacagccaggcaagagagagaacagagagcctcatgtgtgcatccctcatctttaaagccttgccatgtcactctgaccacgcccaagtgtgcttggtcagcgtcacctgtgccagccctcaagtgggagtggtcagcatttccccctacaatgggggtttgcatgtgatttgctttatgaaatgcagtgccatgtatgacaaatataagtaatcttaaaaagtttttaaaatgttgggttgtggtaaggaccaaagagaagacatcaagaaaatgacatcagaaaaatggcactttgctttaatgaaccatcttactgttggtgttccctttagtcttttagtgagcccctgggaattactggataccagaatcccacttttaatggcttgttactcatcaagccctggatgtgggattggttgatgtgtggttccaagcactcagaatcctgatgggccactggggattttgattttgcctttatctacaaccatcaaagaagctcagctttgaatagttatgctaccccatggccacagtcaaggtcaccctgggagggactggaaagctgagagaagcccttagagacctcatctggtttatactcactaagagtccaagaaatccctggaagtgtaagtcagagaagctaggccctggagctaggtccccagattgtaagcactgtaagtaccttggactcttcatgtatcaaccagaaggcagagagtggagaatgctggttctggaagcctcgcctctagatatgtcacccacactcagggtggcctcctcttcactaatcttctctgaaacatcctcatggacacaccgggaaatgtgtctcctgggtagattccaaatatagtcaagttgacataaccatcggaccacccacccaattcttcatttctctgtctatactttctgttttgtacctgtgatatccaccgtcactgagagcgagagagggcacctgtatgcttggattagatttgcgaatgctagcaaagagtaagaaccctagctccagagtgaggcaagttaaggactgtgggtccttggttatggaataattgtgaaggtataggctgacatccagcttgagtggacaggtgtgaggatggaggggaaattagaaaaaaaaaacattaagaacaaattctgaactccttggttaaaatttgggggtgtccttcagtgtaaagccactgttaagtagtctgtgttccattacacaacctcccacacatgtttgtgcacaagcaaccctaattaaacttggggtaacaaaaacacaacacaaacaacagtgctggaaagaggaggaatccagaggaaacaaggtccaatgggagtgtgatgagagagggtcatggagaatgaaaatgagcaaaatacattaaatacacatacgacattgtcaaagaatattaaaagcgtaagaacagcgatacagggcagggctggtacagggaacagcaaaatggaagcgagtccagttcagtgtagctgggatttttcagcacagacccaggacattgggagatgtctcccacccgctggctggcatgtgccactcaggtctctagtaagcctggcccctgctgtgttctccctgagtctggtatgggatgaaaacctgaatgtcttctgagacattctgaagacctgtaaagatgatagtggagtagctgtctgggccagtttaattcatccgcccatcagactcacagctcttctgggtgagaggtacagcaataactgtatctgtcaaaggagctcagagagagagagccagatcacaggtaccaccaatgaccagacagcggagatggggtgaaagggatttggtttctccccatggctggagctccttcacagtgatcagttggctctttctgaatacggagtagggacccatctgcaagaggaggattccagagcaggtgggtcgtttccccaaaggcctgctgctctccacatgtgcttaggggaccttattcccaaacacattggtcaacaaaagtcctgcaagcgtgttgccagtagctatacagatccagggtcagaaactttcatgtcattgtgcagccttgggctcaaatgcctccaaaggggccttgcgaaattgtgctagtgccatggtcagtagttattaaaaacaattgtaaaaagccatgcttagcgaaggaggcatctgagccagttcagtcatccagctgttgtgccctgccatgctcacacagacatgtgcaatgttgtgtgtgttttcctgatagtgttcaccacttaggcattgaaacctctaaataccagattgttttagcaggcatgtgtgcacgtgtagctttagtaaaaatacccacttctgctgctgctattttcagtgagctgggtcctgtgggtcccacctagaggctgtgtgctctgtacttctctggtctcccccaagaccacctcactctcttatagcctgatttggaatgagagaacaggaagattaaaaggcagagctggcagaagctgatgaacttgtgtttcttttctttctccagtttcttcctggaggtgtgaacaaatcatgaaactgctgagaagcaaggcggtgtgaaggaggtaggccacacgacgggtcctgagagactcagaatctacaccgttagccgggaatccaagccggaggtgatgaacattcgttcacacagccgggcacatcacagcgagattcctattcttgaaacaacgaacagagtgtcccgacacctctagacattaggatgctcacagagcctcgtcaggagagacaaccaggatcaggactctcatgtcacctcccacgctactcccagcagtttggtcctgcaaaatgacacacagagctcatgctccaaggtgtgagctcaaggaggtaagtaggaagcacacctcctctccacgggaaagtagatgtgactgacaatttatatttaagtagttacactctgatacaattcctgggatactggcagtgttggtgaaagtagatccaattgacaatttaaactcaagtagttatacttggatacaattcctgggatactggcaatgttggtgaaagtagattggatgggcaatttaaactcaagtagttacaattcctgggatactggcaatattattttaggatgtgcagaaacttgaaaggtttgtgaggccttgggggaagaaagaggaagaaacaagacatttatagtttagctgactcccccagcatctcccacatgggtagggactcaacagtcactgaaaaacccaagcacggctttatgtgcaagcgtccagtaggtgtttgcatggacacaacaagtgaaaacaaaaaacctggcgagctgcttaagtgtgtgttcctcaggaacgaaaatagtaacatttccaagaaggtgaactgactcatgcctgtgtgaaatctggcactttagaggtcgaaccaggaaggtttctatgagttccagctcagcctactgaaaaggaacataaccgtacacaagatatgcttattgatggtatagtctaaatgagaacaacttacatgagaagccgataaccagattggcactccaagaagtccagtctcagacgcactccaagacctggcctgaaccccgaaagagagcaagagcctcttcctcagttcttttatcccatcccagacccagcacagaatctttggtggggttcacacttgaactgagtgttcccatggtctcctatggtgaagaactcgaggtctggagagctctctccctttagagtctgcttgtcttcactttcccctgtctaagaagctgttctgagtggcagggctcccgcccccgggggatcggtcctttgtctatcagaactctgtgttgtcttctcctatcacagcaaacatggtggaagagcattatggctagagttgaggactttctcactgctggaggggtgagaattggtttacaattgtggccctttcattcagtcttgtttttaagaccaggtaatactatagttgtgttttctcgctgatggctcaaaatagggagtgctgtgaaaaacactagaaaaaggcagtttcttttggaaatgcaagtcagtttataccaggcagtgagatggcagtgttatctaaaagcttttgactgagaaagtggagacactcactaaagagcttggtgtagttgcttttgtactttgtcaggcatttgagcccaacttgtccagtgtggcaatcacctttgtccagaaaattgatcacctgatagaaacctgtaaactaaatccagagtgccagtgtctaccattgggatggttatgagaaggtcatgtggggtgattttgtggaaacagactcaaaagctgacccctcggatgcagaatgtagctgtacaaggccacctgtcccttcaagactttgaaaggtatgtccctgcacagggtggctgttgctcaagaatttttaaaattacattttaagaattgcatttaaatgctaacagccccatcatttttctttttttttatttttaaaatagatttgtgctaatttttacaaattcattgttgatgagtgtttgtctgtatgtgtatctgtatactgtggacatgcctgggtacctgtaggggcctgaagagtatgtaagatcccctggaacacaggggagccacatctgattgcttggaaccaaactctggtcttctgcaagagcactaagtgctcttaagcactgagccatctctccagaccccattatatttcagatattttcaaagaatagacttaacaggagggatggctgacagttgtctagcagtaaacaggagaggccttgagtacagtgtaggctgagctgatttgcagccagcactgacatttgctagtagtgaggtcatgggaaattgatgatctgaagcactgggtcattcgttcgttcattcattcattcattcattcattcattcattcattccagcagccagtcatttgatcagtcgcagtagaaagactgcctgagagcttgaggtcaaagcatttgggcatcggggatgaattcagcatttccattttaaatctctgctctaggttaatgatcaccattaaaaaaaaaagccacattaataattatcaaaattcctcaagagaaattctgaaggtttttgaatatctgtaatcttagcaagtaaatatctgacttccacaagtcatccattttagaggctctggtgctgggcatggctaattcctttccttcccttccctcctcctctccctcccccctcccctcctccctcagcctcattccccctccttttctcctccctcctccctccttcctctctccctccgtttctatggagacatgaacaaatacctgctcatctcagacagggaaccaataacagccaaagtaatgaaaccatgaaagtacagttggttggccagtgagtgtgttggggtcacttacaggagcaggaatcacccaaaggtagctgctccagagtgcagggcacgggctgcagggcctccacaggtagaagctgtcttttccagatagctctgcccttcctgctnnnnnnnnnnnnnnnnnnnnnnnnnnnnnnnnnnnnnnnnnnncatttttactgcttatatacatttgatggtggtggtggtggggggtgttgaagaatctggtcagttttagagatttctggaagcctttgagctgtttacttccagaagccttatttatttattttatgagctcccctgctataggcagagtttctgtgtctccacggcccttcccaaatagtcattggaagacttattaaaatataaatgctcagccgataggtcagccttgttactagctaactcttacattctaaattaacccatatttcgtgtctatcctctgccaagaggtggaggtgacttcttgcaacataggcacgttcagcttggttctctctgcttctgcctgagactctccagactctgtctatcttcccagtacctgcaggatggagattattgccaaacaccttcatgtctgtctgtctgtctccctcctccctccctccctccatccatccctcacgtcctcacccattcccttctttcctgtcctctgactgagggtgatctgcaggcctaaccatgtatcagaattaccaggaagttctttgggaagtacacactttcctatcccctttcctgaatcaggaccaccagggaagggtcccaacccagacacaggcactaaagcgcctggtgccccgaagccgaagcagggatcggagtctgagctcatcgtcctgcagagaagtttgcctcttctcatgatgcttcctcatgaaaacaacagcttagcagctggctctgtgtgtcttctcaggccctacacagcccagctacctcctgccttagaatgggaaccttaaaactatgcaaatcatatatggagaaaactttgaaagaggtcagcaagtcagctgactgagaaggaacagtgaacaggaagcaggacttagaaaggggtgtggccctttgcctttgtggggtccagactgtgcttagcaggccttggtcaccaagctatgtccccagcaaggctaagtcagatccggccatgctgctttagtgcggaggttaaccttcactgtcacctccactagattcagaatgacagattgaggtacatccgtctgtccgtagatatggctgtgggggctttcccagagaggatgaaccaagcaagaaaaacccattctgaacacagtttgacacaaacccatgactcagggcctagaaagggggaaaggagagagctgggagnnnnnnnnnnnnnnnnnnnnnnttcctggggacacctccaccactcccaccaccacaatctgaaggagagagccctctaaggccttgagccaaaataagacttttgttccttgcgttgtttctgtattttattttttgtttgtttgctgtttttttttaaattttttttttaacttttttttggtaactgccattcaagacacacaaaagtgagtatgtctacacaacccttgaacttagatttgggcagaagtttagtaagcgagccaggctgctttgtagacacaaatacaccccagataccagtgtgctgattatgaaataggacctgaaatcccaaattgtaaatggtgtggggaggcagtggtacatacaagctctcccaaaggacactccagagggcgctgacttcagccacagttttttgttttgttttgttttgttttttgatgcttaaatactgtcaccagctgatggggaacgtactgtgtatgtttatcttattgattattgaataaaatactgtttggccaatgagacagcaagttaggactaggagtcaaagaggattctgggaaatgtagtagataagtggtgatccaggcaggaagtgacatagcaaggagactcatatttaagcgaaggagaaacaggaagggctcctttttcccctccactcctgctccagcggcacgatgtgatccaccagcactgagggacgccaataaggcatcagataagtcttataaaatatatagatttatgatagttaagactgagctaacagatgaagaatcgtagtcattggccagcagctttgaacctaatacaagtttctgtgtattcatttgggcctaactcgggcgggcggctggcgtaaagctcacacgtggcggtggggctcaggcggcatttggcggaaagatttatcgtaacaaccagcctcctcccacaccattttttttttctctattagtctgtctcttatttcccattgacctgattcccacctgccacattgactggcattaagttatgggagagaacaccagtcatgggcagctggctcccaaaggaacagacgccccctccactgtagcatctcttcttatctaaagaggccatcttatacctcctgctccagcacacccttcacacacacaccccttgatcccagggtagtgggcagggtacccatgattttgtggttcgtcaagctgaggccccggttcttaggacataggtgctctatagatgatgccaagatggggtgcgttgtttcttgacacaaagagagagaggcaaaaaacagtgaccgcctctaacacacggtggataatactttagggtgaaatgtttgagacataagaattttctcctactgaattgggcaacatctagttcaatgttaccatgttagttctttttcattgttctgacctggcaaaagcaacttaagggaaaaagagtttggtttgtcttgtttgagggtgcagcctaccatagtggaaaagttatggaggcaggagtgggggacagctggtcacactgtgtccggtaaggaagcagagggaatgtggtactcagcccctccccatgtcttctttttattctatctgagcccccaatccacagagttcaggattccacattcagagtggattctttcttcctgctcagttaaagccctcacaggcatacctgaagctgtgtatcctaggagattctaaatttagtcaggttgacaatgaagattaactatcaaagttagattatcaaaccatttcttttgttgtgtgattttgaggtggggtttcatatagccctgactggccaggaacttgctatgtagctggggctggccttgaactccttattctcatgcctccgtcttccaagttctggaagtacaagagtatgccaccatgacaaaaaaatgtttttgcagtgctagtaatcaataacttccacaatataacttgaaataaactatgcaaatcatatatggagaaaactttccattttaatgccaacgtcacaaagcacactgaagaatcttataaataaaaaggcagagggtgggggggacagcatcaagatgacagctagtaattactgatcacttacagtcgatcagttattgataccaggatgtgtcagcatttaaacctgcagccaaccttctgaggcaagcgttgtcactccacagtctcacagcgaggaaagcaaactgaggtgcaggtaggtgctccactcacaggcatggtaggtggggactgcggaggaggttggcaggtcacagaactgggggacagaaagagccagccctgccatggttagttgtagatccacagttagcaggaagagtgatagcggatagattggagttaagtgcaggcagcacacatgttaaagatgaccacagagccagtctttaaggtctttttatgttatgttactgtgtagaaaacctgattatcattcatccaaaatgtgctggtgaaatggttcctacagacaacaacagacagctaagatatgcagttcaaagatttccaagaaatgtttatattggaaatattagaatccagatttatatagaaaaaccaagtggttgttttgttttgtttgtttgtttgtttgtttgtttgtttgtttctgctgggctgtccttgtcagtgggaatcatattctattcttagtaccagcttttttgtctgttccttctggaaatcctcatggatctgtgtccctggtgagtgtggcagtgaccgggccatcgtgagtgggaacttggggagtgtaccgaggcccattgagtgagtgggtctctgccaaccgtagttagtctggaactctgagggggtagcgggaagttagacttggcagcgtcgaccaacctaggaataggcagcaccgtttatttattaacaccatttatttatttatttatttatttatttatttatttatttattaacaccatttatttatttattaacaccatttatttatttatttatttattaacaccatttatttatttatttatttatttaacaccatttatttattatttattatttattttgaataaagcttccgaatgctacaatgacctaacaaaaggaagcctaaactcccactcccaaacgggactatttctttcttagtggcttcacactagtctgtgtgaaggtatgaaaaaaagggactatctgggatcacccatctgttctgtgccttctggtggggaccagatctgtagctacctgtcatagcacatcactctcgctaacggtggctcttaactgttgctgggtgcaactgtgcatctctgtcaagagtcgtcagcaccctcagacacttagccacaaggtgaagacctacttcacttattattagtattgttattgttattattatcattattatttgtgtgtgcgcgcacgcgtgtgcatgatgtgtgggccacgtgtgaactcagatcatctcacccaacatgaataaaaggtgcctcagtgagaaaaaaaagttttatttttctttcctgttttcttctttttctgttccattttatttttttcctctgatcctctgctcacccgggctgcagaccaggcaagcccagccgcggcccaggcgcagccaccaccgttgggaacatggggcgcaagccgggccctggggcgcaagagcgagtggacgaggaggcgcggacctgctgtggctggcgttcccgctgctgctggcgctgctgcagctggctctgggcatagcggtgaccgtgctgggcttcctcatggcgagcatcagcccctccctgctagtcagagacactccgttctgggctggcatcattgtaagcatcaagtctgttctgcctaagcgccagcgggcatgccaagccgcgtggcggagtggagactaacccagctgcatgcgccccccaccccaccccagctgcacccctaactgcttggagactgactgtgggcacacttgggctccctccccagcgaggctggactcaggattcaggcattctcctgcctgaggcttctagctcctcccagggccctggcttgcaatctgctggagctggagaggcctgtggtcaccctgcacagtctcaaagacaagggcaggcccagccagcctcagtccggtccttgtccattccccaggcctcacgcctgtctgcctaagtagcacaaagtgaggttcaccaagggaatggcagggtaggaaaacctgagcctggagtagacacactagtttttgttaagctacagtgcctcctcgtaggcttccagaaacagctttctcaggcagggccccagaaggcaaagcacagccccaatccacacagtgtagggcggttgaagcttttctagctgctgcagaaatgtgtttgggactgtactgatgttcagggctttgagatggcctgtgaattcttcaaggtaaagtaggtgcggcttgctgaatacctacgatgtgcctgccctggtggggatcttcagtcctcaagttagagaagccaggctggacccacccgaggtcatgagctcagacagcattcagacagccaggccgcatccctgtagtcagattggggcttgctattttaataccatgttatctaaagccagtgctaaactctcagacacgtttttcagttgatccatgaaagagtgaggatcattacccctgtttggacacaaggaagcccacgaagataatgtaaaagacaccctcaagcccagaaggtaaaagcggcccagtcaagggagacggtgtcattactgttgatgaccacacaaggaaacctccaacataattttgtacggtacagaacttagagacacctgatacatatgcatgggtgcagatatttttaatttaagattattcgaactcacaaatctttaaagcgtaatttaaaaacatttaatttatgtcccgagaattcccttgaaattatcatgattggagttttctcagccaaatggttttaaaaataacttctcacttagacatactggatattttagtcaccttgatggctgtcaacatactctgggcggggagggggggatatctgtccttgaaggttaggcaaaaggaagagtaagggatgaaactggttttgagaactagcttttatatcaacttcaaggagaccagttccaaagcaatgaattagatagggggacaaaaccatgttttaatgtttaaggcatgacacagaaatcctgaaacttggagaaccaaaaggtgcatcaacgtttgctgttcctaatggcttcctggtcgtggcatggagaaccttacacacaccaacggactctctctttctcttgtttcttctttacagcctaggactcatagaaaatgcggccctgcttgaattctctctgaacagaggatctgggtagagttgagcagctagcacagatgtccccagcctactgagggagcatttaggatgcccgtggggggcatgtctcatctcagcaggatgagggctgtgggcagtgtgtcactgtctctcagacatagggaccctgtgcttgcctgaccacactgtctggttggtctcagggcattcttccagtctgtcaggaagggcgaggcaagaggcagacgatggagggcaggtgtgtaaacacctggtgttgggtccctgctcaaacattatttgctgaataactgtgggcaagttagtaaatgtctctaggtttcaattttggggtttgggggatggtgtgtgtgtgtgtgtattcatgtatgcaaacatatgtgtcagggagggcaggcacatacacctgtggaggtcagagggcaacactgtggtgccttcctcagtcactcaccacccctgtttttgagacactgaccccaaaactcaccaactgggctagagtggctagccaaggagccccctgggtctccctatctctgtggtgaggtcacagacacttgtagccacacctgtctttttacctgggctctgaactcaggtccatacgattgagcatcaggcactttaccctgagtcctctccccagccctggtttccagttctttattgacactacagtaagtcccagccctcgggccaccctgaggaatgaacatgtcaatacatgtgaagcccctgacacactgccaacccatagctgacagtcactgatggtggcactcttcaagagccatctccagggtggcagcagagtcctgaatcgctgtgtttcacaagtcagttagagccccaaaggaggtatccgtttgaccatctcatctttcccagccaagtcactgtttagcaatctcagcaatcagtatgatgttagcccaggacggcctgagaacctctgtagattgataaaaatgaatgtggaaggggcctctcccagggcccattttaggatgccgagtgattcgagtctggtatgtcccaggggatcctgagacattaccctgagcagaagaaggttcagtaccaaacccaaggctgaacagagccacacccacttccggaatgcaggctgaggctcccgctccgctcagtccgaagctgtgtgtgtgcatcattcttttatttactcaggctgcctcttggtgtaaggattggcttcggttttcagaccctgctgtcctattaacttgaggtttgggtgttggcatttccctggtacaactcggatatctgggtgaacccacacaggtggcttctccttgaccagagcctgtgtgtgacttgctcagcgacctcctcttacatagaaactaaagagaccctgggtgatttatgcacagagatttcagtccagtggcatggtgggagagcagcatggctattgtctgtccctccttcctctcctccattgtgagtctccatatctgtgactccactgtgcatttcagttacctacgctttctgtacgggaaagggagacagtgaatggagctttggtggagactgtgactccggctcggcgtcctttggagatggcagaggttgttagtgacaagatgaaaggtgatatctctgagaaaaaaaatggggctgctggcaaagcacccaggagagagacgttcgtcctcagtgccctcttttcctgtttgttgtttgaaccagattgccaatctagattttaatttcatgttcagttttcaagacagggcctaatgtaggaacttgacatagccaactctatgtagaagtctacgtagctggccttgaactccagattttactgcctctgcgtcccacatgtctaggtcatttcagatcttatgcccgtgaaggaaccgagactttgggaattcagtgagtgcatttctaattgagatgtcttgcctgtttaaactcaggcttatttttctctgtttagtaacatttgttaggggtgtctgcacgagtctaaaatcgtgttcctgcagctgggcaaggtctccaactgctgatggagtgagcccttatcacacctgagagtaatgaatagtgctcattaaaaaataacctacacccgggcggtggtgtcgcacgcctttaatcccagcacttgggaggcataggcaggcggatctctctgagtttgaggccagactgttctccagagagagtgccaggataggctccaaagctacacagagaaaccctgtctcaaaaaacaaacaaaaagtaacctacagcagtgtttctgaagcccttttacctctcagagagtccccagtggtgattcatttcctttggcatcaacgccccaaagtcaattccagcacttgctcttgcttctcacctcccctaaggactttgtgatgttcgtatatctaggacccagcaggtatctatattcaccaagtagatgaggctgatgagaacttactgtcctctccctgcctctgccttccgagtgctggaattgcaggtgggtgcagctatgccctgcctcctggtatgttctttagcttctctgcttgcctctcccgccatcatccctatgtcccatccgctggaatccaaactctgagatttgtgtcgtattaaccccattggagagtttaaggcaagggcttaagaggaaggcaattgtgtttcctgtattcagcatcagtcatgaaacccatcgtgtgactgtgtaatgattaaaagtcctatccggtattaataatgccggcatggcagtaacaataactgcatggcagtaatcccaacactcaggtggctgaggcaggaggattgcaagttccgggccaatctagacaacaccctgacaccctgtctcaaaacgtacgcacacacgcaaataatttcaacatttctttctaatttcaatttcaagttttctgagggattagaaatgcagatgtgttccgatgttccaaatctggttcagatttgacacaacggaagggaaaggtgactagctgttttaagggagaatttactgtgaaattggcaggtagatctagaacacgtagcaagtcaggctgaggtgtagttattacttaggattcacaactacaggaagctagacacatgatgtaactaaggaactctgccatcgtcgtgaaggccagaagagcacaaggtttggcactggttttcataaacctttcatcgagtcaggaagctaaaggtgctgccagtttcctcataggaattttgagatttgaaaaattaaatctggaagaatacttttagaaacacactgtgtaataatttattatttttcacattgggactttaatgtgtgtttccaaacccaacacagcacctcaggtaccactgggtgatagtttttattatgtgactgtcacagggttgttagaacgaaggaataataagtacagggctgattcggccgtggagcataaataacagataagtagtaagaaaataacttgatacctatgtgaaattctcacatcaaatataaaaattttaatgagtatatgaaaatcgcatggagtacttgaggatttcatgggagaagagaaggtgaggacacaacaaaatcttaagatgcccagaatggtgtggggaaagttctccctctgcatctagcttcactctagcccagagttcggggctaggcagtggagagtgctaaggacctaaagatgcttccttcaatattgagatggagccgatgctgacatatttttaaaacccttcacttgtggatataacccactcagaaatttacccagaagttagtgtctggaaacgcctctgagatgtccgtgtgaatcatctgagcttttggtgttttgtaagattaattctagtgcatagactttgggggaaactgtaggaaagggaagtcatgtgttatttaaccctccgaagcttagggctgctgtgtcccctaagatgtaatacatcacactgaagctgtgcctctctaacttgctgttatccagagtttctgtctggacttattcatgcccattttaaagtaatagaactttaagaggactctaaatgacaatagtgtgctgtcattgctgcattgtggctcagagctccaggagtattcagaaccctaattcatgatttccaagatgttttaaaagtggcttgaggctggagagaagacacagcttgctaatcttcagaggacaagagtttggtttgcagcactccagatccattggatccgatgacctcttctggcctcctcagggacctgtatatacatttgcatacatacacacacatataaaataataaaataaaccttagaaaagaaccaagtagtaataacaaccacaaaagagatgaattcacttgacttaattttaatttccccagctagaataaatgacttttgggggctgatacgatggagttgactccctgtgagggaagcaatagggtaaatctgtaattttcggtctagcctttcagatttatgctatgctgtccacttctcccttgctctgagaaaatgtctgggtactctcaccctcccccaccactacggcgccatccttgccatttctgttaagattgctgtctaattggccctgctctttggtgctgtgccccgggatagcacatcagcattaaaaggatgtatgcaggccatgccaaagatgccagcctgcaaatcttgatgtaatgtcaggacaagaatgagaattagccactggacttgagctaggtaccatttcattgaaaaatgcagttcattctgggagctgagcacatgtcaatctgaaatgctaaccataaaaaccagaaggcatacggagcccaatggcatcttgggatgtcataggctttttattttattgtattgccccagttttcatggtgtgtgtgtgtgtgtgtgtgtgtgtgtgtgtgtgtgtgtgtgagagagagagagagagagagagagagagatcatgccatacatgtgtgttagggtcagaggacaatttgggagaattagttctttcctcccaccatgtgggtcccaggaaccaaactcaagagcttttaccttttgacccatcttgctggccatgcttttttgtttgtgagacaaggtttcatatgtcccaggctggccttgaacttctgatcctcctgcttctaccttcccaattccagagtttaaatcccatgtgactacacctgaagagagtgacagtattgttcagtgactcataagcacatttcttgtctaattgctaaaggcctcagagtttcctagaacagccagtaaaaattctcagttggtgaaagcaagtacacagtgtgaatatgtggttgttcacactcatgtctgagggactcatttggaagaggtttctttttaaaaatctgattacatcatttaccctaatacctttccttcctgtaattcctcccatgacttcccttacatgctgtgaagagacaccatgactacaccaactcttacaaggaaagcatttaattgcactggctcacttagtttcagaggctcagtccattgtcatcatggcagcgagcatgagagatgtggtgctggaactgagagtgctacatctcgactcagagacaacaggaagtcgaccgactcacactgagagaaacttgagcaagagaactcaaagcccgcccccatagtgacacacttcctccaacaaggccacacctcctaatagtgccattgcctttgtgtgtggggggggggcattttctttcaaaccaccacagtgtgcatataaatatgcaaatacagcatgcctatcagtattcttgtctttgttcaaatcttgttcaggaagccatgttgttgaagtgtcatgggagatgcttcctgctcacttctaggagatgctatatattgcaacagatttcctggtcctctgcctcttagagttcttccccaatgttccccgagccttgggtgcagggattgtgttgtagatatatcccctgggtcttagcaccccaggatcagttgttctctgcattttaatgggttgtgattttctgcaatggtctgtacgttgcacagaggagctcttgtgagagatagtatatgtacttagaatgactaagtttgcggttatgctgatctggtaacatggtggtcataggtttagagataggttgctttctctgcagttactgattttgtcaagtttctattaaattaaaagtcaagcttacccagttaaagtggttgttaagagtaatgaagaatttcactggctgcattaactcttacaagcctatgcgtgggactgggggcttcagtcaattcctgcctcccttctgtgctctagggagtgccttgatgttaaaatgccgctaacagacagacatcttggcttctgaggtcagtatgcttagttgagcggtgttgtgggaagatgctcacagtgtgaggaaatcccatgagggagatggttcatatttgttgtaatggatgctgttaactgtcaacttgtcaggatctggggtcacctgggagatgggcctctatgtatgcccgaggtgtggggttgtcttgcttgccttaattaagtgagaagagtgtcccactgtggtcgacaccattccctaggcaggaatcctgagctgtgtgacatgaagaaagccacccgagtccatactggctttcatctctctgcttcttggccacagatgccatttgccagccctctcaagctcctgttgcggtgacttctcaactatcggccaaagtaaaccctctctcttaagttgctgtggttggggtatttttatcgcagcaaaggaaaataaactaagatccttggtgttctggaactcaagagaagccagccctaagcttgtctttatgctctgcagccactgtttgctgtttttggtgttagtaattaaagttccactcatattttgatttacagaatttatcacaaatctccaagtgtgtctccatcctggatctccgaatgtcacagccgtacctcctgggtcgtggcccacttagatatggattcaaggacaccttgtaggattctgtttgtcagtcacggatatctctaccaggctttgcttttccttttccaagctgcacaagtttgagccatcccaagagaaagctgggaaggcagcttgcagccattcggggcagtcagtcctagctttgttcccaaaccagttgccaacaggaagcacaaccactgttaaagttcaagtgccttcctatgcctcctctgagatgtgtgtatatgtgcgcacacacacacacatacacacacacacacacacacacacacacacacacacacacacacacgtgtgtacacttgtgcacagccagaggctgacagagtatcttaggcaatccttctcctgattttatgacacagggtctctcactgaatctggagctcaccaataggccagagagcagnnnnnnnnnnnnnnnnnnnnnnnnnnnnntttccctaacttcccagttctgggattaggggtgcacaagtggtcttgctgggctttgtcatgtgtgttctcatgctggcatggcaagcacctaacttactcgacaccttcccagccccctcttttgatttctgatcataatgctgatgtttgctcatctaatgccttcaaagccacagccccttcctcaggaccactgacatgctcccacactgccttttccggagggtggaaaaaggccagtagatgaccggttatcaggaataaagggtctgctggggtcctgataagaaggactccagtgtctgtcagggtagaaatgagcagctacctcctgtctgggactgcgctccccttgagagaggctgtgagagccctgtatggaaccctctcagtgatatctcactccagtgttgttttgaaagtgcttaattcagcagtcattgtcacaccaccattacaaagctctttatgataagctattatcaaggcctcttctcctgagtggaggataatcacaggagacaagaaaaaaaaaaaaaaaaaaaccggggaatagctgatgtgttggccactttgggggccatgttaccatgacagctgtggagaatgtcaccctggcttttctacagctgcagaagggggaccctgatcagacccctaggcccaggctgtaccttatctcctgctcagctgtgtagtgaaagctgaggcccctgtggtcctagtggaatctggagagagaaaggcaaaggcaggggtgccccattcttaggggaagaaagagagtgatggtaccttgggaagggcaccccaggccatgagaaggacaaataaaggtgtcatggcaaacaaaagggaaactactctgtacgaaaggctgagttccgatttttcctcaggagcccccttctcaggagagccaggtccagtcctcaatcacgctgcctcttctccagagagggaccaaacgctcctgaaaaggccatttatccagtgtttatggaagggttttgaactctgttcagggttctgagaccaactacgattttaaaaatgaacctggggtgaccaaagcgattgtgtcctggaaccctcaatacataattctcactcagccatcaaatccagtgcgtcacagatttttccatgtcgagacctccctgaagtcttactccacttctccctgtcctcactcacacctcacaaaaagccctgtgtctggctggccaggttgtggggaggcacacaggacagactgtggtctgctcggggacattgacctcctcgtgttgaaaaggacagaaagattctcagacgtaaggttttactagcatcagttgcttaattctcccttacagccagcttatatttttcgaaaacgttgtcagttcgagtggccactttataatgttttaaggatcatacgagatgggtcacagtgatttgctctgcatgtcatgtgttgtactgttgagtcattttctgtcaagcgtgctgttctcatgtgtgagcccagggatgtcagaccttgtctgcagtcatgtctttctttcattcttccccctccttttatccttcccccatccctctccctcttcctcatgcccctcctcctcctcctcttcctcccttgtcctcattcttcttagatagggtctcattggcctggagctcaccaaattccaggctggcctaccaacaagccccagggacccacccatctccacaccctcttgctgagattgcaagcaccacatctggctcttttcttgtgggtttggggtgacttgaactcaggacctcatacgtacaggttagagactttactgactgtcactccagccttcttgttgggagttcttacggctttggctttaatttttagagtgtgtacataaacacaggtactgacctttgttgataaattaattctttatgtatttactgttttggtttgcctttcagaaagtgttgtgtaataactcagagtggcctatttgagtgtatcctcgaggtagtttggttttacccagcattctaatggttccataaacttattaaccatttctcttactccatttgttatgacgattcagacagactcagaacagataaaacttcgtaatgagcttctatgttccctcacccatctttggtgattatcaacttacactttctctcgtttgttctgtatattctcataattcactatatacccttatagttattttgaagtaaaccccagtcttgatgtcattttatccataaatattttgccatttaagccaaatggtaaagttcaaaacatgatcaaattctaatatcacacataaattaatttcttactaggaaaaaaaatcagtgttcaaatgaacatccataattaatttgtgaatatttcttcacagtttgttaaaaatcaagatctagtcacaattagttaatatgatttttttttttatatttcctttactaaaagatttgccttttacttccagtaaccaagtgttagtcaagctcattttcatgtccatcttaacaggttccagaatcatgcaggtagtttaaaagacctcaccccaacccatgccatactggccaacacagttctggaaacatctaggactggtggttgactattttctagacttctcaaggtgtggccatgtgaatggtgcagacttggttccttggttccatcttgatgcctacagagatatccagacttgccataggtctcttcttcctcagaaatggtcacatacccctgcactctgcaccacctctcctttgcccttgtcaactccttttattttcttgctagttaatgtaaaggatatttgctgcatttaatccagtcttttaatgtgttttataaggagttttcatgtcatttagtcctttatattatatgaaataaaacttcttgatgcttcaaaaatcttttttggatcaactcataatgctcttaactttccagagtcacgattttctataaaggaatataatactttttctttttgtttactacatctttgtaagtaaatgtgtacaatgccaggtggcttttctttctttttgagaaggggacatacttggatatagcttaaagaataaatgactatggctcagttttagacaaaggagtggtgttgggtagcccaggcagatcaggaacaaaaagggcattttcagtcaaaggtccagttgccgtcctgttggtatctatcctagtgttcatccatcacttacttagttgcttcaagattctgttgtctgtatttattccatcttttgaggacatgtgatcatgaaatttctcagcagttcctgaaagtgtgaaccttcatccaaattcccagatctgtgtcatagtgtaaagagacaacatagtgtaaagaatacgctgggatggacgtgggttcccaagagttgccgaaatgccagtctgagagcccagtgacttacggtgatgactcactgcaaatggttttcaaaggaggcttttgaacgcgttggggctcccgagtgctggcatagctcccatgcatcccccaggttttgcagcagatatcttgctttgggagaagaatcaaggaaaattcacagaagccatagggtttagggaggcagggaaagtcaggagttcgaggccagtctcactgcatagtgagctccctgccagcccgtgtttcacgaaaccttgtcatctttacaatctaaatagtaaagatttcccacaactcccctggaagatgtagaaatataaagcctaggctgcaggccaaaactcagaccaaatcttcatgggcaggcaaagagatttctctgctagacctttctgttgacagcttccgctccagcaaaaaaagtttaaaaatgagaagtagagtgggtgacaaggcactgaccaccctcctgtcatgagatgccccttggcagcagttcctgggtgtataattctttgactatatagttttgtgtagagtagcaaagaagccagtattctgagtctgatttatgaaaccaagggttttttgtttgtttgtttgttttgttttgtttttaaagattatagttaaaaccccaagtttgatgcctgcccctggtgctccccatctcttcctgtttggttcagccctgactcctcagcctggtttttagtctttctatttgtcccctgtcacttctggtgtctgctaatgtcttgctcactaattttgcctggaagtactgtgtttttaaacaataattggatctgctctggcctgaaactgttttttcaatcaacatttttttttttttttggagacagggtttctctgtggctttggagctaatcctggaactccctctgtaaaccacaagctggccttgaactcacagagatccgcctgcctctgcctcccaagtgctgggattaaaggcgtgcaacaccaaagcctggctcaatcaacattttttcaccatttataaatgttcacctcaataaaattattgtaggatagagtgatgagaaacacacagagcacactgtggtttcaaagagtggcatctcctgggcatttggtaataaattgacctacagcagaaacagaacgaagcagagaaagaagttttctatcagccaggtatttgctaactgttcatgccagcattaccagagagctgcctgacaagtggccctcgaaggagtaggccaggccaccacatgaatggattcatttacccacttggtggtatttatcagctgccttgtgtgctgggtgttacgttaagccttctctatatgcctctgcgttaactccttcagcagtataggaatcagacatcgctgaggtcctagacattctgtaactgacagatccagtgctaagtttccatcttaagccttgtggcccatcttaatgtaaaactgtgtggactgttgacttcattttctgttcctttggtccatgcctgtcatatatgcagctgtgagggttgggaaaatgtgcagtgggtctgtgttgatgaagaaagggaactagaaagactcacataagaagcaactgctaattcactggtgtgtacatgtgcgcgtgcatgcgtgtgtatgcacacacgtgtatatgcatgtgtgctcttgaatgtgcatgtgcaaactttcatgttggaattgttgacaatttccaattcttttgttgttgttgttgttgttatttttttttgggggggttctctgtgtagctttggagcctatcctggtaccagctctggagaccaggctggcctcgaattcacagagatctgcctgcctctgcctcctgagtgctgggattaaaggggtgtgccaccaacgcccttgttgttacattttaattttaatttttaatttaaattagaaacaagattgttttacgtgtcaatccccaatccctctccctccccttctcccctgccccccagtaacaccctacctttctaataccagttctgctccccagggagagtgacaccttccatgggggggtcagtcttcagagtctatcatatcctttgggatagggcctaggccctccctggtgtgtctaggctgaggcagtatccctcaaggtgaaatgggatcccaaagtccattcctatgctagggtaagtactgatctactgcaagaggccccatagatttccgaggcctcctcactgacacccacattcatggggtctggatcaattccatgctggtttcccagtgatcagtccgggggccaagagctccctcttgttcaggtcagctatttgtggatttcaccagcgtggtctggacctctttgctcatcactcctccttctctgcaaccggattccagttcagttcagtgtttagctgtgggtgtctgcttctacttccatcagctgctggatgaaggctctaggatggtatatgttagtcatcaatctcattagcaacctagatgcccctcaactgaagaatgaatatagaaaatgtagtacatttacacaatggagtactactcagcagaaaaaaacaatggaatattgaaattcgcaggcaaatggatagaactagaagaaaccattctgagtgaggtaacccagtcacaaaaagacaaacatggtatgtactcactcatatatggattttagacatagagcaaaggattacccacctataatccacaccaccagagaagctaggcatgtacctgcagacagttgtggttccttgggctgcttggtggaccatctaagcaacagtggagcggctaccttaaatgccctcccctgacaatttccaattcttgttttacaggtaaaacaattactattactatcactttgccctgctagggaagaacgttgagggttgtctgtagctcccagccaccgctgtgttacagcacccttacttatttgtgctgaaggacccctctctattcacggccacctaggcaggagtttgggtttcgactcctcactgtggggtctgcaagcctccacgagtccctggtacatggcaagagtacaatgaaaatttgctaaaagaacagatgagattacgtctaagatatgacagggctttcatttacatatattattcattttcagctaagatttcagcgtaagttactggcaaagattgagctcatgtgacacgggaaataaaataatacctgctgctgttccaggcatattacttaaaagtctttgaaatgatttctaaattagtcagtattactctctccactgagtactagataagtgagccttcctggctgagtcaaagccggagtgcttcacccatgactcagccattcaggggaggagcaggagctggcaggcttcactgatctctgccacttgctgccaggattcctccagggagacactgtgccctataacagtgaggagacaggcaatgtgctctgacaagcatgctgttaactctgtgacattatgttctgcgacattgatcatcaggcccttcttaataagttttccattccttgtctataaaacaaaactagtaacagggacttcctgggacacttgcgaatgtgaaatagaagccaggtgtggtacacatttgtaaactcacggtttaagaagcagagtcaggagggtcaggagtttaaggtcatgttcagctgcagagtgtctacagcatttgtatccaacagtctcagttgtgaggctgcctaagttgacagtacacttcacagactttaaacttgatctctgacagccgcaataactatggcgttagtaatcactagctaatgatataccagcaatcaatggtgtcctctggctgtgtggacggattatcccagctactttctttacatttctattagtcatcagattaactattacagtgaagtgttattgcttcttttttgcagatgtcagaacagagaatccgttaaagccaggcatggcggtgcatgcctgcaaccccagtacccaggagggttcagggctagttccagctgcacagtgtcttcctagccagcctggatttcatgagattctgtcataaaacccaggggtcagagggagagagacttacgtcttagatacttcacaagtaaaaaaatggaattaaaattcaagctctaaaacccacagtttcctgccacacagctctaatcacatgtacagtttcatacttgattttcaacttaaccaagcaattagttttcgattgttaaaggaactgtgacttagtgttttgtgtttttgactgctatgtgagtgtgatataattgggaaggacacatttcagtgtcttattattttgcttttgcctaaatctttaatgaaaagtgataacatggtaacaaatagggagggtgttgttcacaattccattgctcttaaattctatttgttcaacccccaaagttttatagcaaagggagatagagctctttcaatggctataaccttatgaaatggataaaggaactggtcacaattggaaggaagcccagtattggctgctcatttcacagggaaatgtgactcatccctttgttcagcgttcccatgttgtatgtacaacctacctattgcccatgtagcagatatgcagaccagcaaatcaactgtggttctagtacagtgcttatattcaaataattctattttgttgtctaatggtcttggcataccagagtattgatgctgagagctttattagggtgcatcgttataagtgttgcattttgtaattagcctgatgccatgcttcgttatgtatattatgatacatttgccatagatagacagacagacagatagatagaacctgttgtctcaagcatctgatggggtccttagaatacgtttctcatagataaaggtggactagagtgtgtagtggggtttctcctttctcctgtgcccctctgaactgagtcttggtgcatattgcagggattctaagcagttagtaaagcttaattttccaaacttagagtaaagcaacctcatcgggtgagcaggtgctcccatcacagcggaggccgaagatgtggtggcctggagtgtaggaggaagtctggccgtcttgctcagcatcctcacctcagcactttgaaatctgccatggccgaatttactccatggaaatgacagcatgtggcaaacagctctgaccattgttgaagtttaccgtcacacccctgaagaggtggtccagtttggaaaagaccattttgcttcggtttgctgtgggtgacacccattcagtatatgggtatgtcatgtgacacacgatgaatgtggaggcctcgagccctgagtgaggtcgtgtttaagtagcaatgacgacagagaggtattgtccccgattttaagacttcttacttcatgaagcactaacttgtctcatggcaccaacacttttattgtgtatacattatgaatatgaaaaatccatcttgcaatgatcgtacacctaaccttttacactttgaggtcttggaggaataggggaagcaatgcgtgtggagcattctgctgctatggaatattactttatgtaacgctgcgctgcatttgcttaatgctgtatttgtttaatgacgtaaagatgtgttgctttgcctgcctaaaacacctgattggtctactaaaaagctaaatggccaatagctgggcagagtgggtggggctggcaggcagagagaataagtaggaggagaaatctagactggccaggggcaaaggagaaaaggaggtagatgtgaggggccagccagccagccagacacagaataggacacacacaatgaaagaaaggtaaaatgtcctgaggcaaaatgtagataaagagaaacaggttaatttaagttataagagtcagtgggacaagcatagtgggacaagcgtaagataaggctgagcattcataactaataagtctccgtgtcgtaatttgggggatggtggtccaagaaaggctgcgacattcttcacagggctgaacacagtgtaatgcatacttttttcactgttcataagaaataactctatgtagtgccctgccattttgataaactccacacaggtgctcaggggacgtgttcacacctaggcctgcatttcccggggtgtggctccaggaccagcagcagcagtattggaatttgttaaggatacagatcccggggctcaaccctagacctgttgaatccaaagttatgaggatgggatgaaccaggctcttcaggtgattctgagccagacttcttggccttgtccaacaagaaagcagcaatgagaatagaatcaaaaaagtccctcagccatgcttacatatccctgcagttctgaaatctttgatccaataagcacccgttaatggctcttttgttgtttcttattatttattttcctggcacattaatgtgttaacagctctcttgagtaagacaacaccacaccgagactacaatacatttaccatttgttgaaaatgactccaaatagtttactcaacttacataatgcaggtgacatctatagagattcccttcagaaaaatccagtgagatgcagtcgctctgctttcatgagtggtccattgactctgtgaccatgcacagagtctgggttcttattgttgcaatatttattgaacgaaggcacttcgcatccaatacttaaagaaataaagtcacgttcatgtttacaagtgaccaacggggctgagaagggaagagaaagcatgaaagttatttggcaggagaagtttgtgtcccccagtaaccctgctagcaactctgtcaacaatgctgaaagaagaaaaccaatagattggaggtggtgaggatgtcacgaagccagaatataaatgtgcatgagagaggtaaatgacaataactctcatctttgcagcacgctctgggtggcaccttcttgccgtgacaaagtgacaaaacgatgcatacacgcacctctctgccttgcttctgcttcccactcctgattatttaacggatgcatctacagtccgttaggtcaaataagcaaagccactctgcggcaagacctccgtctggaaacagactcaacattcagagaacattccagccctgcttagctctcaggctcacaagaggcagactttcccctatacatacaaaactctccttctatagattgtggggtttacaagcaaagagcttgcagaagcttatgtctaaaaataggttaaaatgatttttgtaatttgctccttcccattcaaaaaaaaatacttcaaggttttcttatcatcacagttatccacctgtggtggaccgacctccccaagccttcagtgaccctgggcctgttgcttcttggcactgatgttcagagtccttgggctttgtgccgtgaggcgctacctggcccactcaggccctgtgtgtgtgctccaatgagtaacttcttaaaagccccacacaaatgcccactttatgttcttgggcctcctctcactgtaaaacgggaacgctagccccgattccaaggaaacctgtgttagcacaccctccccttccttgcctagaaaccagagcaccctgtcttctgggcatgcccacttcctgccatcttaggaagtaggcccttcagtctggcatgacaactctagtttctttcccaatggccataaagccttcatcttgaagtattcaataaatgtttttttccagaacatccttgtacacaccaccaataaaaagaaaacaaactgttgttagttcctgcaaagctgtgggtaaggagtctccacctcagctgacacaggctaacttattgacatatgttgagctagctcaaactccgtaacaacatggcccaatgtaccaaagttaaggtgcttcctgtccaaagtgggtaacttggacattttctattttcacacggctcgctggttgggcctgtatttcctgttattttaactgcttcatataggtacaggacaaacatacactcacccacctccctcccaggagcttcttaagcctgtagcttacatggcgttcacacctccatcacattgccacttccctctgtcaggccgggccagcctctgagtgagactgtgatttttgtctctctgttcccagagccatagaacagtgtgcagactgtgtgagccatgaagtttggtgggtggacatggggtggactgttggatgtggctgggcgttgctatgctgtgcattgtcttgctgaggtcaggcctagtgaaggtgacacaagctgctaatgaaagggggctttttgttgtggagagactgtgtttgtctttaaggtgctggccggtcactctgtcttgatcattagaatgtacgtgtctcacgaggacgagggagaacttggcaattgtggtgttagcccggcagcctccagggaccaagacaattatgtgggagaaatcttggtccttctgtcagaaggagaaagcccaggaacgtgcttcaggatgtgacaggagtgagtttagaacattctatctggcttgctgctgccgaaaaccaaaaccaaggtcttttttgttcctttgcttcagttctgtagatcctgtgtgaggacaggaagtgaacccctgcagccttgtcaaactggtgccccattggaacgtttaaaaacgtacttaaagacatgaagatagcagtgggggttgttggaaggagaaagggagtctttggagggggagagggcagtgagggcagtggataggtgtgattaagatgtagcgttcgtaagaaaatgtcatgatgacatctgttgtctgttattaatacatgcagatgaaataatttttaaaagtgctttcagaaaggacttgctccgtgacttagaaacgtgagctgctcccctgcccacccggcacctttcggtcctgggctgcataaccaccacctgaatcttgctttgtcttccatccacatctctggagaccagcacgctcatgattccagtgatgtgcctcttagaaatgtcacctggagcttacagtggtcctcctgcttcagcctccagggcactgaggtgacaggcatggggccaccacgctcagtttcctaacgagtgatcttgttcagattgctgcagtagcatcttaggatccttaccacgtcaccaaacatctctgcccattttcctgaagtgtgtctgaagccgtgtcacactcctgctggagagccaagccacctcctcgtcacccctttgttctctgtggtcacccagccttttctaagctatgttttgttacagttctgctgtgggtctgcccactctgctagcctgcattgtcccattgctggcctgtggcccctgtatccgctttcagccaggctgcctgctgcgtgccccaggcctgcagggtggtcccctagcttcccctccatctccccagcacccactttatagggttctgtgatgatcacaagaagaaggacatagaaagccctcagatgagctccagatcgctgctagtggctgtcaatatgataaggcctttcaagcccacattttaagcagagccgtctatattttccttttagatttaagttccttaaccttttataattattctgccttagagtagtgtgtgagtttattttggactctactggacatcgctaatcaaatagattaagttttatttatcattgtagcatgctctgaactgtctattatagtacccggaacacagaggaacttagtcaatactagtcaatatttactgaattgaaataacgcctttgctgttttcaaaccatgtgccactgggtgggatagatggttccatgattaaaagtgcagactgcttatgaagaggacctcccagttctcagcacagtgccagctccaagagatccgacaccctccggcctcagaggacactgcgttcgtgtacacatacacacccgtggacacacaaacatactcaattacaaatagtaaaaacatgtctttaaaattgtgtgtcacgagttgagaaaaacctgtatcacataaatagaatgaacggaagagcttggcgacgtagatgacaccgtggaagggcagggagcttcctgtggtgggaatcctgacgcgcataccccagtaatgttcctcctgctgtgtttcctgtggcaggtctgcgtggtggcctaccttggactgttcatgctttgtgtctcctaccaggttgatgagaggacgtgcgtccagttttctatgaaggtgagttgtaatgctagtctttttagttaatttccacgagttaggctgttcctagagcacatgaagctggacttttaatgtccccaaaggagtattgagcagccaccagttcaaggaaacacttggccagggaaaggtatctttctgggtgcccacttccatatctcgtgatcatttggaatatttcaacaataaaacaatccgagtgtatttccccttgtaggtgggagcaccgagacagaaagggaacattgggtgaatccagtgggccctgccaatagtccgtgggaaatggctaggccgtgcggtggcttggaagttgtatgtctttctttaccgtgaactttttgtctgttgtggacggtgcatttggtggctgtctgtctaagtgcacagcacttcactgcacaaatataacctccagattacacttaacacttaaacagagacagaaacacatccctcagaggtgaggaggagataaaacaagtgagcagtctggctgttggttttcactcagtgccatagccaaggatggagagtattctctatgtttctcttatccatttgtagttggcttttcttccaggcatgttctttgctacaatcaggaaacatgaagcccaagattaagtcaacagcattatttaaaaaccacaaagattaaaaaaaaaaaaaaggatgtgtttaaaatgtggagaattagctcagtgggtacagtgtttgcctagtgtggacaaagccctagatttcactcccagcacctaacaaatggagcacagtgttgcctgactgtaatctcccctctcatggagtagaaacagggatcagaagttcaaaagttcaaggccagcctcagccatatattcagttggagacaagctaagccacatggaatcctgtgtcaagaacaaggaaaaggaggagaggaacaatgtcatattcaaaatggtggttaagaaaacaatgtgcatacaatttgaaggacagttgggagccactatgtggctgctgggaaccgaacctggtcctctgcgagaacagcaagtgttcttcaccctgggccatctctccagccctgaaattgttttgatatgaccggtttttgtttgtttgttttttagaagaagactagagaatagacacagttcagggtgagattgacccaaataacaaggtatggtagtgagaagagggaaagaaaacaaaagaagaaaagaaaaaaaacctagtaagaaatcgcttgctaagtttcaggaaattcatccagcaggtagaagcattctaacgtggattttatccagtcaaggaaagcacacaacttccccactccttttgggatccctgaagaaagcaggggtgaagcctccctttcagcaagtccccccaccaggcatctgtacctcaaaaaaagggggaatggggaaaaagaagaaagaagaaaagtggctgccagtgtcaggtagactgcagactccccactgggaagaccttattagctctttcctttcttcaccatgacagacacacagacaggaggcccttccttcagccagactgctgccagaagcagtctgatgtaggtggaggattttgtcctacctggtcccacagccgcaaataagcacacaaagatttacattaatttatatactgtttactgactacttctgtcttaattattaacccataactattaatctatgtgttttcacatggtcttggctttttggagaatgcctggacctgttactcctttggcggctacatggcgtttcttcacggcctctctacctctctccccagcattctccttgcctcctaggcccgcccatcttcctgcctctactggccaaacagtgttttattcatcagccaaataagagaaacatatatacagaaggacatcccttatcaatctgagaagccctctgtgtcatcttcagtcctcagcagccccatccaggcccaacaggacacagctggtgtcccctgtgtgtcccaaagccttttgtggggaatgaactgaacctttaggaggggcttgtcactgccctttagccctctagccctggacaaagctttttggtttattttcttcttgtacaaacacacacacacacacacacacacacacacacacacacacacacacacaaactcacacacacaaacatatacacttatactctcacacactcatacacacaaatacacacacactcacacacaaaacacactcaataaatctctctctctctctctctctctctctctctctctcccctctcgattcccccctctctctccctcttagacctggaagccaccagcacttccctgcttttccccaggcctctgcctctgaacctggcaggtcaccaagtgtggaccctcctacccgccctctgggtgccccttttcctcagtgctctcctgcatttgcccaactggaaggtcatgtacctgcagacagttgtggttccttgggctgcttggtggcagacctgccccagcggcggagaagccttaccattctggccaagggagatcattaaatctaaacagacacctagtctcctcagagccaccagctgggaaaacctcagcgggctccaattacagcagggcaggagcaagcctggggattacataagcacagagccggcctccagggatgttctgcagggacacccacaatggctgctgtcacatcccaaggtcaggccacacacacctgccttcattgatagtttattcctaccatgtgggcaaaaacaggtgcctggttttaaattgtggtttttaaggaagtgcattgcaggtgtcaccagcaggcccgagtgtgacctaagagaccagaagctttcctgactctgatgtgtgcccgtggcactttgcttctcttcccctgtccttgagcgtctggactctgcatatttaagaagttagatgacaatgaagcaacctctgcatttgtgtcagtgtttacaaccttctaccagccaagtccgcattgtccctcccacaccacgcaacagaaaacaggacggatagcagggctggtcctgggagattccaggaaatgatagcatcccttctctgctgctttagctctggtgccctgcagagatgtcagctcttgagcctcgtagtgatgatatgaactcaggttagatagatcattccaaacttgcaggtcaagtgataccagttaataggtccaacagatgagccccaggtagcattgggagtgaagccttaattaggtggcctggcctgctggttcacgtcctttgatgttgtgtccatgttaaaaggtctttggcaagtaaatatttgagataaaacgtatcctttaaaattttttaaaattatattttatttattctctctctctctcgctcgctcgctcgctctctctctctctcgcactctctctctctctctctctctctctctctctctctgtgtgtgtgtgtgtgtgtgtaggtcagggtgcatcttgcaggactttggctctcccctcccaccatgtgggttccaggtattgaactcaggtcatcagacttggtggtaagggcctttacccactaagccatcttgccagtcctgttttctttaaaacagacaaacttctcattgtcaacagatggactttccccatagtgatgcaaatagctaatgtttaaggacatgcgtaagcatctgagagagattgtgaacgtgtgcacaccggggtgtgtggtagatagaaaagcaaccacaggatctatctgctggtggcccaaaacaaaaatggtgtggcataaattcaatttggggatgttctactaagtggatagctacccagagggaaaagaccattttaactctcgttcctcctcctagcactcacacatggccagcataaactggttctcatgccaagaatttaaattcaatcaccaagtccaaagacttcagaataatccacaatattttcaatattctatgccattagccatacacaataaatccatattttaaagtctaagcactccaagtctacgtaaaaaattacactgaatgttctggggatgggaccaaagccctctttttaatatcacagattaaataaatcctttctaaattttataatgatgccactttgcatttatctgatcctttccctccaaggaacactaaacatgtcaaatacaaattatttctgttatgtttccaagagacaagatgtttcagccaggcatggtgatacctgcctcatatcccagcacttaagaggaggaggcaggaggatgaggagtcacagaccagaactgttcccagtaaggggtagctgtgtggcagcatacaactgttcccagtaaggggtagcttttgtctgtgtggcagtataaatcctgccctataaactctagacaccagtcccaaagtctggtctttatctgggccccgcccaggtggaccactaagagagttgggtccagtgtgtgaaaccagtcacaagagcatctcttgtactgtgcagtgaattttactgtggccgtgtgggtgagaacccacgacttttggtcacagtgttccaggatgtaaacaaactaaatcagagatcttttggagagtccacagttccttcccagcagtcagaacttaaccagcactcccaatcccagagccaacagtaggccaagtcacctgccttctgtagccatcatccacttttccacccagaggtcccctcctgcaaaggggtcttgaccatcatggctgtcctgtgatagctcccacatcaagtgcagtctgttttccatgaacttttattgatagttaatcagtttgtaataattttgaccaactctgtgttcatgttcatagaagcctgtctgtcctttcctttcaaatctcgtttctatcccatgaccatggcatttctcaatttaaaaaataaatgctgtgtatcatctgggagagagggcttgtttgggattcatttacattacctgctaaatctagacataaacattccagtcaggctaacaacaggtcattgcaggtcatgggaagagccaacggctgcatggcaaatggcttaagggtggtttcccagtaaataactctagagctggcgctcgggcactcacacttgagcactggaggcaggagggttgggaaagcaaggccgtcttcagcagctatggagcaagttcggggtcagcctggagcaggtgagaccctgttgcaaaaatcagccagtcatctaactaatgaacatgtatatacccatgtcttggcattgtgttttgagaagagagtggcccttgcctcagagagccagtgaagcagtgttggagagtctgctgctctctctaacagaaagcttttcttctctcttgcaggtgctctacttcctcctgagtgccctgggcctgacggtctgcatgctggcggtggcatttgctgcacaccactattccctgctcgagcagtttacctgtgagacctccctggatgcttgcctgtgcaaactgccctcctcagagcccctcagcaggacctttgtctacagggatgtggccgactgtaccagcgtcaccgacactttcaaattgttcctaatcgtgcagatggttctgaacccggtctgtggtcttgtgtgcttgctggcttgctttgtgatgtggaaacacaggtaccaggtcttttatgtgggtgtcgggctacgctccctgatggcttctgatgcccaacaacaaaaggcctaacagcttggcttgggggtagaggcagaaacagaacccccaggagccaaggtggaaaccacaattttttaaaggcaaacttttgataacaaatgcttattcattctctgagtatttttagatttttttcagaaaacaaaataacttttttttagatctcttattgtacattaaaaaaaaaaaattcttgtgaggatggggtggagagatggcacacaagttctcttgcagaggaacctcgttcaagttatttcagaacccaagttgggtacatcatagctacctgtatttccagttccaggggcattgggtgtcccacacatacacacacatacataatttttttaaaaaattaagacttattttttaagtttttttttaaatgagaaacaagattcaaattggtttgataaacactaaaaggaaaaggaataacgaacaaggaatgaatgacctcagtctcttgctacatgccggtgcttcctgctaacacccttttatccatgacttacctcctttcctgtcgctccagtgtgatggtgtggactggtatctaaggctgcgtcctagacgctagacccttctagttccttctaccaactgtcattatctacgtgatgtctcaaagaagggtggaggtctggggaaagatgaatctctgtactgaatgcttttatttttcacagtagagatgtctttaaggaatgaaatagctttttttccttttttctgtttttttaaaaacgcctagtagaacaggaaggctgagaaattaattataaacacctgggctggggtgcagccttctagctgccttaactctgctcctgagtgggctgcaacctccctccgtgactgtccacttcccataattgaaaggtggtgccattgcattcttagcgatgtagaaagcttgaaaataattatattatgcttctagtccagcatctaaaacaaatcattaagactaatttccagctaattgttcattacaattatgctcagaagtctgtttaatgagctctggctgtacttaggcagcactgttggtgttaagaaaaattatagccaccagggaagatgtctgaagatccactttcctggaagccaaccactgcaaaaaagaacttgtagaacactaatactcaggtttaaaactctcttggaggaaaaaacaaacaaacaaacacaagaaacaagagcttccatcagaggaacacctgcactatgaacacactagtgtgatatgttgaaaagcatctcccttgacaaccaagaacctttggtggtgacttggtaccctggtgagttctgtcatgaacttggactttctataaatcccattaatgatgacttttatggcctacctagagacaaatatctcaatgtcattatttgggggatatgtctacggttagagggctgatttagttttgttattggtttagacttaagacaggtacctctttaggatggcctctgctgtgttactgttattagcgaactcagaagaacatttgggcatcaaacaaagtgttcacctgagaaatccacaccatgaaaacactactacaaatgtctctcttaatttgtgtttttaaaagcagaagttccaggtcacagttgagccaagtttgctctccaccctgcctgtccagttactctcctggtcacaacatttgccttaaggggacatgtattctcctttgcctttgagagtcagtggagagttccatgatggggacaatggagtcagttctgtgtgacacacacatcccaattgcaggaatgtgttaggctagccacctggaagactgccattgtggtttcctccaggcaaaactccttatgttctgactttaagcctgcctctcttgcctgctatctcaggtcaggaatgctcctcagagagaatagtgggtaaaattccaccagaggtctgatctcaacttttcgtgagcacagcaataggcctctagatactgacctgaaaaaccttccatacttgttaagaataatcacctctaggctggggagatagctcagtgagcaaagtgagccccagtaagaacttgattcttagaacccagaaaaaaaggcaaggcatggtgacatgtgcttacaatcctggcactaaggaagcagagacaggcaggtgcctgggactcctggatcagacagctttaatttaatgatcaaattctgggtccctggtaagagagtttgtctcaagaaatggaaacaaaatataaaccaaagtgggcagctgacctctggcctacacacacacacacacacacacacacagttgcacctgcacacatataaagaataaccaaattcacatcgacttgtggtagttttctatagaaatagtaaaatggttgggaatctgtgatgtaacaagctgtcctttcaaagtgaggctgctttcatgcctgttgctgtgcattgcgtaccgttagagacacacagaacactttcgcagctttgaccagcaaagtcaacaggttttttttttttcctttttatgagaaaattaatatccctacacatttaggttgctctatgctttacaaacgactcacagagtattttaaagggtaaaataattttagcctgcaggtttcttgttttctaacacaatcaagagtaggtactgtttaagcttataatattttgtctgcatagaatgggaattttactattatatgatcgaattcttcttaactccccaaaagaagggggaaggttgtaagttcatagaaggagcaaagccaaatgtaaggatccctttgctaaaactctctgtatagtggcgtgtgtaagaattgtattgcatgaataacaaatggctttgggttggatttgaagtattttgacattatgttttgcaaatattgaagctgcagtaaggcaacagagaaggagccggcacacagcttctcacttagcaaaatgttacacttccaatctgtcgaggagccagggtggtgactgtgccttccaaaccctaaaacagcaaggtttgcacagctcccctccccaaagcctacttcaggagaattaaatgaatcaagattttgcaaagatgagaaatggccaggacttggcagtacttggaataggaatacaacagcccgaatgtacagactgtaactgagcccactcaacgggtctgtgccttcgcgtgatcatcatctgtggctcccaagctctgtccaaagtggtgtaggcagcaccttggagccatgcctaaaccatagctactcccaagccctagaaactgtagtcaagtagcaggcctcgtgtgtctccttccttagattgagggcttaaatgttcccttctgagcgccttgcagtgtgttcccacagtgaaggtccagcccgtgtgtgctttctctccacgttcaacacgatctcctgatgctcttttgcttacttctatgtgcagtatgtgatacgcttgtgagactctagtagagactggataaaatctgtctggggtgttagggggcaactgtgaaacagttactaaacggccatcagaaatgaacgtgaaagctgtctgtcacttacaaacatgaactgtgtcctatttcctggcgaccatctctgaattcttgctgcctggtcacatttgtataaatatgccactagatttttctctagtttaaaagcccacaatgtgctttagcagagcagtgtaagttctgtctgtctggtggccaaatccttagtggtcaaaccactgaaatgagttcacgtcttttattttcttatcttgaaggagcactgtcccttcagagctgcgggtctgggtcttggtgctgccggtttccttgcctggccttgatcaaatcaaaagatgaagcgtttctatacatttgaggtggttgtttttaaaggggggggttcgtgtgtttcctttattaataaactttgcataatccacaaggcatggtgttgagtatgttttaaagtgaccgtgcggtttgtgtgaattggtatatgtaaaactgcagagcattgtgttaggtgaaatgagccaggttcagaaagactagtactgcctgtttgctcgtgtgtgtgtgtgtgtgtgtgtgtgtgtgtgtgtgtgtgtgtgtgtgtgtgtgtgggagatccatgtgtgtgtgtgtgtgtgtgtgtgtgtgattaaacttcaaaggataccataatggagaaagaagagatcttaatgctgtgggggaagggagggcgttggcatgcagtgacttgaaagggaagagaggctatgggtaaggacagaggaccaggaaattgaaggcagggacaggggagtgacagtggtgggattggtatgaataagaacaaaatgagtatttttaaaaggtcataatgaaacataatactttctatgctacctttaaaaacataatttagaaaagaattaaaagaataaaacaaaacaaaacaaaaaccctgtgttgggaatagacaagaaccagcttgacagggatgctggtttagtcccaggcaatctgcattttacactttgcatgaggctagaggtcaaggctgtaattggtccccagggagaatacaggctggagggaatctttccagaggtgcctggaatgcagattcctaaggtctgtcaatcaatgtcaaataaagctgactgggcctaaaaacaggatacttgctcctcatattccagttataaatatgtgcacatatggtggccttctccactcagatctggatcaaggacatcctcttaccaactctgaggcagtggacatactgtgtctgtcattctgtgagtgctgtctctttctgtttactgagggaagcttctacaatgcgaagagcaagagtggtcagtacctgtgcaccccttgagccaaatttcattcctcagtgtcaaggccccagggtcagaagtctgaccccctagacaggccatttggttttagtttctgcatatgtaatacagaaaaatggaactgcctccctcacagcctcctgggggaagcaaaatgaagccgcacttacccaggaaaacttcagaacatgtgagtattttcatggacgcaggcctgtttcccacatctagctaaaggagtaacttggatgtaagccagtcattgtgaaatataacatatattaccctgcatttttaaaaattcaaagtgtaagcgaaagtcagactgttctgagacaacaaaatgctcattctgtctttgcagcaaatatttatacttgtgtagtggtcccctgagaagcctgggaatttaaaggcagttgtttctgttggggtggagcagtagaataattcttagcccaagggactgtgacatacaatcacagaactgttggggaaagcagaggtttttatcagcattcctaatgctaagattatggggatcccaagttttggtgggaccatcctctgtgactgcagcgggagagcaagcctggtgccttgtctgtgccatgccgcttggttctcagtacccaagtaggggactgaagagtaaggggtgagagacccagtgtagccctggccctgaaacatggagctgctgccctccaggtgagatgcttcatttactctgttgaagttccttccaggccttttgttgtctctgccagatcatgtgtggttccagatgagagctgactcaaggactgagtacgtgaccagagatgactgtaatcttgtgagatccagcaaggtgtttcctccatcttcctatatacgagtctattagaccactggtagcccaggtgggccctgaggttagtgaggcatgtggggtgaacagtcaaactgattggaaagtgtgtgacggagttattttaggttcttccattcagggcagagtccatgcactctcactaaagagggccacgtcttctgagacagcttcccctctggtagctttcatctttcagtaatgtttggttttgattgtagcaaaatgacataaagatgttaaaaattctctaaggggagagggcttccttcattttaatacagggaagcttaggatttcaaacactgagtttgaccagagcgggaagagagtgatgttgagcatatttggatgaggaaactgtattggaacctgggctctgtttggcgtggcttgggttagagaagagcaatgacccagaacaaaccttccacctaccacgcagtttcgaagttgctccagataaccctggggaaagtggccaaggtggttatctccacttgtgcactttctctgtggactctctgtggtcttccgatgatcacacaaacagcgtacaggcacacacacccatacacacatgcacactccacagcaaaccagcctctccttcctccaagactctggtaaggtattgtgaactcaaatgttggcggctgatatagagatccccataaatgtaagccacccagtattaggttctttctacaggccggcagagttttctgatctagggaaaggaaccaggatgccaagagcagagacctggccagctgcttcaaacacagccgtgtaggtagccacctactctgtctgaccaagattgtgacagggctccagagctggtgggacacggagactatgtcccattagccttggctgtgctgccagcctgcagctaaagtagctgctggtcataactgagtgatactttgctcaaatctattgaaaggagattccagaaagcgaaagggaagggacttttcctcacacaggtccagagggcttttactgtgaagggagaatgaacagaagaggagaattcatgcaggagctcttggcccctggtctggctccctgggcactgcagacagcacaccaaggttgactgactttcctcagaccccgaggcttctcgtcatcttccacagaacaccctcagacactggcctggaaccacgccatcccagaggagggaatactagccaaaaagaaggaaaaactcccaaattgtaacttaacagagtgatctttttttttcccccctttaattcccaaaatgtgttttccccagtccctgagcacagacctgtggttttgtctccctggctttacagcctctgcctggagccaagagacttggctgtgctttcccctgagtcagagtctcggctggtagctgaacccaggaagccctggcccccccatctctccctggaaccaccagcccacaccaccgccgcctcctgtgctcagccctttggctgggtgtcctgcctgttctctgtttggaaagcgccgtcttatgtaactccagaacctactaaatgcttcattgtcttctactcgggggcactcagagcaacctattactgacttatgacttatcatcaagatagaatctcttgccagtgtctcctcagcgccttggaactggcctcacctaccttacggcaatcaacagccaggcttaatgcttgtggtctttggggaattacaggttcagtgcaaggtgcagggaatacaaagtcagggttcatccgtaggtcagggtggctcgttcagttcaggacgcacagcaaagccatttgcaactcaaggctgaggcaggcgtaaacaattctgatctgattattcctttactaatctgattttgataaacagctgatgaaaacgggaggcgtcttggcccttgaaggagagatacccaggcagtataatcagtttctcttatctcaccaggaggggattgatttcaagactcctattaatagcgcaggacggcagggactgtgacctctgccccggatcttcagagccttgagagcaaagtgacagcagcctattgggtaaggtccctttgtccatctttattttctatgaatctctgattagccctgttgggaattctagtaattactgtaagctggcacctccagaagaaaaaaaaaatagacctcttaggattcaattaaaaattaaaaggacctttgtgtgtggttaccaaggagctttcccagaacagatggggtgtggacctgcacaagtcaaacgctgctcataggtgacatttccatgtggttctgctgcctcagcatccctagggagagttgctcatgagtgaaggggtccaggctgttgttctctcctccccacagacctgtgaccttccaaagaacaaatatgcctcagattgccatatttctttactgagcttcaaaactgggacctagggggctggagaggtggctcagcagttaagggcaccggctgctttcccagaggtccctagatgggttagcagacacacctggtatatactcagacagacacaaccctaaataaataaataaataaataaataaataaataaataaataaactttaaaatggggagcaaagagaatcttcccatttggatgataaaacagccattctctcaaggattgttgaagatctcagtctttaggccaaagctactcataatcttacagggaaagattttagcacatccaattagaaacccccactctataaaatactggggaaatctgctgcttcccgtttcttctttcctagtgacaagttgaagttcacttaacaggaggtggttgagttgcttgatttttatctgaatacaacttgcattcccaaatggacaagtcagagctctccagggcttgcggaagtgcccttgagatctgctccccattcactgccacctggccatgagagggcatcagcagacattggtgggaagtccctgaccgaaggggtctaacatgggaaaaaccatcactgggacatggggaatgtctatgtctgaagaagaagaagaagaagaagaagacagtccttcaaagacccctcacatagggggtagctttcataggggcttcattcacacnnnnnnnnnnnnnnnnnnnnnnnnnnnnnnnnnnnnnnnnnnnnnncctgctgaaagtcaagggaattagcagagacttcagatgaccccactatcctttctttttaaatttatttttattgtgtttgtgggtgttttagccacatgtgtgcctgtgtaccatgtaactgtagtgccccaggagtccagaaaagggcattagatcctctgtaactagagttacagacacttgtgggccttcatgtggatgctgggagttgaaccccggtcctctggaacagcagcccatgctctaaatggctgacccctctttccagcccctgtcccttctttttttgtcccacagactcttcttatttcaaaagcactttgacttagggaatattgaagatagggtcaaaaatggtaaatttaagggcctgtagaaagactgtaattataatacccactattgtttcaatgaaataatacaaatttaaagcaacaagtccctcaattatagtacacacacacacacacacacacacacacacacacacacacacacacacaagattagacagggtttccctctgaagccctggctgtcctagaactagctatgcagaccaggttggcctcaaactcaagagatccacctgcctctgcctcccgagtgctgggattaaaggcatgagccaccactgcccatatagtctgcatattttaacacgtgaaaataatatacaaaagcatatttctctttagtcttgggagagcccccatgatatttggaggatcccatctgtgtatatgaacctgagaggccatccctgacagttgagaagtgttccatgataattctggaatcaaagtgtctgtctgcatctgagtttcagagcttagacaggccagccaatttctttgtacctcctctttgggcctcatctgaagggtgataatggatgacttagaatggtacccacagtcagcactgtaagttggtgatggtactgctggtagtggcggtgatgaccagtcaacttgaccacatctaagatcaactaaagcacaggccactgagcactcctgtgaggggttttctggatcagattattggaggtgggagtgcctcccctaagtccagcctgggatttctgaggtgtccagcctcaggggctgagctactgtagggttcttggctgctctagtgtgaggcagccatggctgtgctatctgggccatattatgtaagccaccctaaggaatcaatactgtaggtgaccctgctcggacaccccttgggggagggggtgagatgatgcagcaccaatgactcagacactgggagtcagtgagtagcagagagtgctgcagactcctttattaaggaagttagacctgcctttataccccctccctaggtcccattggctcagttgactgactctgctgcattgtcctttcctcattggtgtctatggtcaggtgtctcttcgtctgtagtctcagggcacaatggtaggcttggctcagggaggacgtgcttgcctggcatgctgaggctcatgcaggctggcctcgcacctgggcagggtgactatggcttgggtaggctggctgcagtttctactacatatctcctgtgtgtgtgtgtgtgtgtgtgtgtgtgtgtgtgtgtgtgtgtgtgtgtgtgtgtgtgtgtcctattcgttctgttcctttagagacccctgactaacaaagtgatggtggtggtggtgatgagaacggtgactatccacgtgttggaatcacagacacagcagaaaaccagagaagtcctcttaggtcctgaagctcctctagcaaagcactcatcagttagtagtttctgtcctctgaaactgataacccaatagcaacccctctctctgccccctgcaaacacagcacgaatactgatgttttcttgtgttctttctcagatgtgatttctaatcagtgggggaagtgaaccggagcttcccaagtcctggcatctggaaagccctgaggcttggtgcccttggagaatgaactccatgccaggcgagcataggctggtaggtgaacgccccagaaggtctttcagggagtgaagcgataactgcttggaaggacagcatgtcacctttgctctggagccctggcaggtataggaagtgtttgcatggatacatacagcctttttcagcagctgggtgctatggtgaaatgtccccccacaggctcgggcatctaaactcttggtccccagctgatgatgctgtttggggaggttgtagaaggattcatagccccgcccacatcctgtccagtctggactccttagtgtgaccagctgcctcatggggcagctgccctgccgtccttccctaacacgatgacgctatccctacctaaaccatgagtcagagtaaacctttccttccatagtcgcttttgtgtcagcaacgggagagtaactaatagacacagtcaccttctgctcttcatcatctctgtccctgagccttgcatagcagttgtgactcagatcccatagtggggcagcactttgtgaaagccctactaaggacctttctgggtaaaccagcatcccccggctttgcagtttctcatctagactgttttcaaacattgcttatcaggccactctgcctgcccaaggccctgagggttggagctgaagtgggcaaaacaggccagccctgtctgtccaaacctaactgtgcagtgttgtacacttataccctgtagatcttgaggacctaagacagatcagctgcagatccacagtgtgcttacaaattagaaacagacagtcatccaggcatgagacgacttttctgtagagctgtggaggaaaggagccattgccttcactggtgtcctgggacctgactggaccatgagaaggcaaagggcacacccatatcatcactaccccaaacctccagccccttccactccaagtgagctcgcttcctttcttttctttaaaatgaaacaaaaagaactagaaacagaggaagatccatggagactgaagtgtgggagccctgagagaccctcacatggagttttatgcttgtttctcccagaacacaacagcagctcctgacagagaaagaagggaaaggtatgtcaggctttttctgtttgtttctttgctcatttctgtgacagcacacctctcatcagcagcttcaaaggcagaaagacctgctttagttcctgatttcagatggccatggccggctctgtcagttctgaacctgggataggcagaacaccgcgatggcgggattgtgcgacagaggctggctgcttcttgatggacgagaatcagggacacagggtagaaaaggccagggcaggctataacccctaagaacgcacccctcaccaccctacttcctcggggaggccccacctccccctttccaaccccttacaataatacaccaaattatgaacccattaaggcatcaatccatcaattaggtcagagaccccaggttccaaccactccccaaaagtccatcagcagctgaacttgaggacatgagtctatggggacacttcatcgtcacactgtaaccggaggtcacatgaaggaacgcgtgtgatacttccacaggacactcaggatttctgaaggggtcacatgctgctttgtaagagctgggctctagaagcattaataaaattactggattttaatatatatatatatatatattggagacaacacttctctttttcacacccaaattcgtactccaggagcgcccctgggaccttgacatgaagcaaaagagaacctttttttttttcaagtttgcatcttgttgctaataatcaaaagttgttttttaatacttatttgacttgagaaaaaaatacaaaagcaaaagaaaatattatcacaatctctttagctgatccctacacattttttcttaactggaggaagattctttctcaaactgatgtctaggctgtaaagcaagaggccccctagcctggcatgctatttgtttcaccagatcaagcagaatagagcagagactgtctgccccgtcatccagatccaccccattacccagtgcagacttgtgccaaaaaccagcatggttttcctctccttttgtggataagagtttgccatgagtctctgaagagactttggatttttaagcagggttgagactattaaagactatgaggacttttgaggttgaactaaaagcatttttcagtatgatatggctacaagtctgtgggggcccaggagtgggatgtggtggtttgagagaaaaagggccctcacagactcacagggagtggcattattgcaggagtgggtgtggcctttttggaggaagtgtgtcacagggggagggctttaaggtttcagaagctcaagccaggcccattgtcactctcttttcctgctgcctgccaattcagaagtagaactctcagctacttctccaacaccatgtctgtctgcatgccccttgcttcctgccatgacgataatggactaaatctctagaacctgtaagccagtcccagtgaaatgttttcctctataggagttgccatggtcatggcctctattcacagcaataaaaaacataactaagatactttatttttatcttaccttgggaatttaaagtgtcttactgtttgtctaagtcctgcaattgtgcaagttctaacctcaggaagctcaaaatccctattcatgttctctgggacacaggctcagccacctactttccaaggaccctgcctgtggttcttctacatcccaattatttagttatttatccacagacatttctcctaatatgttttcttttttaacatataagaaagctaaatagaagttacctgtcttgtcccagcctcagtgatttagagtggaagtcagagagggagacaaggggccacaacacccatcaggagaggctaagcatgactggggatttctaggaggcagccaggcagctctgtggttccgaggttgaaaacacagactctccatcagtccatctgcacaggtcctcatccaggctgagctgccatttgttagctatttgtactccaagtcctcaactacccttccctaagtcccctcactcatcaaaggagggggtttgtgagtgctttgttaagtgccttgtgagtcttacatgggctactgtctgtcacctgcagggcagagtatctggaacattccaagggtgtaacccaggtttgttatcaggaccatcttgcttcctggcccatctttgaatttgaagatttggtatagagatgcaagaaggagggattctgttgtggtatatggtggggactgaggataataaggcagctctgagttgatatgatagcaaagtcttttttcttctgtctacaccctatgtacacaacttccatttaatatagggagcaatttcagaggacagagagatgacacagtaattaaagttgtggccttgtaagcatgaggactttagcttgatatactggaattcatggcttaaacaagcaaaccaggcgtgtgtgctcataatgccagtgctgggaggagactgaggcaggcagaccccagggttcactcacggcttgggctaatcaatcggcaagcctcagactagggagagatactgtcttaaaaaacaaggtaggcagcatgcacccaaggagcgacgcctatcctctggcctcttcaagctcctgtgtgaactgaaggcgaagggtgcaatgatatcactagacccaagataaatgggtgtttattggggaagaaccacaggagcgtttctctgcccttccaagtggatccgctcacccaagaggaagaccccacaagagagagaccacacctcacgctttactctttcgggcttctgtctgtctgaagccatgcccaaagggatgtggccaccgttacaggctcacaggcaagacgccactacggtctgacatggttacattcagaaggccatttaatgccagcaaggaaaaggaactggcatcgaggccccacggttcacactgcagagtaccatcctctgggtctgactttattgtctgtctgctttataaccacaaatgcagcataatgaacacacacacaccggcttgagaatggagggctgtgctcattgcacaaatagatcagatcctccctccccactattccagagaggggccaaacaagtgacttaaagctgaaacaccaggccttggaggcagaagagaaacaaatgctgaccatggccatcattgcctgtgcctctgaacagctagaagcatccttcacctgctcaacttaaaaataaattaattttttaaaaaaggacttggctccagcttatcttagcaagtgactcatgtgggctcagctgggcggctggctgtggcctgagagtatctcttccactccacactgggtccttggcaacgggacaggaggccacaggagctgggtgaggctggacccagggagggggaaagaatggcgtgaaatctaatgcagctgttgagatttcctttcattaacttaaattatatcaatttctagacttcagatatctattgaaaggcgagcaagggacggactaaagaagacagtcggactgcttttaccctaactcaaattgagaaataatggaagtaattcagtctgggcctgagatgggtctcccccattcccgccgtcccctgcctcccttcctgcttagctagaggcttctatttcagccctctgcctctgaggcaggaggaacagccagggagctgtccccacgactgagcctctggccttgcctcacccctcacccagagtgactccctagcggagaatctctgtaggagtgagtgccatatccctgtaatagcctgcttagtcacattgccccaaaacttttattacacagcatcggtgcctggactgttcaattattcatgtgtttcccattccaagtatatgtttggagaagagctgatcaaaaagatgtgccctggatgtggagaccgagctggaagggcggccagggcccaggcactgtcaactcacgtccccacagtctcagttctgcctctgctcactgaggacctcgcacttggtgctctttcctgaggttctgccatgagctcttctactatgaccacatgcactgacctttgagtattttcagcttctttgggatacccctgtctctttgctacaagattaaaaaaaaaaaaaaaaaggcaggcaagagagaaagaaaacctaaaagattctacctcactaggatttaccgcagaacctgggtttcaccgttctaggagcagaagtcaccaacatccacacaagagataggcctgggctgacacggacaagacaccgggaagggaagacaataagcaggtcttttcttacagtggtcagggcctgtgcagaacagtttctcatgggagaggggagcggcgggtgacaacaggatggctggcaacgggaggcccctttatagggatgttactgcaccgagaacctgaatgacaagcaagagctgggcaatgagtttcgatgaccatgccccaggtagaagaaacagcaaatgcactaagaaattaggtgatggggcagagagacaatgaggtacctggagtagagtgttgtgttggaggggtaggtgctgccagatgggaaaatgcgcaagtctatgctgatgggaccctggagggactggtcagtagtttgggcaccaccgttggtgtgtctgtaagctgtggggtggcgtagagttcaatcccaccgtgtacccttcacacacgcaatgcacacgtacatactaacccattatcacaggggagatgtactctgcttggattaggggggtggttcatcctctttgtcagttggctggaccttagaatcacctaggagacacacgttggtgtgtctgtaaagctatgtggggaccggtttagctgagaggggaagatccctcctgagaagggagcactccagaccaaataaagagggaggagagcaagaatgtgcagggagcaccagagcccatccttctttgcttcctgcctgcaggcacagtgtgatcagcacctccggctcctaccactgtgccttcctaccctgctggacttatgacccaaagttaaccctctttccttcagtcatgtttgttgagtgttttgtcatagcaaccagaaaaatatcaggtacaggttggggaaatatgcttctataattgatggtttttcgatttatgtcattatgtgttataaacaacttaatggagaaaagctttgttctggttcatggtttctgcctatggccagagatctcagtttcatttttttaaaaattctaattgtgttatttgatgtaaatgggtgttttgctcgaatgggtgtctgtgtaccacctgctcccattgtgcatggaagccctaagagtgccctggagcctctgccatggaagtcgcagatggttgtgagccgtcatgtgggcaggggcccttggaagatcagtctgtgccctttaccaccgagtggtctctctagcctcttccttagttgcagctagactgcagtgaggtaaaacatcacaggaaggaatatccagtcaggtggggctgccccctcatggttgctgaggacctgagaagtggcatggtgggcatgagacactttaggctgccccaatgctatactctctccggttaggccctgcctcctagcttctactatttcccaccaaggtatgaatccacaatggcctattcttgtcagagcccccatgatccaatcacttcgcctgaaacatacctctgaacatttcactgggggccaggccttcaaccccccgtggcttctggggggacattttctgttcaaaccagaacactgaccattgcttcaaaattgacgtcactttctcagaagtaccaaagaaaggactgggatggaaaacaatgaacatttctttgaatccctttaataaaatgaatacctgaaatggaaaagtactgtgtacatcatgcttgacattgacctttcaaagccaacctttaagacatgtcatgtcatggctagaagtggttcataataggaaagaaaaatgtggactactttcccattgaatgcaacacacacacacacacacacacacacacacacacacacacacacacacacacacagcatgtgcatgcatggggtcacacacacacacacacacacacggtaagcgaaggcatggcttggcttgaagaagcaataatatctggggactcactattggtatgactacccacctttgcaaaaggcacaggcctccctcagagggctagaaaagatcctcattctattgggttatttaaccactgtggtctctctctgtcctgggagaccagtgaccctctaggactcagaacaagtgactgccctgtggggttgacattaaatgctttaaacacccttttcctatgcaatattctgccttccctttaagagaaaatcctgagacaaagcaaagcacaattttcattatgaaattttggatatgtctaatatggctaaaattatgtagcaccattcttgtataaggtcggggttttgaacttctgttgactagcggcattctttgactctatcatatccatagcagtgctagtttaaaacaagtgtgtacagaaggtaaataaagccctttccaaaaaaaaaaacaggcaaagttaatggctgaataaaaccatggtagacttagtcttgttcaaatacaaaaatacacaaaacatgaattgcctgtaaatagatttttttaaaagccagtcatagtatgcatcctcatctcatttagattaaagaaacaatgaacatcaaaataagagaaaaatagcaccaatgtcaaatattacaaatgggaggggcaggttgtatcacatagaagaagcaagtatataaccaagtaaaagattgagtctggagccatgcgtgtaacccatccttatatatttacattcaaagtcaccagggccttaaataagttaactgttaaaatgtcatttcacctcagagagatttcctttttgggagtagttgaggaatgacaggctgcttttgttgatatggaaaaggagagacaatgtagccacatcctgtaaacttgtgactatctgggcaacatctgaacaaaaaaaaccaaagacaattgtatgaggtccccctcccaggaaaattcaactgtattctaaccatggacagtctcctgggtaaggggaccagctttgaagcagaaacacccctgaatgctaagcctgacgtctccatacctagcacccacagctaagacagatgaccaaataattaagagttgaatgattaactctccccaggccactgtcctcatcttcagagctggtgacagcacacggctgatgatcctgtaggaccctgtgagtgagtgtagctcttcctgtggtgtgggctgaggagtgaagtctcactgaagactgtctgcagctggggtaagggaagggagcaggtcagccgtgagcccaaacttagcatgtgggagagcttgcttcaatttctagcgcccataaaaatagtaataacaactgtagctggtcaccccttcagggtttagattttttatttgttattattttataagtgttttgcctgcatgcacgtatgtgtgtatgcatgcatgcatgtatgtatgatgtgtgtttctggtgcacatggagggcagaagaggctgttaaaacccccagaactggagtcacagatggttgtgagccaccctgtagacgctgggaatccaacctgggtcctacacaagagcagtcagttctcttaactgatgagccgttgctctagccccacccaccctttcagtattgaatccactgttctttcccagagcataaagctcacagaaaaaactgcatgcagtgtgaatgccaagctgataaaagaatgcacagattgaaaacctggattggaaatcaggttgctaacatccagaagcccttgctgcgccactataacaatgccttttttaaaaatctccattagaaatatttctttgcatatgaagggtaattgctgtttaatttttaatctcctaactcacgcagcagatatttccttgctttgattctaattctttcaacagagaaaaatggttctgttcagactcaggagcttatagtcaccaagtgagaggggctgagttcttatttgtccagaaagacagtgtgcagggactggtgatgtgacagccgcttgctccccagtggctcacagccatggagaaccaaggctcactctctcgcctccctgcctgcctagggagcccttcatgcctccttcctatagagaataatgacatttacacaaacaaaagtcatacaagaaattgctttcaaagccaaatgtgcactcttccagagacaagaaggaacagggacagggaagtgcttggcaccatacagtggcttttccattttaattattaattgctacaactccccaacagtctcctcctactcagaataatccttaactatgtctctccataacacagatcagcaagaagaaaacaaaaagaagctgataccagagtgtgcttcatgtctacttggaagagaaataaatatgaataaaatctaaaggagacccccccatagaaaagcttaaaattcttaaataccccttgtaggggagactgtagccatgcctgctaggggctggctacagtggctacagtctcccctacaaccctttaaggagggagagagaggaatcggggagagagtgaggcattctacaaagtgtatttgcaggttgtgtgttcaggtcttctatgctcatgcttgggcacgatgtgtcttgagccccattgtatcatcattggctttatttgactggtgaggaaatggccaggaaggagacaaaagatgaccttaaaggcaggaagtgattatccttccctgtcatgacaccaggaagatatcattataagaaaacctaacaagaggagcccaaacgtttgtgaaacaaatagaccagagctggaagggaattttacaacggaagaattaagagtcagagatttcagcaccatcctgaacaacgcacagaaacagtacatgaaagcatcaaggctatgatgaggccacctcactgcacttggtgtaagtgcacagctattgcagaatgtatattcttttcaggcacataaggacagaccatgataggtgggaccctggataagtctcagtaggtttagacgattaagatcagaattaaggttaaaaacaccctctgatcaagttagctaagaatcagaaacttaaatcagagaaattcccaaatattgagaaattaaaaaatactctcaacaaatcacacggaaaaccagatgatattagtaacaaaaggaagccagaatataacgtaacaatccacaatgtccgaggcaaagccatacttacagggaaactcatatgttctgttatcattgttacaggtgtggtttccagtcctgggtagcaaatgtaggctctcacactttcgccagaactctgcacatgagctgaaccctagtctgaaaattcatgattttaagtgcctatgctaaaaataaaatagcttcaaattagtgatattagtttcaatttaaagaaattataaaaaagcaacttgtaatgatcaagaaaatcaatatattgactgtcctggtcagctttctatgactgtgatgaacaccatgactaaaagcaacttggggaggaaagggtttatgtcatcttacagttgagagtccatcctgaatggatgttgggacaggaactcaaggcaggaacctagaaaagagaaggcacaagctcacaaaatccagttcaaaataggagcatcactacgaatcctacagcaataagagaactctatggaaaggtcgtgagcaatctcattccaacaacttagaacaataagtaactcatttaggaagaaataaacttcctgaatagacaaataagtaaattagaatttttaagttaaaaattttgtttgacagaagcccagacagagataccaaattctctctatatttaaagaagtaggcactagaccttcatttttttcccccagaaagtatagacgtgaacactttactgtctgaagttaatattatcctgatactaaagctgaataaaaacatcacaagaaaagaaagctctggattaataaccttcatgaacataggcccaataatcactgccacaatactgacaagttaaatttaggaatatgcaagattgattgcactctgagacaaatcatgatgtcacccagaatataagggtgactaaagacatgagaccacacccatgatgaaaatatgagggcaaataacaagatcctctcaatagataaaggaagagcacttgacaaaatctaagatccattcatgattttaaactctgcacaagagctggagaaatggctccgccaggcccaatcagcaagttctaggtcctagtgagagacttttgtgatccaggttctctcagactgccaactcccaaatcatgacctagagacttattaattatgaatgcttgtccttaggttgaggcttgtttctagctagatgttttttaacttaaattaacccatttctcatttgcctcctgttcaccctgccttcctgcttcctctgtgtctgtctgtctaactccgggttggttgggccctggctgactggctggttccccttgtctctctgcctaccagcgctgcctgtccctcctaagtctagctattggccattcagctttttattagaccaatcaggttccttaggcaggcttggtgaaatagtaacacatctttacatagttaaacaattattctgttgcaccacacttttgtctcagaaacaagggggttagggttggtggtgtatgtcttgagtcccaggactggagaggcagaggcagatggatctccatgagtttgagaccagcctgggctacatattgagttccaagccattcagggctacatagtgaaaccgagtgtgtgtgtgtgtgtgtgtgtgtgtgtgtgtgtgtgtgtgtgtgtgtcagtgtaggtcagagaacaacttggtgggacaaggaaacaaaccaaacacaaggagtatggttagagttagggtactgaagtcagtacctagggttggcctttggccgacacaatcatgtacttactcacctgtaaccacatacacacagacatacacacaaatctatgcatgttctccaggtgaatagaaaaaaaactttctgccaacttgtgccgatcacataactctccaaatgtactacaacgatttcatttaatgctactgattttacaggtgtaaggctcacctcagtgtggcttttataagaatgaagagaggctaagatgcttaacttttatcaggggagtgctgaggatgacagcggttatgttctttgggttgttgctcattagagctgctcaacctatttttagttgattactccactgatttaaaaacaaagaggaataatgctcccaggatggtgcatcctccagcctggtgcctgacctgttctggggcatcgtgactaagtctcttcccccaaagcagctttctgtccccactccctcatgtcagctcctttgctcacattgcaccctccagtcctaggtggggttttccacatgtgtggagcagatgtgtgatagaagcaggcagcgagggcgtcagaagaccgtgagggcttctgtcagacgtcggcagctttaccttacatccatggagtctgtctttttctctgccttcctcattgaaaggtgactatgaaagctcttgtgactcagaacttttcccaaataggaattccttgggtctacacttaagagccaacctcatgtgggagatgggaccttcacaagtaacggggctttgctcctgagtacttcagtcagtactgactcagtaccgtctctgtgtgtgccagatgttgtaggctttggaggtactgtggcacttaaaacaggctctagacttcacagtttctgggaaacaatccacagacaaataaccactgaagttttgaccacgtgggtttgggattccctggaaggctggaaaggaaagtgtggagacaatagttaccaaatgggaggctagcagccatgacttctctaacgagacattagagtgtgtctgagggaaatgagagcaaagaagaagcaacccatgcacaaagaacaggaaacgagtgagactggaggcaggagcatgcttggtactaaagcaagacaaagaaaggcagagcatggctgtggcaggggtgtgaggcgtccatgacagagatgcccctcaaccaggtggggacagggaaggcaacattacagtaagagtcaactgagagctgttaaagtgttttgagtaagacgtgacatgatgtgacttctacttagaagggaccactccaagtgccgggttggtactgacagtagtggggcagaggctgaggaagacaccatccaggcaagaggtgacagtggcttgtcttaagaaggaatcaccaacacagaggagaagcagccgtgctctggatgtgtttctgagggagtgccaaaaggattaactgatgattagatacagggaattgagagaccgagaagagccaaagatgttactttaatcatttagcaagagtcaatgtagtaattccatgctgggcattattccaggttcatggcaagcactgatcatctcatcccggcaacagccctgtgagataggcactgtttccattctcatcttcctccttccgaaagtcaagaagggtgaggtcgttgccattttcctagagagggaagatggaggaggaggttcagggtggtacatgaaggttggtgttttggttgggatgattgacacagcttcctgaaggtattgagcaggcatctggtgatagaagtctggagttaaggagcgtggtctatgctggagatgtgtactcaggtgttttacaatttggggcaggaccaaaagccatgaaatggacaagacctgtaaggaagtatagatacaaaagagagaacaacccaaaccaaccttgcaatagttggatacaatgaaacaaggacaaatgctcacagagggcaaaggaatggcgcaagggcttggcatcttagaagttgagctgaggaaggtttggaggaggaggtaaatgttggcatgaaatgctgcagatggctcaagtaagagtgaccagaaggcttactggctgcgctggaaagacctgtctcattaaaagagaggtttgagtataatggggacccagagaaagagtcaggagacaataaaaatagtaaataagtaaaattctcttgaggttttcctctcttcctccccctcttcctcatcctcctcatcctcctcttaccctcccagctcctgctccttcctcctcctcgcccccacccctcttctttttggttttagtcactgtctcattctgcaacttagaggtcactatatagccaaagctggccttgaactcctggcaaacctcctgccccagccttttaaaatctaggagtatagataggagccatgatacctgtctcaaggcatttcctatctcaagaaatatgacagaatccagaagaaaatgcagggctgagaaggtttgttttgtagataaatgaaataaaagcatattcctacgcagataaaattggtcaagtggaaaagacaacagcatatattgaaatgggagctggagatgaggtggagtcagtgaggagacgccaggtgttaaagcagaggcttggctttacccggcggcaggggacatccgtccatcagggaaaggaggcgggctgtctgtgggcaagtccgttcacgtgagagatggagtcatttgtgaaaggtctcttcttgctgcttctactgaaataatggcaaaggtcataagttcaagaaaggcgcattggagctttgaggagagagaagtaatgaaatgaacccatccagaacttcatccaaatcacaggtcaacccacaaaccactcgagtctctttcgtggacctagaaaagaacttatgtttttcaggaggcaatgtaaacacttgaggtgtccacgtgcttcctaactggtttgcatgacctacctggaccaggttaagcaagaggtgagccagctgaaagtaattctcttgagtcaagttgctgcttttcttggaaaatctaaattttactcccttctgtttttttaaaaagaaagtacattgtaaaatgaagagttgagcgtaatgagtttgaaacgctctgcaaaggctttatatggttaaatccatgtatcagaataaccattcatcaaaccacttctgttctcttagaaataagacataaggtaggccctttgagggaatccaggagtttgtgcggtgagagacatacattcttaggaaggcagtgattggcttagactggcagttgtaaatacatgtgttttttctgtgtctgtcaagcttaggcatatataacctaatcagtctcgtctgaagtgatggttgagcaagaacttaattacttgccatttcttctaccactatgacaaaaaataaaaaaataactccatagctttcttgttcaataatgcagggatctgatgacctgtagggtaagagtccgaaggtcttggtgtagcccttaagagtgagttagtgctcctaccccgtggtgtctgctcccaccactcaaagccaacactctgaagataagccttggtaggactggacttgttcaagggcctgccatgacaaaacaaggtgtacagcaccctcaattctgtcctggaagtatgtgaaagagcttcagtagggctggatatgagatgcagggatcgtggcgggacggttgtgtggtcagcagggtctgcatcgaccacagtttgtctcctcttgatcctgcagtgggcaggtgagaattgactctgacctcccgggaccagttaccagcaagcatgttcagtaagctaaccatcgcagaaatttactcgctccgtgttaggcaatgcagggcattaaggaaaaaggggaaatcacacattgtgatgttactggagggtggcagatgctccaggtcgggtgactctcaggacgattatcatttaatatcttaattgtttgggtgcagctttggtttagaatttaaattctaggcaaagggggaggagccagtctacctctctccgtagcaccgtgatgtggggaaagcctcctatccccagagacagctctctgctctgcaggtcttgtgcttctcctgaaggttgtgaaatgaaatgaagcaacatgtcacaggagatgcacaggtctgtgctggggacattgcaaaggctatcattgttaatcattctgaattatgtgttgtcacttaggcctggagagagagcaagtgctaccccgaggacttgtttctacgtgttatctgatggggaaaacaaactattacccactatgctccaattaatcactacagatgcttcatttctggccatcaaagtgagggtggcgcgtgcgtgtgtgtgtgtgtgtgtgtgtgtgtgtgtgtgcgcgcgcacgcgcacatgtatgcatacccatgagtacgtacttgtgtatatttatgcatgtgtgtatgtatgcatgtatgtttgtgtgtgtatgcatatgtgtgtctttgtatatattcatgtatgtgtatttgtgtatgtgtgtgtgtttgtatatatacatgtgtgtgagtgtgtatgtatgaatacccatgcatgtgtatttgtatatatatgtgtgtatgtgtgggtctttgtatgtatgcatgcatgtgtatttgtgtatacatatatgtgcgtgtgtgagtatgcatgcatgtgtatttgtatatatgtgtgtttgtatgtatgcatgtgtgtgtatatgtatgggtatgcatgtgtgtgtatttgtgtgcatgtgtgtgtgtgtttctacaggaattctccagttctctctcatcattcaccggcctgttatcctatcaccagcattccgacactaggaccgccttcctcctcaggtgccatgcacaggtccaggtccaggtccttaggttactccagcttctgtttctcttggcagcagtcagaggtcttatcgcccccttcttgggctgaatcctagtgagagcaggtcacagagccaaagttgacttactagactaccacgaatcactactaactttattaaaggatagagctgaagggccagacgatgagctgtgtaggaaaagccatgggagaagtgatagggctgtctgaactctctgggaactccaccccataaataccccatgtgtgtgggatgtagaagctgtacaccctgatctctttgggtatttgtggaggcatcctgatgtggctatgagccattcattcaatcattgctcgatggtgattaactcaatctcttgccccttcccacttcctagacatcccaaccctccaaccacatacatgattcccatggcaaccacacatccacccttagggactttccaaaagtctcctcattaacataaattcacaaaggcatttattatgaataacccaaggcctttaaacttttatcatttacaaattgttcagtgtttcaggagccctggctagaaactgagagtggagactaaaatatatacttcttattatatcatggcatccgacacacagcccaaagaatcaagcagcatccaaggagagagaagactgttgtgtgcagggcacacagctgtggttttgtccccttggcaacatccacatagcaagaagctatatagtttgacgtatgtctcgctcttctcgagttttcctaagactagggaaaccttagccaagtaatgaggaagacatcttcattttaccgaaacatttccaagtcccagaggagtgaggaccatgtgtctaactgaatacaccagtaccgcttcaaaactcgttaaatgaaggaaaataattgaaccaaaatgtgtgtctttccccaggggttgggtttcaaagcctgcagccacaaggtctgtctcacactggtttggccctgggaagtgagtgggtgtgctgggtttgatgacagccttcaccctctgctgatgccgccatttgaatctcgcagctgttgaaccgcttgtgtcttctgtttccatttcaaactacgagagcacggcaaaatgcacacagccacatggagacccctatggggcagtgtgtgctcttatcagaacactcagcaagagagccaagactgcttcacacgggcctgacccttgtgcgccattcagcccacaccccacatgctttaacctatggcaaaggcttaagagacccaggtcaagctcaggtcccgcccctccgttcactgttaaccagtaacccgattggggatccttttgtggctgatacagggtacagtcatggggccatatgtcctttataaccatccaaagtgtggggccatgcccatgcttgtcagctggtgctgtgacccctggcctggcctggcctgggacttcttgtttaggcatgtgagagtctacgctgtggttaccagtgcagcttgcaggctatgctgtacaaggttgccagcttctttatttagccacgaaccagttctttcaacaagatcagacactaaagtccaatagagacttaaaacaatgaagtctagaattacctggcacgaagcagaaacagaagcaaatgattgatcctaaggctggtcgtcttccatcccactgaaaccaaaccttctctcagatacatacacacatatacacactcacacaccattacaacacatacacacactcacacatacacactcatgaacacatatacatatgcatatactgtctttctcacacacatactgctgaggcacacacacacacacacacacacacacacacacacaccctaaggcagacacagaagcaacatgtcacagnnnnnnnnnncaacacgcacacacacacacacacacacacacacacacacacacacaccactccactgaggcactttgaagaagctccagcactcaaatccagggcaattggaaaactactgatagtcttatcattcacattacagacaaggaaactgatctaggtctttgctgtcttcttgtcataggtagacacagatggcccccaaatatttgaaatggcgaggccgagcaggggttagcctgagcaggggcatgctctaagttgtaagatacagaggattttaaaggtgagttacaaaataaacaggagtctaaactgtcattggtacattatttgactgaagatatttatttatttatttatttatttattcatttatttatttatttatttatttatttgtgaagacgtgtaagtgcatgtgtctccgtatgtggagtggaggtcagaggacaagttgtgcaagttggtttccatcttccactttttgtgttctaggtcatcaggcttgaccgcaagtactttcacccaccaggccacctcattggcctagacgaggttcaataagaaatgtaggggctggagagatggctcaacagtaaagagcaacggctgctcttccagaggacctgggtttgattcccagcacccacacagcagctcatccagctataactttatttctgagggaccggatgccctcttctgacctctatgggcaccaggcacacacatggtatatggaattacatgcacactaagccttcataggaataaaataaatattttaaaaaagaaacaaatgtgcttacaatgaatctcttgaattgctttcttaataggatcatcagaaaattcaaaatgacctaagtggttctcattaccattgtcttgtcattccatggggcactcatggtctagatagttctaaacgccttctccaggggctcctggattggcggtggtaggtcatggctcatggctcctaaccgaatttcccccctctattttcttatttcaggagtacgtgaaccattgttcacagtgatggccctggacagccccgttggagagcatggggtaggtgggttacgatttctttggtggggcagaaactgtgccatggagtaggaaaccctgtgccatggagcaggaaaccccttagctcatttccctctccctgtggaagtcagcagccgtcttagattccacttttctgtaaagtgagggcatatgtttacaaacacccaaatgtgagctacactatagccactccctaattccttcgactgtggtattcttgcatcaactatgtgtctttttcctcaaagtcatctcttcctccaagccaacttcagcaagccaaagtacccctcccagggaagacaagaaagaattgttttccttcccccttgcttcccaaaaggccatgaaagaatagctacttgctggtcactcagtaaaggtacggggggggggggggggggggcaagcgaaggtgtcttaactgtgaagccctggaaagcaggaccaggcctgtcctggagggatggggaatgactgtcacaggcaggacgcaggcacgctacccagcagcagagaaatgggcagcggccactgacagtttgtttatggcccctgctttttatttatggcatgatttaaaaagacatggtaatggaggtagtggaacacatagatacccagactgagagaagcaaacagttactaaactttcggtcctcatccccagctcctaggaagcagaaacacgcagacattgttttaagtcagggagttaccagctgggttccctggcagaaacaccagacaccttcaacgagtgagagggaagttttatgtcagaagttccctgtttatgaggcagttatagctggagttagctggtaccttagggtttataatctgtttctttctttttcgttttcatttctctgtgtaataagcctagttgttctggaactcactctgtagaccaagctggcctcaagttcacaaaagatgctcctgcctctgtctccggagtgttgggactgaaggtgtgtgccaccactgcctgtaatgctttttttcctgtttgatatttttgtctccgatgcaacgatgacactagaagcttctcttgggccacatttgacagggtttaggtcagagtcatgtgaggagtgtcccacgaggctggtctgtggcactttattgtgtgcatttgcaagacagcttggactagagtctcttcctgtgactgagacccacacctcccccaggccttgctgtcctgtcttttttccccacccagcttcttactctgggactgtagtcaggaggaagcctctgtctgcagacagtggtatgtctcctgagaacaactatgggaggccgaggcttcatgcctggaagaacaggtggcagtcaccaaatgtcatcatcctctctggctgcccaactggattgtcatactccaggggctcacaccagaacttgcacctgattcctcagaactctgcaggttgcaatgctgagagccagacgccagcaagcaagccagtttctttggcaactcctcggcctggcttgcaagtagcagctacaccctgtacgtctgcgtggtcttcccacttttatatcttctcttgtaagggctccagtcatattgcatgagggtcaccgtgtgcccttattttaatgccaccatttctttaatgaacctgaacccgtggcactgtgggttcagatttcaacaacacaccaatcaagaagggaacccatagagcccagagcactgactctggagctggggtctcactgtatccacagccccatgagacatctgaataacccaagagtgccatgccactcccctttcttacaaaaatacccatctcaccagcctctcttagagtcatgggctagtcagcactaggacctcagttcctggatgttgggatgttttctggaacattctccttagggactccaacattgacaagctggtgtccaatgtgcttcttaccaaaattgtctcctccggctggctacccagctcagttgaagcagacacagtcccagagaaccagaaatgtcacctgacctagtgacctaacctttagtctgggtatcccagcaggcggacgtcccctgtgggcatgtgtttccaagggttctgcagccagtcgtctctgcattaaatagatactggaaatggacggatgtcagagtttgtttcgcttcccataactccttaaaagcaattccctggtgacgccagtggagaagacaggatcctgggtctagacaggagcccctaggtttttttttttttttttttttttttttaaaagccttttattcacgtccctccgtccctcctgaaccagatcaacatggtatccagtctcctttgccctgagccctgcaagtcagctctgttgtccaggatccctcttctgggatcattatgtaagcacagctcttgtaactccctgcccagagacggtgttcctgggtggtcctccttgggtgggtctctgggcatagaaaccccaggccacatttcctcctgggctttgctgagccctgcaggtcctgcctggtgcagctcagctctagctaatttgggagattaagatcagagaccctgtggaagggccatgtttttaacaaggcagaaagcacaagctactcagaagtcaggcctactgtgcggaacacgccccaacacacacacacacacacacacacacacacacacacacacacacacacaccacaccctggctctggggacctctcccataaagatggtatcgcagggtgaggaaagagtcacccggctcccagcaggtttctagtcagagcttcactttcaattaccggcagcagctgtggaggccacttatgtaacgggctccgtgcctcctccttgggaggtggggaaccatttggtgtgtgctaaataatgagtcatggtcagagtgagggagcagagagagcagatttctcccttgtattgcttcatccaaacctctagtaaaaattggggagtgaatcagaactggcacgcttgccagagacaggaaagcaccgccgtggggacggagaggggggactgaagtggaggtcccctcagggatccccaagggctgctgaaggaggctttggggtgggaagcccagttgggcacttgatgaggagactcacatttgtcttgaactgtgtctgaccttccaagggctctctgtccccagaagcttcaggcctttgccaggcccagccagggtccgagagtcatggggtgaaaagacagcccgggaatgaatagaactaaccctaaaagggtgaagtgtgtctgagggcaggacacactaacgttaacaaagaagtcaaaaggtttggtttatcaagggttgggggagacatctgatgtccctattgtgaggtaaaataaaaacaaaaaagtagcacaagggcttgtctcctttcacgtttctgagaaatccagtcaagatacacagtttctgggccaccaagatagaggcaggtgaaaacacttgcccacacacctgatggcctgtgttcagtcctgcaggcctgtctcccaggtgattccacagcccgcccagttgatgtcattaactgtcacggtggaaggaaagtcagctctgtcctccagaggccctcggacaggcacgcacaccctaaggaacacaggtaaatatatcacttagaattatagatttatgtcagccaataattttttgtgactgccctgtcccccacaacaccatgcttttcaacatggatggcaccaagaagccagtgcccgtcctgtctccacaggaagccccagctgagcccctgggaatcaggagagccgccttgtgcagggcctcttatggaactggttagatcagtttcatgttgtggtagatgcagtctgtgttcagggccactgccctgacgaactgtgtggtacttaatattatcaggggacaagctctggagtcacctaggagacacagctctgggcgtgtctgtgtgagggagtttccagactgttaattgaaaaggaaagaccctccttaactgggcagccacatcccacagggaataaagaggagagagcaagagctgaacaggaggcacccatctctctctgcttcctgcagatgggatgtgtcaggctgcctcacactcctatggcctggactctgtcccccaactgtgagccacaatgaacctttcctccttaaatcacctttgtcaacgttctgtcccagcaatgagaggtaacaaagtagtaggaaaggttttattcagtgtgcaaacctctgagagctgagtccctcccagaagcagcatagccagaggtcaaaggtcaaagtgcctggataggatccctgctctgctacttatccccactgtatgggtcatgggacactgagagcctctcactaacagggcagtttgaagactgaggtaaaacttgtatttagagttggagttactattaacccttgtaatcataaccatcattttattcatttatggcctggaattcactctgtagaccaggttggccttgaggtcagaggttcatctggcctgtgcttcccaagtgctgggattaaaggcatgcaacaccactgtgcagccatcatcaccattatttaatgttagcgttaatttacgatattagcgacatctataaaaataacattagaacacagaaacgggtttttagaggtagcaaaagtgttcttcctcaccaagtgggaggccatatggtattagtgcacagattcaacaaaactgagtctgctaagctcagaaagcaaccagtgagtgtcaggaccacaactgccaactccgtgtggtgaatcagcacacacagaccctggagttctttctcccgtgtgtccaagtttcaacccctgcccaggtcacagatatttaccagtgccgatggcttgaaacatgagcaagaagtaccagccacagattctaacttgacacagacttctcaagccatctattctggtgttggttggaggaaagggaggagacaagagggaactgttcttagattctctactggtggctcttttagcttctgctgttgtgactgatttctgttaactgaccacagaagtagaggacgtgctcctcagaccggcccttcagccctttagcgctaggtggatgtgatatgcactgtagaaagagctccggcagctgcacacgtgacctaagcaccgccatggtcatcaccccgcacagcactcacctgtaggaagtgctccctgtgcactgtaggacttgatccatgctcaggtcttatcttatgactgtgccattggttcaccgctgtctccatctgaagactgggagaagcctgttctgtttgggaccccagagctgtgttacatgtagtctagggctggtcttgagagcactctctgaggtgtcctgtccctgctgtgggagtgaggtcggctactctccctgcactgttcatgtctgctgagctgccacggagggccttctgggtcagtgcccgagtccaggcagccagtcagcatctgtgaaggaacctggtgctgacaggatggaagggagtattgacatccctgggtgctcagtgtgtggatgtgaacttggcagagacattttagctgaccaggctaggggcttcctggtcctttgtgtgctgggctcctccaggaaggaccccttgcttgtaggtctcagggctgtcatttgagatgggcgaagccaatggcttcgacaaggttcttttcttgaaacagcgctgatttgtccagttttgtggcttttttatgtggaacagcattagatcatccaagcttgtggtttatttgaaaacgaaattccggtaaatctttcgcaccatctggccgtgcggtgattggctgtgagttaggaacaagccaccgagcacacaagaaaacaaagtgacagaaacccgccaggaacagagtggttcttgtaaaatctgtgcccagatcaacccacagggctctgaggatgggtctgaacccttgagcagggctgaagcctgtcactcctgaggtgggaatccattcctctcagcaccaggcccagcggaatgtctctgctcaagctccagccagagccttccattttctgagggcacacacaggctctggacaccaacacgaatgaccaggagagaagtcacagctaaacaccagtacttgaccctttggagtatgagaacaagatggatccagagtcccccgaggacacaggagatgccactctaacttagctgtctgtcatacccaccagctctttgctagtgtctgtgacatacacaacagattttcattcctgtgctggctgtgtggattgcactgtcccaggcataggagagacaagtgtggaccagatagatacggctgttgtgtttagagagttttatgtccagaatggcagacattttccaagctgtatcatttaaaataatttcaaactcaggaggtatcacgggtgcagaagcctgggttacccttggaatgggggagtggcagcctgaggcgcagccttggggtggcctggtggagaggagagcctgctgagatagtcccagagcactatgggatgaggtgggagagggagggggccacacccatgggctgtgtgaagctggtccccacagggaagaggcatggctcaactgggaagaaagtagattgtagataagcagagggagtagaagggacagtggtggcttgagaaggcacacaagaggaaaagcatcttaggtaaagtgtgaaaatgctgctgatgtgtttgatgtggcagaaaaaaatcagtcgtgaaataatgatgctccctggtcctcctgcctgagccactgggagggtggagattccagtggctgggagtagagagaccggagagcgtacatggtgttaaaacaaaggtttaagagcaggtgttcattgtgtgaagtttgagatgatctgatacttctaagtggaaacagaaagcatattttctagagttcagcagaaaaaaaaaaatgaacaaaagagtgatcagcatgaggctgatcactggaccaggagaagcaggcctctgactgagcagagggaaccagtgaatgccctgaatgcagaatgttaggggcttctcacaccctggcctgcaaggagactaggggagagcagacatgcggggtctaaccctggccctgctcttgccatgacctctagctgctatcaccccttccacaaagtgtaccccctcgactaccagtcatgaacaagtccggacaaagtctcaggccttggaaatcaaccctgagctgtttgcacaggaatcccagagccacagtcatctggaacatagtgtccaggggatcatttatgggttggtcaggcatgtcctaaagactgtggactcttcacttgcctggatgagggttagagcaggtgataccagagctggaacttttaaagcttgaggcatcagacaaggacctttgttgctaaacacaaggctagcatttgcacatgggacgtgtgtggggtgacggggctctgatatgaagctctcggaaaggacctgatttactcttcctgctgtcctgtggcttactcctgcttactcctgcagtgtcttccttgtggtcagcgtctagctctgcactgaccttgtcacaattggagtgagcaccctttttcagtttacctcagctcttgtcgagggaggaggagaaagtaaaaagcagggtgtaggagaaaggggaaatccatgacagatggactcctctgccaagttagccagaggcctgggcagctctgggctattcatggacgtttaacctcagagattggtttggcacaggttcagggacaagccatccctcaagccatgctttcatgggacattctacagagcagtggcgtgcagggacacgaaggacagcataatttctgtctgtctgtctgtctgtctgtctgtctgtctgttcctcttcttcctcttcctcttccccttctcccttcccttccttctcttctctttttcttcctccacctactcctcttcctccctcccctcctttcctgttcctccttttcctcttccttcttcttgttttcttcatagcaaccgtaatatccctgtagttaagcaaggccacccaagggctgtccagcggaggccaaggatccatgcactttgaccccaagggctaggagttagcaagagctggtctgaggtttaggattgccttctgcgcttggtgagtcaggagagagtgggaaaggaaacttatctcagttttttgtgagtgaggtcaccactggggaggcctgggaatctgagaatgagttgtccttgagtgtcctcagcagcccatccttccagacctggggactgctgactacgaaccaaagttctttatgcacagggcttgggcgtggttggcgagagtcaaggttgttctccaggcaaagcctgcattgtcttctcagagactcagagccagcagccctcctaccaagtccagcactggtccgcgctgtatgtgccattggaatagttaaacccatagcatctgtccacgtaaagcagacaaacacccgataccatggggctttggcatctgtgctacacaaacgtcctcctctgcctcttcttcctcctccacctactcctcttcctccctcccctcctttcctgttcctccttttcctcttccttcctcttgttttcttcatagcaaccataatatccctgtagttaagaaaaaaaaaaaaaagtatgcctgtcagggggaaggtctgtgagcgaggaatgaatcagcatgtcattccaaaccctactagtggcatattttgtggccttgggcaagtcacccaatctgtctgccacttccttccaaactgagaggcaacgctgaaaaggggccgggagaaatcatcagctcggtagaaagatttgaacaacttggttccatgtgcacaataatgacccctttctacctaggaggctttggcccctctccttggttcacttttggtactggatggatttgcaactaaatgggagctctcagcagcctctgcccgtggtccagcctctttctgatgcgactcaaagaggctttcagtagggcccaagtcaagacctctttgcagcaagtgttatgtgaaaaagaaatcaagctatacttctctacaaattaaggcagcaggaaatgtgtgtttttaaattgtggtcttgaacttcagaagttcatttacttcaaaagactggcctgcctctagggttctgctccgtgtgtcatgtatttaaagtgcctcatacgtgcttacggccagttatatgagcacgtggatgtctaaatcagagagaaaaggaaaccctgctggagttttattctgtaattgaatttagccagaatattcaagactgcaggtcagaaacccccaggcacatatgatgtttctggccattctcttttattctgactagattcaagctttgcttggattgagatgaaacccaaaatagaggctctgtgtgaaacactgggtgcagtctctgtgaggcactagtcctactgggtgcacacagggggagaaatgacaccaaacactgagcactgtggcatgagctgacagacccctagacagcatgaccatcatgctcacagatagctagatgctgaggttttctgtgcggacacaggaagtccataccattcatccattaatactctttgggatcagtttaccaggttaacttctaagcctacagaagagtcattggtggatgtgggtcccagagcagccacttcagaacaaagactagggatgttccagaagattctatgcaagctcatagacctcatccttcccttccaccatgaggtggaaggcctctgggcatacatcctttcttcataaacccagacgccatctctaagagaagcaggtacagagacaggtctccaaacagctatattagtgactttttttaaatcaccatgatcaaataactgacataagaaactcagaaaggagcgatgatgtggggtagtgttcttgttcactgtaaagatttgtcactcgtattggtttaataaaaagctgattggccagtagccaggcaggaagtataggtggaacgaccagactaggagaattctgggaagcagaaaggcagagatgcagtctccagccagacctaaaggaagcaagatgagaacaccttactgggaaaaggtaccaagccatgtggctaaacatagataagaattagaggtgaatttaagttgtaagagctccttagtaataagcctgagcaatgggccaaacagtttataattcatataagcctctgtgcatttatttgggactgaatggctataggacagaaacttccatctgcagagtgggtttactttgacttacagttccagaagatctagccgaccctggtggagaaggtgaggcagctgatgtggggctctctgtggtggtggcagatgtctgagatttctcccatgacactgaccaggaaacagatgtgatgggaagctgggccaagtcataaccctcaaggctcacccatagttctggaattcctagtgccagctaaggtcccacaattccccagtatactgacaccagccaaagagcctttgggggtattgcaagccccaagccactgacaacaaccagaagtttatgtcctggacagaacaacctccttaagagatggtttaaatggtgactctggaccaagcttattgtattgtctaaaagctaaaccaaatgccttttaattatgacattaaagaaaagccctttcttcagactaatttgaattatatgacatagtactgttaactgtaatgatgcattgattaaaaatgtaattttgctaaattaaagggaaacaaagctataagcagattctcaggacccatcccatacctagccagtcagtggattgtattttgcagattgacaggtgattcctatgcacattaaacatgagatgtgctggtctatggtccagaaccacggcttgaccctttccgttagttatcctgtgcatctagatatgcccagctaaagtctgtgtcttgacctcatttggataaaaataaagagaacacagaagagaagggtggggagcctccatccccacccccagtcaaggagccaggaaatctgagctgctcccgatgtcccttcacagggacctccgtcgacagctgttctgttgaggaagctcactcagtccatagggaagggggaggggccagttcagctacatctgccagggacgatagatgagaggctgccacatttgccactcatgaagctgtagatgctgagggagaccaattaggaaagagccctgaatcttcctggacagaatttgcaacatggaacataattgctttctcattcctgagcaaaatccctccatgatggaatggcttcatggccagcctccttcatcccaggagaagcaaggagggctctgattctcttgaaagccttctcaccctgagatcttccacttggcctcatgcaccctacggtggccaagaaggattctgctaagcacagcccagagcagccgattgtcacaggcatgctccaccacgggtgaacgccccactgtcataaactgcagaagcagctaattctgcagaatccaactctcctgggaatttgattgacaacatcccccccccaagtcagatacatcttttctttaaagtgcattgctttaaaagaagtttcaaaaacactcgagatcagatgtcttactctgtcccttcctttcaacagtgtggcaagagtgctggccagaggttgggagggcacacgctccaacaggaccctcctgggtagatggatgcctcgggatagtaatgaatctctctgcacctcagctcattggtggctcagtcatcaatacagtttcaaagaagccaaccccattctcctctctaagttttgtgagtttgagtacatatcattgctaatggagaggtctgtctcatcggtgagattttcagggcatctggctgctgtgggagggtgactaatcggtgctaagatcatctctctgtcctggatgatcgcatggtgcagagcaccctggaagcatgagagcaggccagaagtccctggtgtctccaaggatacaaagcccataaataaattgtggtgttgaggcacctaaataggaacagagcaggacatgaatttagctcccggagcacacccagtggcaaagataagctaacaggaaacccttccactgaccatgcctggaccatccccgcctggccacaaaagcacacggatttctttccccactactatctatgccaatagggtcggggtgataaccctggagcccctaattcaccttctgctggaaggggactcattctggtgtcactcacagactaacgcattgaccaagggtgctgtggacagaacagtgtcccctcgactctagatttgtgtgtgaagccctaaactcccacatggcagtatttggagaccttgagagagggctctaaggctaaatgagaccagaaaggaggctgtgacagtgttaaagggtgggcacacaggcagagagcatggggggtatgttgagagaaggctgatctctgtacaccaggagcaaagtcctcagaagaaagtgaattgcccgctctttgtcattagcttccagagcaccgagaaaacgcatttctactgttggaagcaccggtttgaagttttttcttttcttttcttttctttttccccagcagcactagtcaactaacacaggactgctctccaggccacagctgtcacagtcccatggggcagctagtgactagagctgagtcacttctgataggtggggtgggaaagggagagaaagtgaaggtccctgggccatctccagctgccagctcactttgaaggcggagaacagggctagcagatgggagtgagttgagtcccttctgcaggtgagtcacagggtatctgggcacacagcccactgtcagcgcacagccagcttctagcctctgagcgtcacatgagaaccatgtgagcttgggggcagctgctagaggaaggcatgctagactcatggcatctctgttgtctttgccctctgagtctctcccgaggttggctttttatagccatcctcaccatcaaagggtactggccgcaaggcttaccttactcctgctagtcacccatctctgcctctttgggggtgatggtgacttcatacctttcctgtggacactctttgttaaaaggggtcccacatttgtaagacccttagaacccttacctagtatcaaggcttcttgcttatgcacttgggtgaggcttgagacccctgccttgtagcccgaggactcttagatcacacagaaacacagccccttggatcatctgccatgttgttgggtgtgttccgggctgtcctttctccccactgcagaatgcctctgtcaggatgcttgcaccgggaacttattaagtaccaactcttctgggaaccagggaacctgatgcatgctgggcggaagacagcggctgtagtcttccatgggatgccttgggggcactgtgatcccttatccctttctagtccacactccaatgtcctcccagggaagaaaacagggttctttcttcattttctctctctgtctctgtctctctctctctgtctctctctcgctctccattcttctgtctctctcctctcgtttctcatgtgttttctagttgtgggtaaaactgtgacgtcagcaatgatttaccaaagcttatgtctgcacctcctgctgtccctttcctctgcttggctgagcaccacggcggcaggagtctggcctggcttcccagctcccagcatgggacacacacatgcttcgaagcgtgaggagcagtattaacctcttaggagatttccccacagcaaacgagacagtcacagagtgttatttctgtcgcttctcgccttcatctttcaccatttagaaccagccactttcagtgagcagggtgaaacagaaattcgagattcatctgtattatcttctgctagactgtcatgatgggagctgctcgttcgccatcctgaggaactgtgggaatcaagcatatggcagtgaagattttggaaccctagctcctgcatggtcacagggcttggctctttatacctcaggtttcagggagagaaccaacatttcccacacagtccatcactcctggcttctgattcagcgggccacagagcagtgcagctacatgcaaagggcaggaatgggtgcgttccagctcgctggggtttggaccggcagctctcatccccagagaagggaatctctgtggaggctgggctggcagcactcaagcttgccttgtggttggcacgtaggccatcagaaatcgtctgctggggccatcctgagggacagggatttattgctcatggaggaatgagagaagccatttccttctctccactttgcaggctccttttgtgtgcgggactgctattgccccaaccggttcaataccaacttatcatgcctacattcttccccaggagttcaggcctgtctctaccaggaacaggtgccaaattggagtatggaattttcccggcaggcctctgggactgctgctgccaaggcgactgtggtagggttggggaataactatcgaaccacagatctggagaggcaagaccaggccacccttttgggcttgaatcagctcaggtacaggctgtcccttgagaaacggctccccagtgccaaacccagatgaggactgtgagcaaggttggctctcactagacaactcttcagaagtaggccaagcaggccctgtaaggacaaaggagagaggcttttctgggaaggccacagcaggctctgcccagtaggagtagcaaaagccacatgatttctagggaagccccagacacctggattagagggtgtctgaagtgagatccagacctttgtgggtgccaggaagaagcagagctctgttctacacagaagtggtcctaaaattcaggacagcaagacagtgagcgataccctatagccaaggtcaaaagtccatgctggcctcagcagggaaagtgcttgccctgtatgcacaagggcctgagtccagtgtcccagaactcactctggaaaagttgggtgtggtggcacacacatgtaatccctggcatggggaggcagaaagaggtgactgcctggggctcacaatccagccagcctggattaactggtgagttccggccaatgaaagacccattctcaaacagtagtaacaacaaagaagaaccctaaggtgggctgcacccgcattctcctgattctatagtgcatgttcacccatacaaagcagccatcctccccaccttccctcacctctgtttctctccaagccaaatgaggagacacagagaagcaggtattgttctcttctctgaggtgtgggtatgtgcacacgagtgtgtgggttcccgtgccccgtacacccatgaggagtcatcccagaatagggcagggtttgcttttaattgtatcaccttgagatagggcctctcactaaaccagaaactcatatttttgcctatgctggctggtcactggccagcaagctctcagaattgaccgatcaccacctgtccaatgccagtgtgacagacacatggcaatcgcatctaggatttcccaaggccactggacattcgaactcatgtcattatacttgaagagcaagtgctgttacccacagggccaccccctccacagccccaaagaagcaagtcttttggagcctgcctgttagaaacagatcaacactgcatcgctatcggcagagcctgactctgcatccagtggaaggggcctcgcccacagacgacatggcaggcagcacacttggccggctgggagatttgtgactacatggctttcctctttctgggccctgaaatcttgactacagttctaagatcatttccaaggtcattggtgatgaggccatggagggaacatcagtcgtggggacagaaaagtatgctagcccctgctgtggctttgattagtgagggcattacttcatctggagacacgcacgtccactgcttctcttctttcttgtacatctttaaatgggattaaaagtgacttaaagcttgaaatttctcctagggtgaaaaccagagtccttggatctacaggtgtcacagcgttaaaccctctcctgcaggcagatgacaaggtaggtgttccttcctagtcaccctgggaagggttaacagtgacgtgataaccaaccattgcccttttatttattcactgttattatttccctgatggctaaagacgttgatccttgctttccttcacatgtctctcgcctcttctcccaagagctgttggctcacttgtcttcattggtgggactatttggagggttggggtgtgtaacattcggggttctttatatgcctacaattaacctcctgtcagatatatagttagcagagaattgtctgtaattctttaggctgtctcattactcctgagtatttccttttctgtagggaaggttttgaatgtcacacaaccccatgtgctggttctgcgagacttgagtcgctttctgaaagctgggacgtttccctgtgtatccatctgtggtttcagagttcagcatcttccagtgctagagttttgttcagaatgagagaggggggtctactttcccagtgttgtccattgaaggtcctgggctttttgttttggggtttttgtttgtttgtttttgctatccaatgtagttgtgcttttaacttttttgttgttttgagacagggtttcagccagtagctcagagtggtcttgaacttgtaacagaacccagccttttctcaagttctatgatccttgcaactgctttcccagtgctggggtgctttcccagctctggggtgcaggtgagcatggccactcccagctatgattctttccccaaatccaaatccaatttgtcaacactgtctgccaggcagtgggctccaagctcttcttcttttatctcaaatccagcattttggaggaattaagtgacaaaagtctatttggggccgggcgttggtggcacacacctttaatcccagcactggggattggaagttttagagggtccagatgcctggttcatctccctctgcatcttccttttgttctcatcacacattccccatcatgtgtggctctggttgggaggctggggctccatcctaagagacagttctatatatctgatgggaagatctctgctgcacgcagaaatggaaacggagaaattattggtctattgggctgtttgtaaagagcccctgagagcccaggggtcctgcaggaaattgggctgttacaaacacaaaacagaaagggcagaattcgggtctaaagaccctaacagagacccttatggaggagctgtctttagagagtataaaaagctgaaccaaagacatggatgaaaccgaatagactttttttctttttttttccgagacaggctttctctgtggctttggaggctgtcctggaactagctcttgtagaccaggctggtctcgaactcacagagatccacctgcctcttcctccccagtgctgggattaaaggcgtgtgccaccaacgcccggtcccaaatagacttttgtcacttaattcctccaaaatgctggatttgagataaaagaagaagagcttggagcccactgcctggcagacagtgttgacaaactggatttggatttgggcccattggcttcaatgctggaatattggcttcacggccacacatgttccccactttacacgtgtaagaaacatgtattcaacagaggctatactttcgactataaacagtgggggggggcagaatcttcaggatgtggcaggtagagacccagaaagaaaccagcaaaccagaaaagctgttagcatttgctgtcctgggccagtgctctgggcacatatctttgaagcctcagtactcagttgctgcttccagaagttgttaaccttgcagtggtaggacctcatggggtatagcccagcaccacttccagccccattcttcacttcctgattcttgagataggagcagatggttgcaagctccactggccagagagtaatagttgtaagtaatggttggacctgcaggcaaccatgaggagttgtcttaggattctctcactgaaacactatggtccaaaagcaacctggggggaaagggtttgtttcagctcacaattttcactgagggaagtcaagacaggaactcaaggcaggaacctggaagcaggaactgaagcagaggccctggaggagtgcggtttgctggcttgctcctacggctttctcagcctgcttttgtatacagtccataaccacctgcaagggtagtgctgcccattgtgacccgagttcttgcacattagtcaataaccaaaaggatactccccagacctacctacaggcccatcagatggaggcatttttctcagtgaaggttccctcttcccaggtatggctaggtttgtgtcaattgacaaaaacaaaacaaaaaacaataacaacacaaaacaaccaacacaggaggatttccaacagagcaatgacttgcgtttaagttgtgtttggaaagagcattatgctgcgttgttttgggcagactatgcaagtggatcaataaagcgggaacaccggtagggcagtctgctgactgtggtcacaggactaggatggcaggagtgttcaggaagaggagtggaaaattctggaacacacctcctcactttgttcacatgccttaggtgtcactccatctacccctttaactgtcatcttctcagagacctttcctggtctccaagcatgcacgttgatgagctggctgatggagagacttgctagttgtcagtaacagtttgtctgaagaacgcagggctggtcattcctagcaaatccccatctaactcatcaaatcatcaaaaaagcaaataacaagcaaacagatgtcccaacggaggtcagtgggccactgcacactgccacagtcagcagacagcctgggacctctgattacagcacttatgctaagcaactatctctttcagaccatattaaatgaccccagtgacatgctatgtggccattgccatgcaaatacagtttctccttctgttgattggggcctggaacagctctaattcacatgaggcagatgaccaagggcattgattgtataggtctagtgccacattgtcatgcctcctgacaagacaagagtgagggacaggagagttcaggattttctggggaatggcaccttgattcacacaatcaatggcatcgtgttgcttgaacaggctgcagcagatcaccgttactgtcagtttgactgggtttggcttcacataggagatacacctctgggcatgcctgtgaggtgttccagggggccttatttgaggagcagagacccaccctgaatgtgcggcagctttccctgagagagggagccaaggagaagtttgtcagagctatgtgatctggagcatgccacaatccacattgcagtaaaagacacacacctttgcatttcgcatatcccacccaggaaagcagcacacggccttcgagacagcccagcaggaaaaggtgcacgctaggcaaacccggagacctgagcttggttcctggaaccaaggtaaaggagaataccaactttacacagcatgtgtgtaccataatacacaccatgggcatacaggcgtgagggcacgcatgttcgctcacactccagtaacagtaaatgaaaataaggataaaaaagtgaaagtagtattaacaactagtttctcaggaagcacatttcgcccacactggagaattctggtgtaaccaatttagtggctattatggggcttttagctctaagaagggctcagagcaaggaagggctatctatgtaccaggacacaggcttcccttctgttcagacagtatgactcagaagactctttgacatgagagacagctctgataagaagagatgtcagtagctatttgaatagtcagatggtcacagaagaaccccctgccacatgcagcagagacacgcacacaccattcaaacaccagtgctgtgaaccccgctggactgagcggggagatggaacaggagtgatccagtggccaaagctggttttctaagcccagggtccaggcagaatgactcaacaaaacacacagtctgttgatctagtcacacactgctgtgagatggaagccctaaaggaaggctggaggcacacaagaaagtcacagagctggtgactggggccctcacgtcgccactgctgtctggctgtgccctgcccctctgttgtctgtgcctctgactacttgagagtcccttaggatgcagtgacagagaccaagaatggggccgagtgtcatcaaaatggagctggcccagtatatgacaaaagccaaaagtagatggctgccgcataactctgagggcaccccaccccacacaaaccccaacaagagaattcagtcatgaggctgggagatggcttggtgtgcaaagcacctactgtgttagtgtggggcccaagttggaagagtttgaatccccagaacccacacaaagccaagcatggaagctcatgcccattatcacagggttcctagggtgggatggaaggtagaaacagcagaacttccagaagccaaggcccacaagcttggggtacacagcagctgataaagagaccctgttccaaacaaggtggaaggcaaggacaaacacccaggttgccctctcacctctacacacatgtggtggcgtgtacacacctgcatttgcatacacacaacaaccttgaacccagtacgcactgaaatactttcaacgggcagaactttggggagggtggaggctgaccctggacaaccatttcatggagagaaggaagcagtgtgttataagaacatatgggcttaaggacagtgaaaaatggtgtggctctttggtcatgggcctgggtaaaagaaagagtggacttctgggaaagaaacgcaggacttcacggaactgaacacaaggtgtgaaaatgttcatacccatgttcttacctaccagacagcataaacaacataagtacccagaatgccttagctggttggcattagcacacttctgtgtggtcagaccaatgttggcacaatgaacatatatgtgtaaaacttaagcatttatgcagtgtgacagagactactcatgacctcactagcatgggctaccactcaccaagtgtgatttatatcttcccgaagcttaatgtccaatctaccagccacaggcaccaatgtcaagaccctaatataaccctacctcacaaggtcagctatgtgatagaaagctaccaacactgggtcccttccccctgaaaggattcttggaggaaggtatgtctttattccctgcagggccttgacctgcaccactatgtaaagattcatggtgttttaggatcttgtaaaacgatgtgttgggccaggaaactcaaatgacctcgttttgagaacctagaagtgcaagtcttaggttctactccagatatgctgaatggaactttgaggcagacccaaacagtactgtttcaggtgatcctagaggacactagtgttaggggaatcacttgcttaacacggaaggagatgctgcacgtagtgggcacatgggcagggtgtcacacagtgtgccagcaagaagcaccagcctgtcagtgatggagtggtgttttatgggagtgacactacccagcacagacaggagactgtcctgtaggatacagagcacaactgctctcagtcaggagtccaggagagatttaagccatacagagagtgtttggggtgactatgacctccatcctcccaagactgaccgatagcttgactccaagggggatagatactaagatcactactacagtggataccttaaactttcatttcctcagagagacctccttggcaatggctgccatcggtcagtgagcactgaggaataaatgggtttgggcagccaggggtgggcatgccggggaccttgataaccaggacttcccatgactcacttgggaaagatgtgtttctagtcctacagcttggggctctgggaggctgggttccagcaaagaggagtaaaaccagtgagaaacattctgtctggagagaaatgtaagaggatgaaagaaagtttagagtgatgactatgtaaccaacaccaggagcaacacaggtatccaaacccagtaggatggacattctagacaagtgaaaaccccatttcagtcagtggaaagccaactcctggagcgacgagctgttggtaacaggcagtgccgtgagcccttctgtggtcctcgttttaaggcatgtctactcaccatccttctgcattctcccacaacagactgtagcatggaagacaggagaatcaggaccctagtgggctggagaggaagatgaggaagacagagaggactgggggtcgagatgcttgggaattgtttcagggatggaacttgacctgaggagtggaggggcaagatggaggaggaggctgggtagtgcagactttaaaaacacacacacactaaacgtgtagaagaagatgcaacatgctcagaaactacgcatctgtgcagaaatgtgaacagcacaggcacatgtctgagaggttttaagaagcacgtgagaggccaaaaggcagaatggattctttgctgacctaaatctcaagcaagctagaagctcagtccaaccaggagggcatccacggggagtcccatttggctaaaagtagagcagccgacaaattcttgtcttaccctagcgacagaatcatcaatcagtgcaggggagatggaggggtttctgctttcagtgggaagaaaatctttgtggaagtgaaattggtgggaattgagagagaaaattgcttgattcccttaactgccctaaatgagttgcattttctgtggttcatgagatctgaacccattattagtggattttgtgaagttttgaaaaataaaattggcaatagacaaaaggacttcacaaaggaaggtagagtttatgctggaatgaaagactcccagagaacaggactagcagatgaaaagacaagaaattagtcaaccagctatgtttctggaagcagaggtgagaagtccgcagaggaaagtgtattatcaatctaatatggcccctcggagctcttccacagcagcctggccccaaaccaacttttaagcagtgtatttcactcacatgagtatttatactctatttctagttactagagcttttacattaacctgatggtttttattagttaatttccttattgatatcatggacaagaagcaaccccgggtgggtggccttattcaggctcataatttgagggatcatgacaacatgaagtggctagtcacactgcatccacagtaagggagcagagagagagatcctgaggcttccctgggtttctcctccctgatctttgcccaatcccgatccatgggatgcaaatgttccatctcagtggaccctctctgaaaacactcagagaaatgttcaaatggcttatatgtttcacagtccaatcgaggtgacaattgaaagttgccatcatgcagctgaagaaacaggttaggcaaagtcattggcttgctcaaagccacatagacaaagccacacagaattgaatcaaaatcaaccccagtcagtatgcctctctgaaaagcatttggtaacattactagcttttgaaaaccgcttaaacacaagtgcgtacacgtatgtgttcatgtgtgtgcacctgcatgcgtgtgtgtgtgtgtgtgtgtgtgtgcgcgcacacgcgcacttgtatgtgtgtgtgcatgcaagcatgaagattggcgttactggatgagctatctccttagacctgtatatttaatttggagaaacggtggcattcttgccttcattagataaagtcactgtgtcttcaaatctccgtctgtataagaagacgctgtcccccagacgccaccaatcataggcccccctgacttgtaatttctgctgaagaacttgatgtttcctttgttcgttggcctgtgagcctgtgattttgtgggatttgagcacgatgtcatgttgcttatttatttactcatctttctaccaggctgtctgaaactttgattctgattggtctttctgacctcacccacagtcccctggggctggcttgatcacgtggtgctctggcactgctgtctgggtctttcttttctttcctgagtctctgacagaggcagaaaagcactcaggaaagtagtgggctcccttgctgagaaatgtgaacacagtgttcatgcaagacaagagacaagagccaggtcatgtgacaaaccacatggcagcgaatcttcagaagagatgagaacacgccaagactagagtcctgaatgtgaaactagaaagacaagatggaaatgcaggcaggtcgagaagaagggtcagaggtgagaggtcagagcggtctgttcatttcaaatagccattgatgttcaaaacctctgccctgccgtgtgtgtgtgtgtgtgtgtgtgtgtgtgtgtgtgtgtgtgtgtgtgtgtgagtgtgtgtgtgtcttttgtgtctacctctctgtgtgtttatttgcacgtgtctttttgtatgtgtatgtttgtttgtctgtctctgtgtatgtctgtgtgtgtgtacctatatgtctgtttctctttgtgtttgtgtctctatttgtgtgtacgagagagagagagagatcaggttgcaagagaattatttttgtagtgaatggatatgtctctaatactcagatactcagacaaggacagataattttcttgtttagaattctttattgtatggcccttgcaatgcctcagcagctaaaggcattctccacatgagcctggtcacctgactttcatacctggaacccacataaaagaataatagaactgactccacagagatgccctttggcctccacatgtgtgtcatgccatgtgcacccacccataaataacatataaataataatcaataaataacattaactaaaaaagttaaccttaaaaacaataaatcaaactgaaaacaacaactaacaccccaaccttctcagggtatcttattgcctaagtaggaaccacccaggtgttttaatgtgattccaggtcctctgttctacgctctgacctctgaccttccctccacagctttgcattctctatgcgactattgctttccaaactcccgccatatctggcttttgcttggaatgcttttctctgttctctgtgaccgtgcggattttcatccttgagtctccagagctgtcctgaccactcttgcctcatgtgaacccttcccattttgaactctcacagtaattattatctgcccacgtatttggcagatggtcatcgtctccttgagagtctactggaaaccaatcctccacccagctggcttatgcaatgaggaaatttattatctcatgtagcaggaagtcctgagtcagggcaggctccagcaaagatctggggacttgaaaaactccttggaaagccatgtttacccagttgtcatccagcatctgctttctcatggtcctaaggtgaccaccaaaagccagtttcccctttgtctgtctgtacctagcagccagagactgagaattcaggccccaggcagtgagcactggaccataacagtgacaaaggggacccacagtgctcctgtggagagggccttccctttctctttcacccaacaggagagctggggtctggtaggcatcacgagggaggagatgagtgttgcagggtcatatgttgccctgaaatagttatctgttatcttacctagctgtttgtcatcctctccatttcttttcccttcgggtcagttgcaaaaccttgtatggtgcttacattttgtaagtgacatgtgattttcttatagttatgtcaggaactgatcattggatggatttggtgtttataaggttcagtgacattctttatgcgcatgcatgtgtgtatgctcgtgtgtgtgtgtgtgtgtgtgtgtgtgtgtgtgtgtgtgtgtgtgtaagtgtgtgcatgtatgtatatgtgcaggtgcacatgtgtgaacatacttgtgcaggtcaaaagtcaatttcaggtgttgttccttaagcaccatccacgtgtttttttatttttatttatttatttttaaatttttgcaacagggtctctccctggctttgaactctgtgggtaggtgaggctacctgacgagtgaaccccaggaatcccctgtgtccacctctttagtgcttgtattacaaaccaacaccaccatgtccatttgggttctgttttgaatgggttcttgggtttgagctcaggtcctcatgcttggcaagcgctcctccaacttagccttctccccaggcctccatgaccaggactacaaagtgcacttaaggcttttgaggttcagggattaacttaaaaagatgaaaccccaggaagtcaaagatctggaacctgagaccacatgctccttgatcctgggtttactcagctccgggaactacacagtattagcatcacatgccagtcagacgcccaaggtcaaggaggcggagattctgtcctatgctgcttccaccctcgagacttgaatatgtctccttgctcaaacctgtatccattatactatgttcctcccagggaaggtgatcatagtacacaaaattagtgcttaagatactcattcacacctgggattagtagctcacgtctgtaatagtaacacttggaaggcagaggcagaaggattgggagttcaaggtcaccctcaactacatagctagttcagagtcagtctgggctatgtaagatcctgtttcaaaacaaacaaaaccaagcaagatattcattcattcattcattcattcattcattcattcattcatcaacaaacttctgtcttgaatgcctatcaccaaactgtgctagggagtaaatacatagtgaataagaaatgattcttcaggctggagagatggctcagaggttaagagcactaactgctcttccagaggtcctgagttcaattcccagcaaccacatggtggcttacagccatctataatgatatctggtgccctcttccagcctgcaggcatacatgcaggcagaacattgtatacataataaataaataaataaataaatactttaaataaaaaaaagaatgattcttgcacccaagttgcccaccgatggacatgcagtaacttcctcttctttagtaataacctgtctctgtgaggttgtggggacagacgcctcactgtcgtctgccttgaacttggtgcttttgtgtagacatcgagctgatctgggtgatcggaaggggcagtctgtacccactgtgttcagtgcttgccctcaggtggcactgagctcaactgaaaaatctctaagataggattcatactagtggtgtgctgtgcacactgtgaaagccgtcccctacatgtaaggctccttctgacagctgtggctgggaaatgtcatctgctaaagcatagtaaaatgagctgaggtagtggttaaaagtttctgaatgagtcaggcctctggtgctaaatttattaatgaatcatgttcctcgcctagcagacactgtggcagaaagtgaaagaggaagaggcccttctatgtctgtttttaacaatgtgttctgaccctccatctgccggggcaaattccaacatgtcttagcaatttaaaacaatacttgtcactgaaacatggacccgtctcccagccttcagaagagtaaatgaggtcttttctctaagaatagagtctaattttcatcttcgcccacaggtttcagagtctaaattcctactgaccaagctgtggcctctggtgccttggtttttgtagaacttcaagtctcatctctataggagtcaccaaaaccttcttggacagtagtcatctccacttgtttcttgccttacacttttattccagccttcattgttattctgtgttggcttcccattccatagctctgttctggctctctttataggccatttcctgggagagatctcaactgggccctttcctagtcatcctgcgacttcctcttccgctgaggcttctgcacatgaataagaattgcaagttcctccacctttataccgtcttaaattgcatcattcctcttagcagctgctcactggaactgtgtggggtccttggtcagccgtgacatcaccgccccaccatccttgatgtttctgctctcctgtcaaccccaaaaccnnnnnnnnnnnnnnnnnnnnnnnnnnnnnnnnnnnnnnnnnnnnnnnnnnnnnnnnnnaggataaagactcaaagtttgatggcattggctttctacaaatttaccctgatctgcagggtggtatggagattgtcacgcctgcaaacatttctcctggatggcatttctaaatactccatatcccttaaaactctatccatacaatacatgggctttggaaattcatttgtcttcttgattcatacaaaatattaaggctaatctaaactgccttctcccccctcttcctttttcccttcctctgtacgtgtgcttttagctattcatataccttggcatatctatcatctatctgtctatctatcatctatctgtctatcatctatctattatttattatgtatctatcatatatctctttatcatccagctataaatcatgtatttatctattatctatcatctatgtataatttatctgtctaccatgccacttagtatatgtatatagctgtaatctgtccacctattatgtatacatcatgtatctatcttatctacctacaacctatctattatcaatatctatctatctatctatctgtcatctgtctatcatctacttacctatcatcatcctaccatctatttgccatatatctttcatctatctatatatctatcatgtagctatcaatcatctatctatcatctaactagctacctagctagctgtcatctgtcaatctatcatctaccaattaatttatcaacctaactctaatctatattgaagtgaaatagaatgtttgtttaactatgtaaagatgtgttgttgtttcaccatgcctgccaaaggcacatgattggtctaataaaaagttgaatggccaatagctaggcagtggagggataggcagggctggcaggcagagagaataagtaggaggaagaatccaggcttgggagagaagagaataaggaagaaaaagagaagacacccaggggccagccagccagacacagaggaagcaggaaagaagaacatacagaatgaaagagaggtaaaaatccccgaggcaaaatgtagaagaagataaataggttaaattaagttataaaagctagcaagaaacaagcataaaataaggccaggcattcataattaataaatcttcatgtcatgattcgggggctggtggtccaagaaagccagccatactgaatatctctcatctaccaatcatctatttataacctatcatctgtctatcatgtatctatcatatctctagctacctagcatgtatgtatcatgcatctgtctacaatctatcttgctgttgtgtatctatcatctgtctatcatctacctatctatctactatctacctatctatctaccatctatctatctactatctatcatctatctatctatctatctatctatctatctatctgtctattatctatctatctactatctatcatgtatctatttactacctatcatctatctgtctatctgtctattatctacctatctgctatctatcatgtatctgtcatctatctatctaacatctatctatttattgtctatctctatctatctaccatctatcatctatttactatcacctatctatctatctatctatttactatcatctatctatctaacatctatctattttctatcatctatctatctatcatctatctatctatttactatctatctactatctacttactatttactatctatcatctatctatcatctatctatctactatctatctgtctatttactatctatcatctatctgtctatttactatctatcatctatctatctatttactatcatctatctatctaacatctatctatttactatctatctatctatctatctatttactatctatttactatctatctatctatctacttactatttactatctatcatctatctatcatctatctatctactatctatctatctatttactatctatcatctatcatctatctatctactatctatctatcatctatctatctatttactatctatctactatctatctatcatctatctatctatttactatctatctactatctatctatctactatctatctatttactatctatctatctatctatctactatctatctatctatttactatctatcatctatctatctatttactatctatcatctatctatctatcatctatctatctatctatctatctactatctgtctatttactatctatctactatctatctactatctgtctatttactatctatcatctatctatctatctatctatctactatctgtctatttactatctatcatctatctatctatctatctatctatctatttactatctatcatctatctctccatacttgtgtccattcatcttgctatcatttgtcatgatgcatctatcaagcttcagttgaagagatgattggacgcccagttgtggacagtgtgatcagccaacagctcccagatttcatcttattccttcgatgtagagggttatcttgcctgcatcttacaagagtgcctatgtccatgactgaaggaggaacttctagaatcctgagcttcaggcagctgcaaggtgactgccagcactcttgacctcccgacccccatcagctttctttgtctaactcaagtcttcatccatctttagaggagcctccttgataatgaatagaacatatcacaaatttgtcttagtgtctccttccagagacacccaccttggagcgtttgcacaagatggtagaagcctgtttcaccactggctggaaagggagatgacagatagatggcccctagcagaggacactagttttgtggttagacattcaccagtaggaacagacggcaaggtgtgctggtggaaggtgctgggttggagggcgtgctgcatccagccactgaggcacacagagggaatcatagctctctaggcaatagcagtctgacatttaacaactcctgctgacggtcattcacgtgctctgtgggaaggcgacagacagctgggaggacagtggaaaggtgaatctcacagccagagggttccttgtttgtacacagtctcatctgcaagtaaggaaaggttctcagtccaggtcatctgagtgacgtcaaagacggctaactgctcaggacatgcagacctcttatggtcttggttggggacacctggggcccaaacaattaggatgcagatattttgatctgtgtacttgcagtattataactctcttgttaatttacctatctaattttctcccggcattactaattattgcctctttctcatctgtcccttccctcccaatcaacctaggaaaaactgcccacaaggagaaaactgctctcactgtgagttcaggagggtctttccatggctgtcgaggattattgactccacagggtccgtactttcccctttgctatgagttcccagggaggtgtatcccagcctgtctgctctgcttgacctcttctcctcagcccttcagctgctgtttcctcacctgctgtactgccattccatgtgactttactgcaaagcgagtacacagctgcttcatgggttgttgcatgaatctgaaatggcctgcaagctcatgcttcagacacttggtcccccaccgtggtacactttggggatgtcctggcaactttagcaggtgggatataactgaaagtcacaggggtatattatctctgcccccccattccctaatttgtcagctgagttggtccacaggtcttccctcccacaatggcctaagccttgtgatacccaggaacccaaaatagtctctccttttgttagtgtgtccctcactgcgacgcaaaggtgacgggtacatgcgtatgtttctcctctgacatcctaaagttggacccatcaaatgaagcccctgttaatctcatccccacagcactctggagaagagttcacctactcaccaagccacagtccctcagacccaatggtacaagatctgcagcaggccatttccaagttggaggcccagctagctcagttggtagagcatgagactcttaatctcagggtcgtgggttcatgacccacgttgtgcaccatttgtaaagataactctttttgccagccacctgagttctgcccaccacagattgatctgtaaagaactgacagccttgtgcctcttgctacttgacagcattcttggggaggagggggtccaggctgtgagtttgtgctgcaaagactttcaattttacagtgtgtttgcggactggtcaagtgaatgtgaataactagtagtgtaaagataggcctctctcacctgtaattaagtcagccatagaaagacaggctgggatgctttgataagaggagagagtcggggtcacatgacaagcaatgttcagctcagcagagtaatcattgctgaaattctgtgttaggtatctatcctttcccccccaattcctcacagctagatgtacttctctatcccgaggctgcgggaaatacattaaaaatattatactactacttttaagtttaagaacattcaggctagctggagatgtcagagtctggtgtagggttcggtgtgacgtttaccactttctaccagaaaaagcgactcatgagtgctttatctccacagcaacagccttggacaagcactaaactgagacatagagacccccaaaccttgagtttttttcccttctcaggcttcagtctttccccttgacatcgtctaactgctgagtggtgaagctgggaactcattctgtgacagccccagcaccaattcccctgttctgttcacagattttataagctgccttcctgcctgcctgcctgtctgtctgtctgtctgtctgtctgtctctttcctaattcagggtcttaagtagccaggctgtcctgaaactcactgagtggttgagaaggaccttgaacttctgttcctccttccttcatttccctagtgcagggattacaggcatgagacaccacacccagataatttgagagagagagagagagagagagagagagagagagagagagactaccccaggctcttctggaatgtatgtagaccaacttgacctacaactcacagtggtcctcttatgtcaccctcccaagggctgggatggtaggtatgagccactacactaggctgtccatttttccccagggactctggaaacactcagggtctgtaccaatcactttggcccctagtccctacttgatgcccacagggctctctcactgaagagagtaggcactggtttcagaaatatctacagtattcagcagaatgccagagtgctgttgtgacttgaaaaatctgttgaaacaataaatgattttagacatgggccaaaggtgaggaaggtgtcaactctgtggctggcaccaagcttcctgctcatcagcatctctcagttcatactctccctcgggtcatgcggcccacacgacccacccttgctccccagtgtgaaacctacacaagaggtcaagtcccacccagaagctacagaacactttggggaatgccatctgcctttgctagttccttctttctttggtataaccttcctatgctaaaaaaatgacccctctggcacatttctattgccatccttgttaaatatcaagaaagactaaaactgatcatgaattaggcaccagtggactgtggtccacttaatataatactctggtttaaatagctgccttctcaaaaataaaatagacagtaaattgaaaccttggccatccaaagcagactttctggttattataatcactagctctctctctctctctctctctctctctctctctctctctctctctctcacacacacacacacacacacacacacacacacacacacacactggaaacatttaatgaagggccttacattatctacccagggtaaataatcactagattacaataaccagaaagattagcatctaggcttgaaaaggaaatagcaaataacatccccccaacccattcaagcccaggcatccagcaccaagggttcagggtgccaatgacagtggattagacgtccctccattatctatcttcatctgtctgtgcatttgcaaagccatgcgaacaactatgcttttcatttttccaacaatgaattcaaggacctatcttttgaaaccaagactcaattatgcttccaagtaatagcaacaaaattatttactctttcaaaaccttgtcaacctacagcctgactgtgtgtgggaagcaccctgcagcaaattgagggcccagtttcattctgtcaagaagtcagcaggtaagagaaaaatattagtagagacttccagaatatccacacatccaaaatccagactgtatgtgcagaacaacagatattcagcatgtgggctgaattcccaccatagaggtgtggttattgagtcctccaacacttcactgaacccagagccattgccttaggaatagctattttagctgggtatggtagcacacacttgggggtctgtggcaagaggattgctgtgagtttaaagccatcccaggctataccatggtagttctagaccagcctgggctacgtgtttcctatcttgaacagacaaaaacaaaacaaaccaatcaactgttttgtagttagggcttatgtttgtctttgttctctgctctttgctgtttatgacatgaaaacaactgtaaactcaaagctatttagagccttaacaacaaatagacacctatgtgacccatcttgcacacaaatactaattttattcactgtaaaacaaaaatgtataaattaaattttgtgaaattaaaagcattttcttttcaaagacgaaaaccaaaagcagtgatactagggacaaactgaaaacacaatatatcatcatttcctgagtgtgaaaaaaaaatcaaagctcagccatgagccacaagccacaaataaaagcaaaatgcacacaactgctcatacaaggagagctgtgcatgggcactaagatgttcaacctagttattccaggggaaaatggaagctaaagctgcaacaatgtctcctacacactagaattgtgacaaatgaaaggactagaaattcttcttttggtgagactgtggaataaatggccctcttgtcagtcgaagatcaaaatggtacagcaactttggaaatcagttggcagattcttagatattaaatcacctcatagaaccagaaaaaaaggcaatgaagcccagaattagcagatggaaagaaatggcaaacatgaaaacagaaataagcacagagaacagaaaacagaaaagaaatgaaattgagttgatgtgggttcagttcttagcacctgtactgtggctcacaaccatccataaggagttctagggaataagatgccctcttctgaccttcttgggcaccaacaacacacgtggtctgcaaacacaaatgcacacaaacatgtaaaataaaaaatctatacattttaaagattacaaatgattttatgagtatgtatgttgctctcagaagccagaagatggcatgagctgccctgtggctggagttacagcatttgtgagcttcctaacatgggtgcagggaaccatacccaggtctttggtgagagtatcaagtactgacttgtgaaccatctctctggcccagccaatgaattcttcataaatgataaaccagcttattaataactgatgagctaagaaaaaatgaaagaggaaatagtcaatgatgccatagaaatagcatgggtgatataaatactgtgaccagtacactgcagattgaaaaactcagaatgcatcaattcctggagacatagcctacgcagaccactgcatgaagaactggagatgcccagcatgcctcttgccagtcaaaccctcaccagacaccgcccaacaaatgaaagcctcattgctgaattctaccacacacttgaactactgtgacaatacttctcaaagtcttccctaagaatggacgagaagggaatgcttccagactccttttgtaagatcagcattatcctgatatccatactgcatgaagatgacataagaaagaagaccgaaggctaatattcttaaatcctcttgtatactgtgactacagaacgccccccccccccatgcaaggatgggtcaatacatgtatttacagcctggtttcttgccctgccctaatctccctccattcacgtctaaattcttccaacccaagagtttatctttgtccccaaagttctccctcgggaacacgtgagtccagatgtccctttctccttcccagtgtctcttattcatcacatcctctgaagactcctcagtcctctcactgatgacaggatgggtcacgagtcactcaccatgtctgacagtgatatctgtacactgctctcaagtccactgacctgcagtgtgtcccaggacaaatggctgccatctttgctttcctctgagtccagcgaaactgttgaggtccttgcagaagcccagtgcaatgccatccctctcccatcccagtgccacccgcaatcaaattccctttacatccttcagctaaaaccaaaagttttctcttaaaataaacactgaacagaattcctggctcccaaactccaggaagttttgccacactgtgtgtgtttcacaggcaactgaaagctggcattctgcacatacgccccgtcccctagggtgacaatgtggcttagtttgtagctcatctgtgaatgcctgacagagatataactaacattgcccttctagggagagactcaggagtcacctctgttctgagaggccagatgggtgcccttctacttcctcttgagtatgtgaagtccccttgtgccctgcggggacactgggaaagatttatgggtttcagtcagtcactgtgcaggaggcgtggaggagttcacagcccagagcacgcacaaggcagaggcttctcactaaccctgtggtagaccaggaatagagagcaaggctggatacagccagcctacaactttcaaaggcttgacgctggtgctctccttcctccaataagacttcacttctccaagttctcacgtgctccccaaatagcgccaccaactggggaatcaagtgttcagacacacgtacctgtgagggcatttcacatccaaaccataataaaagcacaaagtccttgaagaactttgacccagagagtgtctgaggacctcaaagctatggaaacacagccacattgggattagctacccttgatcccatgccggtctcctcatattggtgggtcacgtgattcacctcattatgaagtgaacaagaagccctaaggggtggtcagtcttcattctccagaactgtttacagtggtcagggcattctgagtgacaatgagtcacatccaccaaaactcgttcaccggctcagctgggagtcctgtctctgggtctcggagttctagacggacacctggacgtgtgcaccccaaagtttctctgcaaactctgcctttcaggaagctcttggagcgcacagggtttgagcacaagtcgctctctaaatggttccaacagggaaaaagaaggcagagcactgagtggtacggttagcagagtcacaaggttaaaccacgtgtcgcaaatcctccgcatccacacgctcaaatgtaatcagcctcttctaattacggggaatattgggcctcagggaagtgagtgctcttggccttgtgatcccagcgaggttcaggagcccagtgggtttggctgagtcaccaccgactacaagaccccacacatcacctgaccaccacatgctccagctagcccagctgtagaagtgagtaaacacagcccggaaggacctggggtgcaagtgctgacctcggctcatgctgcgcgtggagtttctgggggcacagatcagctctaccagcgcggctgagggatcctaggacaggccgccgagcagtcttaactctaaaccacctttggaaaagagccagcttcacattctttgggttgcagtacagcttgggaaaatttaaagtcttaaaaatgtcagtatagcttgatcacatgatttcatttgtatgatttttttctccttgggaaaccatcagtggcacactgatgtttacatgcagtcatgctcacccgggtgacctcgatagtgagcactgaggtggtctaagtggtacatgggtggccgttattctccagaccatggcacgtatatatgttaagatgctgtgtggccttgagggaaaacaaaatggcaaaggacagatttgatgacctgggattttgcccggtagaatagtaagtaggaaaaagtattcaaaatttgttagcatgatccagctcatttaaaactattttctcccacacatatagatgaaaaaacgggaggagacaaaatgtgcagtaaacaggtgcttaatctctgggttttcagttcctaagtttttttccagtttcttacaaagaacctgtgttgttttttttccccctagaaattaattttgcaaggcccacagtgtctgtgcttggcctgcctgctgtagactggccagcctgcagcacacctacagagcccggggacacagtggcacatctgtgaactgaagcctgagcaactccaggcctggaggctgtcccgcatgagaatggagaggggttttttaattttatttttttgaggaggaggctgagcctgaagaatggtgcctctgtgggtggcttcttagattctcctttgcacgtggcctccagcctgactcctgtaattctggctggctgacagcaagcttgccaaaacagccggctccccggcatctgatgatggctccgtggcatccgggtagtctatgaagcaatacctgattcggaaggaatgcagagccagagatggtttgaacctgtgttccacgtggttgaacgtttgattctccaccaggtggcgctatttggggaggctctggacccttgagaagatagagtggagtgggagcgggaggaagtgggtcatttagagtaggcctttgaaggtcagcctgggtgccagtccagtccagtcctgtactttctggtctatcgagatgatttgtgctgagcctcaaccgcatacctacactgtgaactcctctgtgtctgaccaaagggtgagaaaagcttactggggactgtgccggttaacattactgtcaacttgacccagcctagagtcatcttcaagaggaacagcctagatcagattggcctgcaagcatgtctgttcgacagtgttggcccctacttgctgcaggcgggggcccaacccagtgggccacagcattccctgggcaggtggtcctagtttggataagaaagccagctaaaagtgagtctgcaaaagagccagcaagaagccttcctccaaggtttctgctccaagttccttctggagttcctgccctgagttctctggactgtgatggttaaggtaaagtaactccctccattccttgggttgtttttgcagtgtttttttatcatagcaacaggaaggagaccaagacaacagggaaacccctctttctatagcagacctcttggagatgaaagcagtccctgtcatgccctccccaaggctccatcctggaaagaaaacgggttgtttgtgagaggaagaaaactcagctcacaccaatagtggctttatgactgaagggaccagccctctgttttagcagccatgacaggctaacatgtgcatcatccaagcctgggagcacaccaatcctgagactgtgcgtacccctagacactccccttacgctgccctataagacccctacctggtggtttcttgggggtctttctccagccatcctgcacggtggatggatgaagggcctgagctaatggggttaggtcattaaacagcagcaataaaggactctctgcttttgcgtcaaaatgggcctcttggtgatgttggggttcagaatttgggcaaacatgatgatatctttcaaagagagcacagccactcccaaggggcagagacagctgatctcaaccttcccgtctgcttagagatgtagcatgctgttggtgcctggtgcctggtgcctggtgcctggtgcctgctccctgctccctgctccctgctcccgctgagtagaagatgctgaaggtggcccagagcccctcatcagccggaaggccggcttggggaacagtctggagtatttttaactcttagagaataagatgcaatgtggaagcggggtgatagctcccattcacagaagagaaatcactccatcatcggttttcttgaatatcgacttcatatctggtactctgttggggtgcagaggaaacttcagagacttgaacagcccttgccctcgaaaccttgatgttctgttgggaatgagaaagtttggaatgtgctgggtgacattccagttgctgtgaagggaaccccagctgcgtaaaggcagagaatgagatgtttgatgtggagcagcaaggggctcttcctctgctgaagggttgtgagtgaggagccacggaatcctttgtgggtgtctgaagtaggggaaagaaccaatacataagacccagaggagtcaccaaggtgacgacttagctggaggccaccgtgaggacttggcctttgtcctatataacttgagaggccactggaggttctcgggggttggggtgcggtggggtaagtgctggggttgggattacttgtgtgttggggacgggcaagaccatggatagaaactggtgatcaattaggatgtgactgccatggcagttgtggctggggggggggtggnnnnnnnnnnnnnnnnnnnnnnnnnnnnnntttcaggggccagccacaacagggccagctggtgtattggctgtgggatgcgacggcaaatggcaccttccaggttgtaggcctaagcaactggaagactcaagttattctctgagatgagtaagaattgggtagaggccatcacggtgtggttttggatttgcagttggttttcactgccgctgtgcttatgttttacaaagtcatctagaaaactgacttagtgaaaggggaaccgatcgatgcacagggtgaagttcccacaaactctggtcagggttttttgtttttttttttttctcttgtcagattatcagccgcttattgtatgtgtgtttctgtttaaaggccctttgtttagtatgtattgttggtttaacaacactgcagctcatgcctgaaggaagtgtgcctaatgtatgtattttctttgtcaggcaaatctttgctttctggaacttagggaaatgaaatagcacttcagtccaacgtctagggagcattttataaagcaaacccaccaaccaacagcagaaaaatggagcattaactccaagtgaaataagtgtgagaggagacctccatgacagctagctgaagcattaagacagaacaccgccccattgaaccacagcttggacatgcaggtcaagtggcatctccgtgcatgtctgaaaacgattatgagagtgtcatgggtattgatttggggtcacaaatgcattttagtgagtaggcaagtttgcaaacatggaatgcatgaataatggggaattgctgaattcagatgggagagccgttgaactgtgcggagatatgaaaaaggaaagtcgtccaggggacttctggaggctttgatttggggattatggccctgtaccttgatctctgtgtatagctagctggagaggaggtgaagtcttaggagttcaaaataaaaaataataataataaaatttgaaaaaaaaaaagggaggagttctggagatgcactttgggatgttccagaaaaggagagagacagagcaaacggtgggagcgagaaatggatcaagagatggttgattcaagaatgaagggcgcgccccccccaaaaaaaaaaaacgaacaaaaaaagaatgaagggcttgagtaggtcaagtgttgtagaatctagtctaatggtaggtcagaatccacctttcgatgaggtaacatgggcttggttgtgattttaagtttcatttgggaccatagaattcaaggtctgagtagagctatgaaagtacaaatacaaactttccagagtttggatgtaaaggggagacaaatagttaggtacaaagcagaaagaataaggggggcagctcactggtcaagcactgccagtcaagcatgaggactggagtttggatccccaggacccgtgcacatgctgggtgggcgtggtggccagtgtggaccttcagccttgggagacactgggatatccagagcaggctggataccaatagtacccgtgtaggtgagtgagccttgggtctgattgagaagagaccctgctccaccaatgagtaaggcaggagagagagagagagacagagacagagacagagagacagaccgagagagagagagactgaaagagacagagagagagccgggaaagcagtctggggcctccacactcacgtgcattccctccccacacctgtatccatacacacacatacagatacacacacacacacacacacacacacacatacattcccacacacacacacacacacacacacacattcacacacactcatatgttcacacacacaaacatacatacacatacatacacacacacacacacacacacacacacacaaaacatggaaacagaaagaaagggaaagaaaaggcgaggggaatggcataggatccaggaatgacttttaacgtggacctcgaggcaaatgtgttagggaacagacccaaaggtctatggtcagagaagaggaggagttagcagatggtcttccatgactgtggtgactgctttaatgttgcatcaactgcatgctgggaatatcctccctcatttgtgggtgaggctgagtgaggccagatgctttgttcacagtcacacagagagtccctgacagaactgggatacagatgtgacccttctggttctggggtttgtggcttcacagcttcacttgagaatgcaatcaacacccaggatgattacctggtacccactgtcactcagtccctcagccaggctggaagctaagggggagcatggagtgaaagcccagactccctgctgtcttagaaacatcacactctgcccacagagaggctgaggagagaagctgtacgtcagggttattgctaatacctctgcttctggagcatgtcttacctgcagaagaccacccgggtcacctctctagcttgtggaaatagaattcatttcgtagggtcattccaaatcaagaatttaattaatcttcccagaagcctctgttcccactcggagcccaggtgagaaatctctgaggaaacagttcagctttgcccatccacagtgtgtgcagccttctcttggaagctgtctataggggctcaataaattgcttgttgttaaacagagagatttattcccctgacacccacatggcccccttgctttattttaaaatatatcaactaacttaccaccaatgcgattgcttgtaatgtctctgacacatccaatttctcaatagctcaatgacaatgtcatagtaaagacaggaagacgggcgggggagggtgctggctgtgtagactgttgtcttaaaaagtgtgccacaaggacacctgctcagaagggactccggtaacagactctgccgctggtttgggaaatagattagattgcatgggaatatctcttttatatatatcttttcaaaacatctgaccccatgatttttgtcgttttagttttagttttgttgctgaattgaatccagggcctttcatatgctaagttggtggagataaatccctaaccctgttttattgtttgttttgggttttttttttttttttgagacaattttgctgtgactctcttgtagacctgatgttcactgtatcactcagactgtcctcaaacttactgcaatacccctccctgcctagttttggggtcgactggcccatgtcactgtaccatgcttgagcctttttcctcagggaaccaacccacgctcccaggttctttcacaagaagtatcaactgtctggctggtgtcttctttttgctttgaaatggggtctctatggagcactagctggcctggaacttgctatgtagaccaagctagccttgaattcacggagatcccctgcatctgccccctggatgctcagattaaaggtgtgcactagtgctgggactctgactagtgtctttgattttccatggaaacctttgttctggaaagtattcctgttgctgcattaggaattctggagttgaaggtgggatgacctgttcattccacacagtgagattctatgctattgaactatcagccctggctttggtgggtctgcagatacagaggacgaagtctctgtgaaggaaaaggtagctgcagacggtggttggttcttcagctatgcgccaactgtggttcatataaaccggctgatggaaactcaagattccttgtctttaagagcagggtgttctgtagtacccactattagggttgccaaggtagttagagtgacactgttagtccagactcttaaagctcagtgacatcttggtcctaagggaagtcagggtgcattgtgatggctgtttccccaccagtggcccctctgctggcatatttacacagaaaccatctgacattgacagtacagaggcagggcatggcagtggacatagtctgattctgccgtcacagactctacatgagtactcctctgagtgccatggcttacaaggttacaggttcccaaatctatgtttctctacctggaaatgggtgtttgccatctctcctaaggtaggttctgtggtagccaatattgatcgtcagtttggtagtatctgccatcacctagaaggcagactttgggcacacctgtgagggggtttctagatttggtgggaattgagaagggaaacccactcgactgtgtgtgagtggcacagttccggagtcagggtcctagagtcagggtcctagagtcagggtcctggagtcagggtcctggagtcagtcagggtcctggagtcagggtcctggagtcaatcaaaaggaaacagtgagctgagcaccagtgctcatctccctctgcttcctggctgtgcaggcagtgtgagcaatagcttcacagcctgccacatgcctccctgccaagccttcccagccatgatagaccaacaccctcaaatagtgagaccaaacagacccttgcttccttgtcacagcagtgaggagagtgactggtatacagtcttaatgtgatattcaaccccctgcccccggataaaatccagaattctgtctcatcggtgttgtatagcgtgtccataagccttcagcaggtcatccagtacaaggcaagatgtcctccttggaaggaccctagtgcatccactggtcatcttgccctaaagcccgactgggaatgaagaaatgacagacccatgaacaggaaagctggggccaggcatgttgtactctctgatggagctgcaacccagaatgcacagctcagggggaggggctagttttgattggcagtaggtgtctttaaggcagagcttcaggctgcagacttcaggagaaggaagcttcagtcagtaatgttttttgcactcattggtcgatagtaaatgttcacacttgcacacatacttaacattcacacttgggccagaggaagataaagaaggaagtccttggggtcatgtatggtttattaatatacaaatcaggatcagtgtactacactcacaggccagagcagagctgccacaccgctgccactgttcccaccaccgctgccacagtccaaaaaggatgagcactaagccaccagccacaaggactcctgtgactcgctgccagcttgaccacaccccagagagagtgcctccccccaccctggccttttatataggtattcagataccctccaattaaaaacttcccccttggggccaagcctctccttaaaattgactatcagacagatgacaggattcttgcaacaggaaggctttgccagttccaggtctgacccatatgggtaaggcgtggccagcatcccatggctctgatgtcttcctccttgacatggcattttcatgtcaaacagtacacaaaacttcactggaacttcactccctcagggtttccttggctcctcaaacagctcacttctctgcaggtggctccttcccttctagcatgcccctcattctacttagactctaaccccaaatatggccatgtattttgcttcctgtgtaaaggattcagctagcccctcactgctccctggagtcaaagtctggaatcacttcccagcctgcctcagtgccccaaggacctaccagccctgtctgagctcgccaatcccttctgtttccatgtttgctctcattcttcctgtgacaccagcgtgccgtgcccctccctgagggccctccttggttgttcagttgtcacttcttctgcctatgctctgccatgccacgagatcccatagtaacttccatgctttgaccatggtatttattacatcacactgaatatatttttagctcgctatatccttgacatatgagctccctgagtactgaggggacattctgttacatttgagtttccagtgccggacatctaatggcatccgaatctcatgtttgataactgtgctggccagtgttgtgtctgattgacacacagactagggtcatgtgggtagagggaacctcagtgagaaaatgcctccaggttgccctgtggtcaaatctgtggggcatttccatgattgatgtaggagccctccatcccagtaaatgatgtcacccctggacgggtggtcctggggtgtataagaaagcagactgagcagaccagaaggagccagccagtcatcagccccatccatggcctctgattcagtccctgccttcaggttcctgccctgatgtcccttcatggtggactttaagctgtaaaatgaaataaactcttccttccccaaggtgcttttggtcatagtgtgtttaatcccagtgagagaaagcacatgaagacactataaagaaaggaaggcatcacctcccttctctagggcaccatctggcctaagagtagctcacctccctcctgctgccacccaatacagtgcagctttggcatgggcctgcaggcagccgtaataaaagactgtgggctggggaggtctaatgagcagaaatttcccccttacaactctaggaggtctgaggatagagaaccaacatgggcaggtggctgggaagaggggggcactctttcgggccacatattgcaagtaaagtacataatcacatgaagggaatactctgaaagctgtcgatgctgactgtattcacgagggcactctacttacaatataatcacccttcaaagtcaccgtgagcaaggcatggatgacatgggtctgtagtaccagctgaggaagaaacacctagaggttcagggtcagactgggggacatctctaagcccatttctgaggaagcaagtcctgtcttctgatatacaggtggttggattaagacacatgaatctgagtggctagaggcacccgtgtttgacaccctaaaattgtcatgtttgtcagtggcgtctgagagaagtatggggaatctacaatcacactgccatggttcagatccctgcagctctctgagaacttttggcatacacgtgttggtcttatcacattaaaaggagataattaggtattcacttctttagcaggtcggtcgatctaagggttagatcacacataacgcttacaggaaggcctggccctaggtgtgctcagagggcatgccttgtgctgctggttgtgctgggatgtgagtcttttaacttctctgtgaccaactacattctcgctgccccagaatctgtgtcttgccctaacaccacctggcttcatagttgttcccaaatctgaacctcttggaagttactacgttcttgtaagatattccaatattctagtattgcttctgaagtttttattctgtgtttatagccattgatgggggagggtgtcctaaccaattgtgggtggtaccatccctgagctggtggtcctgggtgctataagaaagcaggttgagcaagccagtaagcaaggcctctgagtcagctcctgcctctgggtccctgccggaactgagttcctaccctaactgcttttgatggtgagctgttacatggagctgtgagtgaaagaagccctttcctccccccacttgcttttggtcatggtgtttcatcacagtgatagtaaccctaacaaggacagaaactagtactggaaagacggggtacctctgtgacctgaccatgttgttctgggggagtattgtggaaggctacaaaagtcactgaagctacaaaagtcactgagtgttcaaagttcagtgatctggctgttctgtgagagcttggacgatacggtgttgagaggaatccagaagacaggggaggcctggctcgtgaagttccagagggaagtttgagagtcacttaaagactctctcagggctgttttctattttgagtgaagattctgtggttctgatcagctgggcctgagaatgagctgtgattacctggagactgacgccactaaagcaaaacccttgttgagtggtatgagcaatgctggttggctggagctgagaaattagtagtgattgagaagagaccagcgtcagtggggtgaaatcttctgggcagcgtttcctaagagtcggttcacacaaagatgtgttccagaggcggccaaggttgtacgtctggctggcagctgtaagagtcacccagttagtactggttttgaagacatgaaggggtcacaaaaagcagctggagcttggcacgtgaggggacaggaggggacgttgaaggtgcagcttcagtagcggctgaaaacccaggactgaagaggtcatgggagagagtcaggcttggcaccatgaataaagcccaagagaggctgttggtaaaagtgcagcccagtggcagccgagaccccagcattttggaaatgccagtaccattggagtccaccaagaatagaagcagcattggaggagacccactgcagagcctggaaggcaaactttgtgtgctacagagggcagagccagagaagtgagtgactcacgccctttggaggagcccagaaacctgtgagtgaatcccaggtgtgggacgttatgttatttacacgattagagtttgcttttgctttgatctgattgtgtctgtgccctggcttttccctgaattaagaaagcatttaacttatttttatataagagcctgtccacagttgagagaaatgttatattttaaaagactttggattttgaaaaatactgactttttaggtgtttgcgctttccccaaaaggcattgggacttttaagtttatacttttttttttttgagacagggtttctttgtgtagctttgtagaccaggctgcccttgaactcacagagatccacctgctctgcctcctgagtgctgggattaaagacgtgagcaccaccaccaccaccaccgccgccaccacctggctttataaaatgttttgtattgtgatgtctttattaatgtgtgagcttagggatgaacaagaaaggtaaggtggtggcttagcagtggcaggtttgtgtgtcatgttgataataggtcagtttatgtcaagttgacacaagctagagtctttggaaaggagggaccctcaatggagaaatggcaagcctgtagggcatttttttaactagtgattggtggagaagggcccagcccattatggtggtgccacacctgggctggtggtcctggcttctataataaatcaggtttcgcaagccagttagcagctctcctccatgacacctgcctccaggttcctgcccggcttgagttccctgctctcaccgctttgatgatgaacagttgtctcaacctgtgagtgaaataaacccttccctccaatcatcactgaccattagccaatatgacccaacagaagaaggacagcacaccatgatcactgggctccaaatagcgctttatttattttttttccaggggtgttttgaagttgtctcccattctccatatatagttcacttaatttttttaacttgagaaatgacacccagctcaaaccagatagctgacagtggagtctgaacaatcagggagacttaagaccttcccagaatcagccgtcacccccgtctgtggccactttgaggctgatacacagaggcagtccaaggtctgtcagtgagtagagcgctaagattacacgaggtgtatgtataatccgcgtcaactctgtgtaaacaggacgtgtttatcagttgcgtggttctgggtgtgtgtccacaggctggatagctcaactgtctgaagctgagggaggggcacatggtaacatcttcggaactaacggaacggtgttggattgatggatggtgcaggaagtgtctctctttgcattgtgttttgaagcccaaacacgggagcctctgggtgagtttacattcgtggtggtaatatgttctcacccgagaccttctgagcttacactgcctgtaatccttggtgtagctcaacgctgaggcattgacaagcccctttgcagccttctctctaaccctggagggcatacccaccatgggaagcctggcttctaagtttggttgaaagagcccctgctccccgctaagggggcctcttcagtgccacctcccagttgtcctagagcagggctgtcttggcagaagaccattttcctcacttcctgtgctcctgttgcctgaggtgatctgatacatgtgcctatgtcctacattcagtgtccaaatgccatcctgtagagttgtgtaccatttccacatgtcctagaggttcagggagtcaggggaagccgcaaggttttcattcagtgtgtggagattcatggtaaccagtggttatacccacagggttcttctaaccaagaggtagaactgtcttaccaaataccagagcctcaacttcctgtttaagcagtgtattgtgtgtgtatgtatgtatgtgtatatgtgtgtatgagtgtatgtatgtgtgtatatatatgtatgtgtatatgtgtatgtttgtgtatgtgtgtgtatatgtatgtgtgtatatgtgtgtgtatgtttgtgtgtgtatgtttgtgtgtgtatgtttgtgtgtgtatgtttgtgtgtgtatgtatgtgtatatgtgtgtatgagtgtatgtatgtgtgcatatatatgtatgtgtatgtgtatgtatatatgtgtatttttgtgtatgtgtgtgtgtttgtgtatgtgtgtgtatatgtatgtgtgtgtatatgtatgtgtgtgtatatgtatgtgtgtgtatatgtatgtgtgtatgtgtgtgtgtatatgtatgtgtgtgtgtgtttgtgtatgtgtgtatgtgtgtatgtatgtttgtgtgtatgtgtgcatgtttatgtgtatatgtgtgtatgtatgtgtatatgtgtgtgtatgtgcatgtgtgtatgtgtatgtgtgtgtatgtttgtgtgtgtatttatctatgtgtatgtgtgtatgtatgtgtatatgtgtgtttgtgtatgtgcatgtgtgtatgtgtgtgtatatatatgtatgtgtgttatgcatgtgtatatatgtttgtgtgtgtatgtgtgtatgtgtatgtgtgtgtatatatgtgtgtgtgtgtgtgtgtgtgtgtgtgtgtgtgtgtttgtatgtgtatgtatgtatgtggggggggcacaggcatgctgtggtgtgtaagtggaggtcagagagtgccttccagctgttaattcttgcctttcctcctgtgggtcccaggtattgaactcagatcatcaggctccctggcaagtactttacctggtgagccatctgtctcactggtggccactgacttcctattaaaacccatgaaacccacagagttatggaatatctgaaaatgcagcacaaaatatgccacactcgtatgtaaccagtaaccacgctgaggctaaccaggtctactgttgactgatcgctagtcgttgcctaattgtgacaagatgagtcttgcttctctcaacctctgcttccctgatttccagaggtgaagccagcggtctgagggggatgagaggaagaaaagagaagttctttctggaatggatgggactggaatagagtcattgccgagatggggcagccacctacctttcagatgggtgcagtacatgctctagaattaaggacaaactgtggggagaaccaaagttttctctagttctgccctttaacctgttcccaagctaatctgttctggaaggagactgtctcagatgtcacaccaaggtgcagatggaaagctcttgatgtttttatttacgttttgcctgcatatatgtctacagttaatgtgtctggtacaggtcagagggagggcatcagatcccctggaagtggaattacaggtgtgtgagagcctcggtgtgggtactggtcccaaatcctccagcagagcagccagtgctgtcaacagccaggccatctttccacccctagaaagctgcaataacagccagtgctgtcaatagtcagaccatctttccacccctagaaagctgcaataacagcattctttattttaaaaatgatgttagttacatgtgactgtggcagtctgctttcataatacatgctatacactatttactctgtagttactgtgtgtttcaaaacaggaagtagacatacaagattctgattagcacggcatcagaacactcacacccgagactcaatgctcttgacttgggagctttccacttctgacttctcttgtagattttctttatagtctgtccttgaactccccatcttaactctcattcactattttagcactcttctttcctttggtctcatcaccaggcatgccttaatgcttaatgatgcttaacttttgtatttctagttctgacttttgtgcagcctagatatccaaactaacatgttccccctctggatgtctctaaagcaaataaaaccctttctgcccccagataaaccagccttctgttcctcacccttctccctattctaatattgtattctctgtctaatgaactacttcaccagccagtgaggaaaaaaagaagcattctggattctcctcatttcttgtttctcagttgagtcaagcattgtgtagctatcctgtttggagcaccccacaggaccatcctctcctgctcctggagtctactagcccacaggctgacccctctcctatcttgctcttgctagatttaataaatactaaataaatgttgaatgaagacataggcatggaagtagagtgtattaaaataaaaaaatctctgcctgtttgacttgtgcatgaactcccctatcgtatatttctccagctgagctttcagagctaacccttgcttccttggaggtccatctgggtaggtcattcactgtgccggttttctgaagttagtgttactctcccatccattacgttagctctgtagcctgactgtgtttcctctccaccttatatgatgctatctggttctttatgtctgatactgaaataaatgttgcccaggaaaaggccacgggtgtctcactctggcctcatcttcagtaaaaactgcttgcgtatatacaactttgcagaattaaaatttcacccttgaaaatcttctctttggtgtggacagaaatttcacacacaattatctacagcgctgaaccttggctatggtgttcgttcataagcagtcccatgaccccacagaaatacagatgactttgtgccagctcatttttaggatattgctagctatatttaagacattaaaacctttattttcttttagactattactgagttaacaaaacagcttttggaatctgaatgattggaaaataaaatatggtgtagttatttcacagggggtatcactgtgtgttctactggggcataagtgtgcttctgtccgatcaaattccatagccattgaagaaaggaactctgtctcatcagtttgagtgcttggtcaacaaggagtggcactacttgccggagattaggaggtgtggccttgttgttgtaggtgtggccttgttggagtaggtgtggccttgctggaggaggcgtggccttgctggaggaggtgtggccttgctggaggaggcgtggccttgctggaggaggtgtggccttgttggaggaggtgtggccttgttggtggaggtgtggccttgttggtggaggtgtggccttgctggaggaggtgtggccttgctggaggagggtgttgatagaggcagactttggggtttcaaatgctcaagccaggcccactgtctttctgctgcatgtggatccagagaggaggtgtggccttgtagaggaggtgtgttgatagaggcagactttggggtttcaaatgctcaagccaggcccactgtctttctgctgcatgtggatccagatgtagaactcttggctccttttccaacaccatgtttgcctgtcaccgcctgtcaccacacttcccaccatgcagataatggaccaaatctctgaaactgtaagccagtcccaattaaatgcttcccttcaagagagttgccatggtcatggtgtgtcttcacagcaatagaatcatgactgagacagctatctaggttggatctgaaacaataacaagttaaaccctgatataatttcttcaacaacaacagatacaaaagagaaaagcccttgcatttccatgttcagtgtgtgcaagctgacctccattcatctttaaggccctatggtctttgggctggtttgtcttagcctcagtggctgacgtggtagtcgagaatgggaagtcgtataggactttctgctgccatagcttgtccatcgcacctgtagcccgttgcatgctgggaggtgagtggtattactgtattagcttccttcccagttgctgtgataactgtgtcatcagagctacttagaggagggagagtggagagtttgtcacttgcagttccagcttctcaactgtcatggcagggaagtcacagcagctggtgcttgagggagtgggtcataccacatccttaatcaggaccagagagcaatgattgcgtgcatgcttgctcctctcctggcgcaggggatggttccacccacagcagaccttcccatctccattaatgcaaccaaggaacccaaccccccttaggaacgctctgccaacctgatctaacattctttcattgagactctattctcaagtcatcctagattatcagttaaaactaagcatcaatcattgttcgcggagtgatgatttggagttacatgaatttagcttagctaacacttcccagaattcccttgtttgtatggttgtgtatgttattttacagatattttcatgaggtttggataacagatggcattaagcagtggccacttaggagggagcaggtgacaggtgcaacaatggcttaccctggtctcttggctcacatgctggctgtgcgaccatgaactagccttctgctctccagccctcagtggacctctcctttatctgtcgttagtcctgggctggagtacatgcaattccacaaaaaaaaaaaaaagaaagaaacaaaaaacaaaaaagaaacaaaacccccagagggtttcggtaaagcctactccggtcatggttgtctgtctgccacgagactcttgcaatgctgtggcctctcgggtggtggtgaagtctgcaggagagagacactgtcacgtagctgctgctgcttcttcgtcgtcatcttcatcttctttgtcttcgtcttcgtcatcttcgtcgtcttcgtcttcttcgtcttctcctctttcttctcttccttctcctttttccttttccttcttcctcctccttccctcttccttctttttctttttgaaaatagatgcttttattattattagaaagaagcttctttcacatatcaatcccagttccctctccctcacctcccctctcctcatcccctctaccttccccacccccatcccaagccctcccagacttcctcaaaataggcagttgaccagacaaaggctgtggcctgggatttggccagaagtccctctgcacatatagtcctactgtgggtgctggtcactctcactggaagaggaactcattttctattctccccactcccatcacccagccaccttttctctgatgggagcaaatcaaagcaggtcttgccacactgcttccagggactggaaaatacccacatcaaagaaatctattcatagattacatgtgattcacaccacctgagtggatgtcagctgtcagaaggctgagttctgttttggggcagaggttctcaaccttcctaaggctgcagccagccccttaatccagttcctcatggggtggtgaccccaaccataaaatcattttcattgctacttcataactgtaattttgctgctgttatgaatcgtgatgtaaacatctggtatgcggggtggtcttaggagacccctttggaaaggtcagttgactcccagaggggttacaacccacagtttgagaaccactgatctaaggagccctgtccttggggacagcaaatattgacccagagattccaagacgaccaaaggatcagggtccacagagtgcttccaggtgtctaacgtgtagatacagtagtatatgtgaggaaactgaaggtttggccagttcccaataaaactctgggctcaccgggtcatctgggaccatggtctgagttttcctgtgtctttcagtctcgctgtggaagatgttggtaataatgacgcctctccataccttagagctgttttccagaaacatggcaacaaatgagtaaggcacacaccagatgcaaattctttttattaatattaactaataagttatccagtccctgacagtatgttaaaatcacctttttaaaagacaagatagacattctctcttgctagaggaaagagaatccatttgttgatgtaagaactggcacagtcacttcacgaactgcttgagtctgtgggaacactccagggaggtgacggagagctgatcacaagagctctgttttcacatgcactcagttctgtttggtttgagcatggtgtcgtcttctacacaggagtcctatcaatccttatttcaaagcggcagcagaggagtgagtacagggcctcgggtagcctccagcattttctgaaatctggaattagctgtcaaattttgaaaatagaagcttagcctggcttacatagcctccccacccctgctcagggcaggagcctcagagatgtgcacagctttgctagctctttgcctggctcctacagccatctgtgtctgggttgaagacgcccgctccctccaggtgataactgtattattgcatctgacactattttggaagggatctccaggatagaatctttcaacaaagctttaaagtggctgtcaggaatgtgccattttctgtttactcttccacacagtgtggctgtctgcatggttacaggctctgagatgtgatgtcatcaaccccatgcattgttgacctactcaagcgactgggtccctgaaggtgagctgcttctttcccggttacatggcatgctgggaagtgaagtcccctctctagtcttcatcaccaacctccaggcctccttactcacactcagtctcagggtgggtcataccacgttacagttggtaattaaatgacagtcagaagcctgagctgtgagttggagatacggggatcaacacaatatcagcattgattcaaatgaattagctccctgaaattatcaatagtctaccaaaaattgcaatctttatccacaggcaaaaaatggcagattgaggaaaataagcccttttgtaacttaactttctaaagggtaggaaataccatctttgcatgcacacaactggtcaatattctctctagatagtgcaagatctctactccccaatgattattttaatttagaaaacatctttcattaaactctttagcctcagaatggaacacacaggagagcaaacccttttgtaaattaaaaatattattcagtgggagctgcgacttttaatcaatatggattttaataacctaaatattaagaaaaaccctccctagcacagaagtcagaggtgactgtgtttttaatattgctatatacatatgagaataccaagtatactcaacttcaaacaatccagtttgcattaacaaacacacataacaaatataaaactctcaccagacttcagatttcctcatttttaaatatctttatgaattccatgtcctagaaaagtgccttttgtttcatttgcttttctttaaaaatttcattttatagtctttatcttgtagaggggaaagaaagaaaaaatgcagctgaaaaaaattgacacagtgagagtcttattaggagaaatctcttctgggtatttcccacaggagaagatagtgtcagacagtgagctgctgtaatggcttggacgttaggtcagacataccacacagcagtttctgcccctttctcttgcccagtgtactggacttttatcaaagactgtcacagcattgatagccttgggtttttaaaaatggctgcctcagtctaattttggtggcaccattagacaaaagttggtaattatacgttaaagttctatcaaagaattaggggtaactgcagcagatccctgacaagggccaaaggtcagtgctgcactgaattagctcacaacactttaggtcatgggtgtcagcagcctccaacttcaggctaagagaagtcctgctctgtccaagagcatgtcttattttaggatggtcttagtgtgtgcaggttgagtaaatttagtgcctctcactgggtcccaaggctagacccatgaagtagaaggtggatccactcaggcttcccagctgcacagtgagtccatatagatccaggattttatttattaggagccaacagctaaagctgccttgaagccccctaaagctttaaacgttgttgtaacaaaccccacatggcccttggtggctgagaggctcagaatgtagtgtcatggctggggggcctccnnnnnnnnnnnnnnnnnnnnnnnnnnnnnnnnnnnnnnctctctttcctcatctctgtctctatctcctcaaatagtctccaaaaacaatgtatctacccaggctattctctccctacataaattctggtcccaagattcaacatggaaacagtttgggggaaggaacttccatcctgcctacactttgacaaactgttactgtaacagccattgaaagcctgcatattcttgagtattcaatatagtccttagatttccctcccaccgctgcagggatagcaaacactcaggtcctcaggcaccacaggtacaaatcaacttgctttttactccatgcttatgaaaggcaaaaccaccagaggaatttctcaatgttctctgtccctttgagtgtttcctttattaataccagtatattttaatagcatctgtgctcaaccctgcttcctggtcaagcctctccactttcatgatcttagcattcacgtgactttaagcgcactcttagccagttctatgaaacctcccttttgtgcagccctgcacagaatccgggagaaagcgaccctgctccagttatgttttccgtgtgtggggtgtgaaccttcaaagcacaccaagcgtgtagagctctgagcccgtcacatttcatgtcgtgaagaaactgtccggttacatgtaagattcggaagcttaacagagattcctttttcaggtcttgtttttttttaatctttaaaattttttttcttagtcagactcggccaccagccgagtgtggcttctcgtctctgacctgtgtgccacaatttgaagaaataaaatctaaccggactccaggttgcagacagcatgtgagagaccagcccaaggcccatcgattgagcagtctgctgctcccccccagcctggttgtttcctgctgcactgagagtctgtgccctgtgctggtttttttagcttgagtcttctcaagcgtgaaaacacagttacggattgttccgggagctcaatggctcagcatcttggcacttggctgtttttagcttctcaacaatagccactgtttgctccctccatctcatccttccttcagcaacgaggcaggcatctgatgaaaggctggtcacggcgtgcccccatggtgtcagtgtggtggcatgtgatggttcacatggggtgtgtttgatccaaggaagcccagcctctgcttgttcttcctttgttctgtcatctggagaaagagagagaaagtgtgtgccttcagctgctttccttgatttttttttcaccccaagaaccccactgtctggttccacacagaatatattcaccgcaaaagcatttttttttttaagtaaactaccagaaacagaagtgagaagaaagaccaactcctctatccatgcttaggaaacaggaagtggtgttgtaagaaacacaatctgttgctggaatcatttaacagcttaccaaggggcctggcgacatcatgttttacggttgctgaggacatcgtgtgataaatgggttgatcgggaccttagagtgacagcttttagtgaatgtctgcctttccaacaagcttggaaatccaaagccaggcaggaaataagatccatcaccaagagcaacatgggcccctccctgtctttccagtgagaatgctgcacaggaggtgggggagtccctgcttgctgagaaaccaccagaagccaccgcagcacagcacagttggggaattcctttcctggagtttctgggtccccgtgctcacagtggcagggtggctccagtgcccccccccacctcagctcactgaagctcactgacctgctccttcagctctgccagctgcccagatagctgcctcaccagacccatggtggactccagcttctcctgcaggttccggatctcgttttgctcgctgtcaccttcattgctgacaagtgacatggcccgcatccgaggaaaccagtccagattcttctcctaaaagaaatgcaggaactgggtagtgagtgtgggccggagccagagacactacagagaatgtttctggtcatttattattattgaaatctaaatcattgtggtctcacttgggcatggtggtggacatctgtaatcctagctctctgaagctgaggcggggactggccggcatggctatattgtcaatttcaggccagcctgggctacaaagcagcactgtctcaaacaaatcccaaagctcagtctctcagcatatacaccaaaggatcctcctctggccaggggcaagaagaggcagcattggtcctcatggactgggaaagaccccagcgatgacttctccagactcccaggtgatcctggatgaagccagcatccagagatggaggatgggtctgaaggtagcaggatcggatctcagtgtgtgtttgttgggtgggggggggggcaggagataggaaaagcatgaactgtgcccgcccatgcctgggtcctgcccatgttctctgctgaggttctttatcagttctgtggcccccggctccatgtgggggaggaggggagtggaagggcgtggcctggggtcctactgtctgctccctgtggaagcagtgtgttacagtggtgccattgccccagatggcaatagctggtgccacttctgttattttctgggcagcctgtgtgtgtgtatgtgtgtgtttccccaccattgtgatagacacccctaagtctcagaaactcttcctaactggtgaacaccatagagtcagtgtgcgtaacttagcctgtatttttcagtcttcacttactctgcaaattgtaatgtaacccccatctccagcagattaattacccatgtcagagctgggaaccggaagtctttgcaccacagatcgtgggggccagcttctgaataccttcctctgtcacccctgcagggagcttcttgcttacaactcctcccctcccaggtaagtccagagaaaactctgcctgggttcccaaccacagggccatcagagccctctctttccccagagtgcagtgaggtgaggtgtttggactgccactcccatcttgacatcactggtccttggcatggcttcttgtgtatggggcacacgattccctgtctccagtggcaggaaaagtgactgagggtcatcacttcctctgagttttagagtgacagattcagttactctgaccacacctacaggcaggtatttagggatcaaaggtatgtgtgtgtagtagtagtagcagatcagaagacaaatggccagagtcagttttttccttatgccatgtggggcctgggaatcaaactcagatcttcagctttggcagtgagccctgtcctgggccctggctgggagctttgaactgaagctgggggtgatgatgatttcactttcctgccacagacctgtacctaacatggtgaaggcagcaacctcaacatcatcctgattcttaggatgtatccctgaaagtgaccagctagtcactggggtccctttgggcagcctttgggcagccaacagctgagatgaatgtacaaggatgacatccctacctccccccccccagctgttagaggagagcttggctggaaaagcacccttttctcggaggccaaaagtgatcatttctccatgtcagagtctcagaatgtcccagctcttcttctggggtgggaaataggtggccaccagaggagatgggacagggagagctcaggggacgaaagtaaaggctgacggtgtcactgttctttgtgtctgagaacagggacgtgggcggcactgagactattgagagaatctgggctcaaagataaacacgtcgtgtttctatcatatgagaaatctagctagatttaaacccttacatatctatacacatatactgtacacacgcgtacacacacatacatgagcagggtcagaagagacatggaggcagggtgggggtagaggagggtaacggggcacatgtgacttggaagaaagggagttccccatgggcagaaatgttggggttcatcaggtgacacagggtcagatgatcccgggagacacagcaattactgccacaagtgagggaaggtgaggatgtcctcactgcaggcacccagctaggtcagtcatgtccaaggctgcctgcttttcaggaaacaatggcagctctctctcagcagactctgctggagctgcccgggccacgggactctcattctccactctgtgtctgcattagtccctttgtttgctcattcctttcataattcccgcttgtgactcctgtgcccgtgctaggcactgggagacaatggtaagcagcacccagcctgggcctcctcgtcctttgtaaaccacaggcagtcacagacaacaaagacaaggaggtgccagggagaaaagagagtctgttcctgtcctctggattccattctctctttttaccccctttgggtagttcctggctagtcttcttgactgtcaaccaaccataatctgaaatggatatataggtaattttccagtgtttagactctcacctccagccccacctatctctgctgcaccctcttggcctcttctccaggcaggcactagctttatactgccatctctacccatacccatgaccctaagactaaccctctcccaggagggtcaccataggcacaaggaggacatgccctgtgcctgcctccgctcaccccattcctcacagagggattcaagactagcttgtccgtctccagtagtacctgttgcctgaaactgacctatggacatattctaactttacagaaagtcttctctgggcttagaaatctcactgagctcaagctgagccaagtttacttctgatgcccgacttgaacgtcaacactgaattgccaaagactgagccctcagcgtcagtggtaaatcatctgacaaactggcataacaggacacagagcttcagccaccccctccacacagaagacaagatttctacaacaaacactaccaatgaccttattccagatgcctagatcccatcataaataatgaaaagtttgaactgccattgtaatgtcccctgagaaaaatgacttagatgatacacaagataaggattcaaacagaaaaaaaatgatcccagaattcaaaggagatgaatatgccaaattgaagactgtagaaatatagttggatgaaataacaaaaacaactcaagacatgaaaacagaatttagtaaagagataccatctctgaagagaagccaaatggaataaagcttgaaatgaaaaattcctctgaatttgtttgaattcatgaaagtttccccaatagattggagtaggtaaaactattgaggacgaagtgaggaactagatcactcaactaaaggaaatgtcaaatccctccccaaaccccaagaacagaacatgtgggaactcactctataaaaaaagaccaaacctatggaataataagtatagaaggaaaagaaaatacataatttaagaaatgagatgcctatcaaggtctaatacggaaccagaaaagaaattccccacatcacataatagtcaaaaaaccaaatgtacaaaacaaaggatatttacaatgacaagaaaaaaagtcaagtctcatacaaaggtaggcccattagaataccaataaatttccaatggagactatgaaatccagacgggactagacctatgtactcttacgagctatgaaagacagtgggtgccaatgtagatgactgttcccagcaaaactatcagatttaatttatgaccactaatccagctctatagaagaaactggaaagaacactcctgtctgaagaaaagggtaaacatgtaggagggcacaaaaacaattccagacaccataaaatcaacaaaatgataggaattgacacacattgttcaatagtgtctcttaactgataataaagttcatttgatctcaatttcccaacaactagaaacagactatcagactggatcagaaaacaggatccatctttttgctgttgccaagaaacaggatccaggaccagtgatagacaccacctcaaagtgtaagtatgggaaaaagtatccaagcaaatggaacagtcaagcggcatagtgattctaatatttgacaaaacagacttcaagtcaaaactaatcagaagagatacataggaatacttaccctcatttaggagaaacccaacaggatattacaatcctaaacacatatgaactaaaattggagcaccaaatttcacaaaagaaaactattaaacataaaaccacagatcaaccctaacacagtgatggtggtgatttcaattccattctcatggacatacaggtcactcagcaaaagaaggaaactcgagttcaatgacatcataaatcaatagaactaacagacatctatagaacatcctatctaaaaattaatgaatataatgctctttttagcctatgggattttttttttttaacaaaatagaccacctattagaaaacaatgcaagtctcaataaatacagggaaattgaaatcacattctgaattttatctaataactaaaataaagctgggtatcaacaataatagaaatgacagaaagtatacaaagttataaatgctaaacaacacccttctgaatcaaaattgggtaaatgaaatcaagaaggaaattgaataataaatactattaaaaatgaaaacacatcatggcaaaatctatagcacacaatgaaagtcaccatatgaagaaagtttacagcattatgtgcttacatcaaaaactttgagaggcctctaaactaaaagatgcacctgacagtgcattttcctattcttagaaaaataagagtacacaacaaaagaaataggttggaagagatactcaaaaccacagctgaaatgaacagcatagaatgaaaataaacacaaaggatcaatggaagaaagttacttgaagagagtgacaaggttgataaacccttcatcaaagtaaccaaaagaattagagagtatccaaattaaacaagaaaagggagacactacaacagacattgaagaaatccagagactggttcaaatatactttaaagatctacattccaccaaattggaaaatgtaatgtaggagagacctctacacacccgtgtcgctgaccacacctgtttgggcatggccacaggtgcctaaggggcttgcagggtaaagatgggaggagaggggcacttgcctctcactgggttccagatgggtttggaaagctgctgagactggattcttggagcgccgatttgggtcatcggctcctcgtgtaaatgatttccccttaataaattaaccatctatatccatagtccatgtatggttaccttcctttacaatgtaagaaatggatgaacttctagatatatatgactgacctaaataaagatgaagtaaatgatttaaatgaacccacatcacccattgaggtagaagcagtaattaaaagcctcccaactataagacacaggtcagagggagtcattgttgaattctatgagaacttcaaagaagagctaacaccaacactcctcaaactatcctacaaaactacccaatagaaaaggatgaacattctgaattccttttatgaaccacactgttctgacaccgaaacaataaggtcagaatctttgatgaacatagacgtgaaacaaagccaattcaagaacacatcagaaagattgttcaccatggccaaatcagcttcatcccagagatgcagggatggtttgataaacttaatccaccacacaaacagaaaccacatgatcacctcccgagctgagaaaaggcctttgacaaaatctaacatccattcacaataaaaagcctggtgaagctagggttacagggggtggtctcaacataataaaggcaacatacaggaagcccacagccaacatcattctgaacagagaaaaactctatttccaccaaaaccaggggcacaggcaatgatggtccctctgcccacccctgttcaacatagtgcttgagtcttagctagagcaggaagataaagtagacacaaataagaaaggaaaatcaaagtatttttgtagatatgattctatatgtaaaagatctggatgactcctacacctgacaattcagcaaattagcaaaaaaaaaaaaaaaaaaaaaaaaaaaaaaaaaaaaccagtagtagacttcatagacacaaacatactgagaaagaaataaaggagataacaccatccacaatagcctcaagaaaaataaaatagaccaagtctaactaaagaagtgaaagatttgtgcaaatggccaccctaccaaaagccaacccacaggtttaatgcaatctctatcaaaattccagtgaaagcagcatgacactcactgatgaatggaaatgaggactcacatataaacccatattcctacatccacccagtgtttgacaaaagccaacaaatacacattggagagaacttagtatcttcaacaaatgctacttgtcagactggatggccacagtagacaaatgaaacttaacccatatcactcaacccttaaaatctctactccaaaggaattaaggacttcagcacaagaccagataccccaaatctgaaggggagcaagtgggaaataggcttgagctcattggtgtaagacaagacattctgaatagcaccctgatagtaaaaggctttaataccaataattaataaatggaacctcacaaaactaaaatgtttctatacagcaaagggtactattactcaaattaagaggcggtctgtagatgtgggaaaaaaagtctttacctgctatacatctgacaaagcgttaacatctagagtatataagtagctcaaaagttaaacattaagaaaagctcatttttaaatggggatgcacaaagctaaacattcagaaaaatgcaaacggctgagaaacatttaaaaatattcaacatccacagccatcaagaaacacaaattaaaactactttgagatttcatttaagcccagtcaaaagggccaaaatcaaaaaagcaaatgctgacaaatggtggcatggatattgggcacgggaacacttactctctgctggaggactgcaaagtggtgcagccaatatggaatcaagtgtggagtgcctccaagaagctgataataggtctaccgtgttatcctgatagacctgtctagggcatacatgcaaaggactgcatgtcttacttgagatatctaggaaaactctcaaagaactaacacaaatttttataggagaattaaactaaaaaatagatttttaaaaatcaatgcagcttgctgttttcacgaaaacaaccttaaatactgcatatgctgtttcttctttctattgaaatcagtttgtgacaaaacagccagatatccctctctctctacttttttttgcaaggaagtttccttttccctctgtgggagggagggaaaggcaggttgttacctgaccctaagccctaactgcaggcctgttggtagcctgggcgacttcctcatcctgctaaccagtgctgtgcctgcctgctaacaccgtggtctgatttcactttacacggcacatcttgtggtcatgctcatggcttttcgattcccaggctgatgctagctagtcaacgtgaaatcatttcctcatttcactagactgaagacgtgtgaccacagggtagcctaaagtcagggaagtacattagctgccagactcgtaggctgcgggttgatccgcctaataacttagtgacatgcagatcttctcagggcatctaaaatgcaagactcatagatgaactgacctttttctctgggatgttcatgtaccatccataatcctcctgctttggctaatttttataacagtgcgcctgtctgtctaggagactggaggagcaatagacaggagtaaaaacaagtccttttaataatggtgggtcagcgcgacctattaatgttgacactgttagtgtcacttagagaccacccgtgtggtgctcacatttgacattgcagagctagtgtttgggcaatggaagggcaccggttgaaaagatgggatatctgagttttgacttcctcacagcccaaaccatctatcctatggggcaaatgggtttcttactcgccaagtctcaggctgctcatctgtgaaaccagaagccttagatgtgtccataccttttccagcctggcattttatgagctatgaatgcaagaaaaggctctaattcaaattgcttcaaatagccctgagcctggcaaatgaacaaacacacagagttaagactagaagcaacactgaatcacagagctcaaacccagtgagtatgtatgtgcacacgcatatgtacacacatacacaccggcgatgatggtagtaatccctgaactcactccatttctagatgtgactgaagggctcagtgcccccaggcctcctgtttcagaactgaccacaatcttgctaccacagaaagagcatgttttgtcatgtcagatgagactaagaagtaatgagaatggtttggaccaacccaacatttagaatttgtctttttaaaaagctattagcatttatgacacattgcctgcctgtaagctaaagggaaagaagttctaaccatctataacagaacaacagatcctacctgccttctgagcatttggcatttagtcatgttatggccaatacattcaattccatagagcagggatgctacaatctcactccactgtctgcagcaccaagtcaagattatttgcccaagcccatagaaggttgagtggctgagccaagtgttgggtctctgggaatcttttgttcctctgcctttactgggtgactttccatgtctgatgggggcactgatacttggctactccagaagctgaggtacaaggattgcaagttcaaggcctggcccagctacagaatgagatcaaagtcaacctggacaacttggtgagactcagaaagttggaaggtggctcagcttccaggtgcttgcctgatcagcaagaaacccaccctgtattcagtccccagctccaaaatgtctggcttctaaacaaacaatacggagactattaaaactggagtctcttgggctactttctcagggtatgctacaggttcatttattgaagatcaggaacacatgccagtattgaagaggaggaaaagaacactggaggttcagtgaaatttggcagagggctttcaaatgttgctaatgagaggcaacacagaatgaactctgtactacaacagtagcaactaaccattggacacccctttgcccagattcagtgctataaggtggcacttagtggggctctcatgagacccacttggttgccatcctgaactgggctctgtgtttctaactctgtttctatgatttcccatcataaaattaatttgcagagcctcatggaatgaagagaaaagcaccactgttgcaagtgaagtgacagacgggctcaagagtccccagacctcatggtttgaacacagtgaaccacgaatcctcaggtgacatcaggcagctgtcataaggcgagaagttatgagtccaagtaggataatgggagagacccaagctctggacttcactgagcaccagtcaggcgggaggaaggggatggtgtatgtagctccagaagcagaaagctgcctttgaataatgacttcaagctgggcatgactttaatatgcctagtcacaagagacatgaggctctgtgggcaggaaggcaggaattacagccacgcgctgtgccacagagcagtttcacagtcatgctacatggaagtgtccactgattgtccatagactctgtgattccaactttggtccaactccacaaacaagctttccattttttaagctaagaccacttgggtttcatatacttgacccttaggtaggaactaataagtggcagcgatgcctaggcccacagcagcagctcctgcagctcagacaccatcccacaaggcagaggggtttctccatgtgtgcactgctccttgaaaaggtgtttactttctcaaatttgtcttcctcctaaatcttgaacaggaacaagatgctgttgggttatgggctcactacagtctctttcatcccttctccattctgcctggcgagttagggccaatttgaaatccattagcctgccagagctttgaggattaagctagttactcttgtgtgcgtggcccattttcttgtcaggactgaattctctgcattacacataactgatggtgctggtactcctcaaaaatcaaagtgccagcaagtgctcacaaacgcaaacacacagaaggacgatgtgcatatctatgttgtgatttctcattctttctgacggggcatgcggagcaggtgagctgctgttccgtccttgcttttctctccttccctatattcctatattccagcccccgcctgccccacacaaacaggaaccaaggtgagccacggaggaccgtctggtgtgccgagctaagagtgttggagaggcagtctgtgattcccactttcgctgctcaagcagtgtttgataggagatagtgactgtgtttctgacagtggataggtagcacccgtctttcagtgggacaggcagcgtaggtatgtcatgtggcaccatatggttagggcaaagtacccagtgagtgggaggtgtactctgtcactgcctcctcaggggattatgacatcctgaaattaacacattttcagagacttgaacaaggactcaccctggcatgtgctctgcaatttcccccatgccaattgcaacttgggactttcggagggttcttcatttaccctgcccccccccacccctctgcctgctaacttggtattgtactcaaaaaaaagaaaaaaaaaactgtcatttcgagatgtcccttaaatagtttcaccagttttgcaaattcctcatggctacactttcaaaaatctactcgccatggtgtgggaggattctacttttgtctcccttgttttaaggactgcctgtggttatgcttcctaaggaaagagggctgtctgcccggtcagtcagacctgacatggtcacgtgttgggaccactgctttggaaggaggctcatgacaggaatccccctgcacttcctcctttaccgttcaggctaccccagaggggcctcagagagccattggccgtcaccaagatagatgacaagtctgagccctgtgtgggtcctaggctgtcctcacacagtgactagcaatggaaggtcagaccttggagccacagtgtcacgcttagaaattagattctaggagatgtctgcgctttggcccagtttgtggcttctgtatgcagactgtgaatgcacgcccacttcaaagctgacagggctctttagtggcctcacaaataggatttattaggatttaaattttatcatcagaatggaaaatggatcctctctcccgtgttagcagccaagacttcccataccccgtggaactcacattttcttcagctctccaggagctgtccttcagccggtgagcctcaccagacagacaaggacatgtctgtttctcaactctaccactgagactttactggaattggccccatttttgtgtgaccatcatcatttttttttaaaaaaagacattgtaattgacactttaaaaatttaatattttgcaggcctggagacatagctcttgtgaatcttccagaggacccaggttcagttcccaggtactcatttggtggatgataaccaactgtaactccagttccagggaatctgacagcctctcctggcctcatggacatcaggcacacatgtgatgcgtagacgtgtatgcagacggaaacaaccatacacataaaatgaattttaaaattaattttcagtttttcttcctcccttttaaaatatttttataattcatgtatttgtttgtcctacacggtgccatcgacaacctcagtttaactgtgttgaaagtcgggttgttggctgagaagctttcttgtctgctggaatcatggcaacacctgccaggcccacaggattcatcctccatcggggctcagggattttatcacccatggtgcaatttcccctctccaggataagctttgttcaccccaacttgccccatcgcctcataactcactttcaatttgtttaaagacctgatgaagatttgatgacacaactgtacaccctgtctgtgatcatataaatggcataccattactgattagtccaggaataatggtaccttagtgactgtacccctagatagaggtctgtttaaggtagcacaacaggaacagagtattctgattttagaagtgtcttccttttcccctcccttttcttctttctcttctcaatccctttccctccttttatctttccttgcatactttgggactcaatcctggggcttcatgtacacaagtgtcccaccactgacagacacacaaggcaagtgtcccagcactgagctgccatcaagtcatcaggggactctgatgaacaaattcattaggcacgctgaaaggaagatttgtctggcagtacaaactccatgtgtgtgcagcatttaatgataagaccagaggagaaagtgaaacaaattattttgatgtatgccatcagattaagcaggacgatcttagatttccattttgcatgatgtcaacccacaaaaccacatgaaacggaccctcctgttaccctctcactcacaccagccacagcccattctatgggaccccagtgtgctgtgatggctgcatccaggctaggtacccaacaccatgccggtaatgagagactgatgaactctatttcacaacaccaaggcacgctcagttgtttgcagccgtctcaggatgcacacagtgtcgccaggatacacatattcctgggctcgtctacatgctagagaggggacccgtgctgaaggaggtggtcacagcaacttatctgtccggtctcctaaacatgcaagtcatacagccagcaagctcccctgcttccaacctctgctcattaagcaactctctggctcctcaggaaaataaatacaatggctgtctgtgtactggctggaaaggatcgtttgccatgctgaatcagggacattcaggcatatgtacccgctcgctgccttccaagtcggctaggggatccctatccattacactctgcgtgcctgcctgatagccttgtctaggatcagagcttgcaaaggctggcacaatatctgtactttgtcacccgagagagcccgtgacacggtactgctgcagggagaccatctgctgctttgtgtgacagcctccctgggtggtacctgggtatcactgtgttctatttttagcaaggctgtgtcctgactgcagttatctggtgccatttgggaccaacagtgaggaacatgaattgtgagctgaggtaccctggcagtgtgaacacaagtccgtgccatagcttcatgtcagggctctctggcaagggtcacgtttggtctcttcatccagtcaaaccacctctgtgtcaggtagagaaaccaagaacaccaccactacagagactgatgaaagcctggttgcccgagtgtagtagctaacagtatttttgcttctgtgggagaacagtggctatccctagtgcatgccaagacttgaggactggttcctgaagctttgatgggacaaatcttttatttcctgaaactgaattttttcactatttttcttctctttatgggaacatgtgtatggtgtgtacatatatatgaaaaatatttgtgtaagctcacatgcatgtggaggcctgaggctgatgttggggatctcctctattgctctcccccttattctttgaggcagggtctctgactggtgtggctctccttcctagcctgcatgctctggggattccctgtctccatcttttgaggctgaaattgcaggtgggccacctgggtcaccatgcccacatggcatttccatgtgctctagggatctgaaatcaggttcctctagtttgggtgcaagtgtttttaaacacttattgatctgcccatctcagaaacttgaattttcttctatggcatacagcatcctcaaactcatgatgtggggagatgtttgttaagtacacacatgtcaacctaacatgtgaagctgctcaggcttgtgtactaccacacatgtaaatgtataatgctttgtgtcttaaaataaaaatttgcatatgttttattggtgtccattattgtgccaaaacactacgaccaaggcaacgtataaaagaaagcatttaattgggcttatggtttcagagggtgagagtctgtgatgccatggggaagtcatggtggcaggaacagctgagagctcatatcttgattgaaaagcaggaagcagagagcatcctgggaatagcttgtctttttgaaacctcaaagcccacctgacacacctcctccgataaggacacaccttctaatccttcccaaacagttccaccaattgaggaccaagtgttcaaacatatgaacctatgggggccattctcttcaaaccacacacgtttattctagaaattaagatgtaatagagatttgccttgtatgtatacatgctcgtgtggtgggtgaaagcatgtaggtgtgtgcattggccagagatcaactttagtcatcattcctcctgtgccatttaccttggttttttggctttgtttcaagacagggtctctcattggcctagagcttactcggtgagtgactctggctggccagcaagccaaagccacctgctgtgttttgcttccccagtgctgagatcacacatggaggtgcaccaccatgcttggcttttaacatacaggttctgggactcacactcaggtcctcttgcatgcaaaccaagccctttattggctgagtcatcgccctggctgccccacgactggctgtggaaatgacttcatagaggcacaggttctcaaggattctcaaggatcataggaatgccatgaccagcgcttctacccaagtaagacaatgtgagaggaggtggccgtgcccaccaagccagggagcacacaatgggcgaccctgagcacgcagctgtcccgcagggatgccagcctcggaaccatgtctggagtgaacggtttttaattttgacagtaatcttgctcactatcatatttaccatgaataaaaggattttaagccagatcatgaaaaaaaatgtatagaacatctttaaaaaaaatcactggatgagaaatcctctttatgtaattaccagataaacaccttctcttgctgcctgcgtgttgtagtggttagggaataatgttcctatttcctaccaccttataacgcagtgtggccccactccccatgttccctttgaagacttaaaaggcacttcccatgcgctacagaaaatgtggtttctgctagattaatgcccaattgcgccgacaggatggagacataagaaaatcaactaaattagaagtactgaagcttcgggttttaactacaatttcacgatcatgtgactgtctttgacaaagcttttgccactggtccccttcatcacttttagtttgatttattcatactgttacctattttgcagagcttctttgtcccttcagttttcctcagagtttttgttagcaggctatctttaatgagatgacccggccacacccctctgtatgctttaacttcagaataaaatctcccttcttattgccggattaacattaaaaaacaagccaccatgttcctctccactgctattctaggatttaagattagaagactagaaggaaaacatgcttagctgtttgaggttccaggcgccaaaccctgagcctcacccatgttgggcagacacttttccctgatccacatccctggcccaagaaagtcagtttgggggaccattgtcccactcacccatgctgtggccttcacatatatgtctatcataggatgaaatgatatgctccacctagaagagtatgttcccctctgagaaggtacaatacatcaacctgcagagaactcttctagaaaaggaaccgatgctaatgcttcagcagccacaagaagacaaaacctttcggctaacctccaaaggaaacctttgcagttctgtaagctgcctctgggccttttctccagggagcagagacagcatcagatggatactgggccctagagaaagtcaccctgatggcatttgtgaagggcataactaatcttgcctgaattctgattagtcaaaaacagtgacttgtgaacctgggctttgaggataatttaaaacctcaacttccaccaaattctcaaccgataaagcagttcttggtagctgagtcctactgcatgacgacagtggactgcattctagagatggattcacagaacttacacatgtttggatgtggactattccctttaaaggtcctcaatcaaaccgtgcgaaattctctatcaaaaactgttgctggaatcgggaagatgtaacaatatgaaaaaaaaaaccacatcagtgttatttaaaccaaacaaagcagctctaactttactatgacatcttaatcacctctactaacttgctcgacatggcactgtgtgagagcggggctttgcgctctgtgattgttgtagcctgatggatttctttctcctcagttcacctgcgctctccaaactctgtattttctttattaaagatgatttgatctcagcttttattacatctgagaatgagacacagatgaagataggaagggattctatttcatgaagcaggtttgcttgaaacgtgaaatcagagaaaagaaacctcgtgaaatgtagataggaaaatcaaaggaacaaagaagttatatgaagagaagaaaacctggaaatggaaacaaaccaagacccagtgtggagaaagaggaacaaagagtcacatgtttattctaggagagcctgctgccctgtgggttcaagtttgggtctggaatgctcagaaaggcttggggtctagctggtggtggaactgtgaggtggcgacgcgggacctggttgtaggaggtaaactgaggcacatccttgaaggggatacagagaacctgtcctttcgcttctccttcccagctgccatggtgtgagtgactttgttatatatactcccccatgacttctgccttccactcaggtacaatgtgatagggaccaagatactaaaggctcatagttctgaaacagaagccaaagcaaaccatctctcctttaataatttatttcagggtactttagcccccacggtaactgaaagctgattaacacactacaatttgagcagatcaccagagaaaccacactctaaccctgttttaaaccacactgcccttgcctagtgtgccttgtgtgtctatactgatggtataggacagaattctctcccttctcgggtaaatactccactggacgaagaagagaagagagaggctcagtgtgcattgttgacctaaacctgaatgacttctatccatcttgtcttttgacacagggtctctcatcgcacggagttcagtgatttagcaaggctggctgaatagcaagctctagagatcttcctgtccttcaactctccagttctgggattactatcagacaatatcctgtctggattgtggtgatgttgtgtctgtcgattctggggattgaactcagggcactttactaaataagctattactccagccctcccaagggtcttttgacacagtcaataccctgtattttgtgaaaacaaaccaagaggaagtgaaataatttggatactctctcccatcttcttcattcctgaagttccatttaagtgtgtgtagaataatgagttgctggaactttttcaaatattggaagatctgacgaaggtattctctgaagaactgactaaacaccccacagtgtccccatcacagagagaaaaacaaggaagctccctcaaggtggagatgtcagccagacagaattccttcttgcatggcctcagcatcaaggcttctgctccctttcgggtacacctgtccctgcgtgctccctgggcactccagatggttttatgtaaccatgctaaaaactgtcctgagaccttggaaactcaggtagatccagagttcctagcaatacaaatttacagagttcctgacgttcaggtttatcaaaggctcatgtgctgtaagaatttgagtttggatcagacagtaacatacagaagtccctctggccagacttttccctggtggccacactcaccattaaatcatgaggaaactggtgtttggggtctcccttctgctccaaacatgaactctccctttcttgtcaattctgacctactacaaaagctgttaccattgaggacacgggctccgtgtctaataaacgcagggaagagatgagcacagctcactcacatgtatagtacgctcctcggagcagagtgtgtgggcattaaatggttcgagaacactttgcatatgcaaaggagtgtttccgtgtagccacgttatttgaattaaaccagctttttcagtaggagtggaatggtgaagcccttgttcaagatctacaagccactcacctcatttggcatggggatgcgtgtaaatccacacaggatctcagcaagcacaagacacatggttcagaggtgaggaaacagacccagaaagctggggttgcctatctcagacactattatttcacaaccccttcatctctcaatctcacaaagtatcggagcccactggttgtgatattaaatggctggtctctcacatacaaatgctgaatcacttctggaaatttcagcatctatttttccaagatttttaaaagatacaattagtaccaaaaccccaaggaaatgagcttgcccgataaccttaccccatgccaagcagtgtgtgcagagtaactgctgtcttaactaattgcttgtaatggggctcgggctggcctggcctattacaagccattagcaagggtcttgtggctttaccgtacaccgttttcattcccacaactcacatcttgacggcatcagctactctctggaagaaagccagcatttctgagtaaaatatatcagtcctaacaatgtggatattattattccagaaagccgactgagaattcaacaagaccttacagtaatgaccagaactgggaaacgaggattttcttcggcacagcagggagaaagcttttcgctggggtgatgaaaacgagagatgtgaacatccctctttaagctggaaataagtgactgagggtctgcatgctcaataaaacatctgggttgcagtttcatattctgcaaaccttacggtcttgggtcacagtctactgaccagtcagaccgcgtctaggttcactggctggtgaaagtcacctctttttagagaaagttttttcttctctagctctgcattttgttgagtggagcagatacagcataatcaggttcagcttgctgtcatcatctcgtccctctgaagagctatcgtccccttcttcactcactccacacagtctccaaaggagccttgtcaaaacctgtgactccaagtacaccacttgagtgacatacaactttatcatcagttaatgaatgtttttggtttatttattatttgtttttatttgatgtgtatcagtgcttgcctgcatgtatatatgttaactgaacgtgtccctgatgtccacagaggccagaagagggcactggatcccatgaaactgcagttatggcctgctgtgaacccccagggggtgctggcaacagaacctgtgtcctctgcaagagcagcaagtgttcttaactgctcagccatctcttctggctaaggaacctttgttgtatctactacatagcagacggcggtaaaatgttatctttgtggatggtacacacattatattctcccaatagctctggtccaatgtctggcaaggaggatttactctagctcacagtttcaacgtggagacaggggcatggcagcagtaccacgtggcagggactctttacatctaagaagaacaggaagcagactgcagacaagaagtagtcctgggctaagaagctcaaggccccaggagcccacttcttccctcaaggcctctaggggactgtacaacccttcccaaacagctctgccagctgtagaaccaagtgtcaaatccatgagcctaagagtgacatttcccatgcaaaccacaccacttcatttctgagttcccaaatggaccccagactcacgtcctcagtttcttcttaggccctgtgcccacagacaggaagccagtctggggcgaacacttctctttgccaccagccctgcaactcttgtccccctctcttgttcaatacccacaaccacacagaccagaagactaaaagatgctccgtgatcagcgaggcccctttaactctccgttaccgtgccgtctcctcaatgtgtgctcttagtcttgctgccagagagtgaatcattctagatttttcttttatttccaagatgtcttgtcatttcttgtggattatgattatgctttcttttaaattgcacttattctctcccctccccgcccccctggctcccccactctcgtgtgtgtgtgtgtgtgtgtgtgtgtgtgtgtgtgtgtgtgtgtgtgtgtgtgtggtttgtgtgtgtgtgtggtgtatgtatatgtatatgtgtctgtgtctctgtgtgtgtggtgtggtattgtgtgtgtgtgtggtggtgtgtgtggtgtgtgtgtgtggtgtgtgtgtgtgtagtgttatgtgtggtattgtgtgtggtgtgtgtgtgtgtgtagtgttatatgtggtattgtgtggtgtgtgtgtgtgtgtgtagtgttatgtgtggtattgtgtgtggggtgtgtgtgtgtgtagtgttatgtgtggtattgtgtggtgtgtgtgtgtggtgtatgtgtggtgtgtgtgtgtgtgtgtggtgtggtatgtgtggtatgtgtgatgtgtgtgtggtgtgtatggtgtgtgtgtgtgtgtgtgtgtgtggtgtatatgttgggtgtgtggtgttgtgtggtgtggtgtgtggcgtatgtgtgtggtatgtgtgatgtgtgtgtgtgtgatgtgtgtgtgtgtggtgtctgtgtgtgtctctgtgtggtgtgtgtgtgtgtgtgtgtgtgtgtgtgtgtgtgtgtttgtgtgtgtgtgtgtgtgtgtgtgtatgtgtgtgtgtgtgtgtgtgtttaggtcagaggacaaactgcaaagttcagttctcttcttccacagagtgggtctggggacttgaactcaggtctttgggtgtggcagcagcgcctttaccacctcgtgccccagactgtgccttctcatgtgcccctctcaaccccaccttgggttcactgtctctgaatgggctctcttagctttccggatagaataaagactccaagctcccagtccctttgcactctgtgtcctggttggcacctgacctcttgaccgtcactcttgtcacagacacaccgtgcccccccccccccccttccacccaaccccctttaaccttcaaagctccaaggtgcaacctgaaggcagcttcccttcctaggttctgagctttgcagcaggccctgccctgctctacagtgttgcctgatgcagggctgtcactgcctttttattgacttcctgtctccctttctgcctttgagggaaagggaagcattggcctctgttctgagtccctgggtccagcctcatgcctgggacacagcaagcgctcacctgtgtttgctgagtgaatttatctttgagacacaaggtaagttcgactgtaagttagacactaagaactctattcctggacacaggagaatcagatgtccccacaaaggctgtcttctcttctgactccaacctccccatcctttaatattggatttgtgtgtgtttggccttagttaagtcgcagaccctggccttgggaggaggtggggggtgggtggactctacttcaagtccttattcgctgaacgccttgaatgagcctcagttttcacgtgacaggctcgtgaggtgaactaataagatgatgtgcaatcctgcaagcttagacactcttctcctgagccctccccgcctccccaccctccggaccccagactcacgtcctcagtttcttcttaggccctgtgcccacagacaggaagccagtctggggcgaacacttctctttgccaccagccctgcaactcttgtccccctctcttgttcaatacccacaaccacacagaccagaagatcacttctgtgaagcgtctctggtgcagaagttactgctttgccctctctactgcagccgctctctgtcatgtctgttttgttcagcaaatctatgcaagtgcccactgtgcaccaagcactaactctggactaggaagacactggagcacaaaaccatctgtgtaaatgtgctagtgggggtgtgttgtaacagtagaggataaagaagccagtgtgcgcaacaagtcacggctgtaaagaaatgctaaaaggatggggcccattttggaggcttatacttataaccctgacatgcaaggggctggggcaggaggactgtaagcttggggacagcctgtgctggagagcaagtcctggtctcaaaaaacagaggggggaagagatgacagagagagagagagagagagagagagagagagagagagagagagagaggagagaaaaggagagggaaggtagaggagggggggtaaggacaaagagagggagcagtgggaatgggattgggatggaaggtgacaggaaacacggccagcgacatgaaagagtcggggcacacgaaggccaacagactgcacacaaatgccaaggctgtggccaggcaaagaaaggcagagtgttttctaaacaaaacacaaacccacaatgtcaagctagctgaagtgtagctggctatgaaagcaggtaggtgaaatggacctggtaaggctggggccaacctgagtgggaggtccaggaggaactgcgtcctaggggaatgattacgtctcttcagtctctctggctgttggcaagtccgtcctcctccatgtggaactgtgaatctgtagaacagatcctgggagggtgcaaatgttttttttcttttccttgtgtttatcgtggtctggtgcagagtgtcccccagaaaacccttgtcgggttaacagagacagcctaagctttcacaactgcagtcatgatgttcctgtccttgtaccagccagctctctcttcccattagaattcctctcaggcttccctgccaccgcaaggctgtcatctgacttcctgtctcccagccaggtctactccctgccctgtggactgaattcttaaaattgctcctctgtacgggtgctgctgggtgggccgaggacagctgggctggcttgctctcagaggaagcagggcttctgtgttacacaggggtcctgactgagacttgaggggctgttcctgtgtgtggtgcattgtgggcacagcactccacccctttgggttccctgtgctacactgggcaggtcatctctaagctttggcctccttaaatgtataatggggtgatgttatcaggatcctcttggttgttgtgcagccttgacagagagtcaaggtcatctgtgtctgtgatagcttaagtgtgtgttgttttactgaactacactgcagttcctcaaggggctttgctcatgtgcagaccacgtttaacttttgagacagggctatgggaatgctgaaacggcacagaccaccatcctgtcgtcaagttacctactgtctcaagatctacaaatctctccctcgtcctctgaggtgtccccaccatgaatgcctaccctaggacagccagggacagtagggggtctctggggtcttaattcagttcacttggcttctgttctgccttctgactgacccactatgcgtactttaccaacggggcgattcacgagcagaggggtaaagcaggtgcccccaccccacttccatgggcttctttcctggattcaatcagtactctggagctgctcggactccttaccttactgcctcacccctgctccctccctgccccacccccgcccctgcagcccacccaaagcattttgacacaataaagctcaaatccctttgccctcatgtctagcgctgggacagagtctgaggtgatgggtccccacggagtgaggtagccacacggctatatactctcaacttctgtttcacaatagccagaggggttcacaccgggtgaacgtgcccacattacaaggtagcaatttctgggccttccatatggatgctaagtcaaaaacaagagcaatgcactgggcagttcctgcactggaggggtggccccaggccggaacttgagcagagccttccgaagctgaagacaccagtgggtagccaaggtggtggctgcccgcataaatgtgttttgaatcgcaaagacccctttggcttgcctagccacggaaacattttttaaaaagtgtcttattaagcccccaaatctttaaaataggttttagttaaaaatgaagcagttacctaattggcttcattagatccaattatgaaatcagggtagattaaaaagaatggaatcagaacatataatttcataattacaacagataacaataatgcaaaaacctaactggaaatggcactggagaaagcaatcgacaagtaaatctcagacaatttgaagtcttccatgaatccaaacatcccctgcccttgccggttactgctcacaaatatggtttagctaaacaagacctatttcaagttgcagactcagaaatcaatgttggaaagtcattagttctttttggctccttgtgtggctacagcaggtgagtgattagctttctttttgtctcatgagaaagatgaagccacccgtgatcacacattttcatgttcagcatgactggacttagaattgcccagaagacacacactgggtgtgcctatgagggcatttccagagggatttatctgggaaaggaagacccaccctgagtgtgagagtcaccacctcagggcaggaggttccagactgaatgcagagagaaagggggtgccagcacacgtgtttgccttcacttcctcccgattcctgcccccacatgcctattgctggtccctgaaccatggacgcaaacgaaccctccctctctcgagctgctcttcaagcattttatcacagcagtgggaaactaaaaaaactctctttctctggtcatagcagatagcttccagacaggacccattcttgaggctgagttaaactgaaagcctcacctattctcttccatgttccttgttcctcctgtgtgggatgggggagctgggctgcagcgtgccaggggcaggccacagtaaatgaaagcgctggtctgatggtgtggtgacagcaccctgtcaccttttggttttatagaaaggaaaagcctgctttcttgatgagaaattcaaatgtcaacctcttggagcagcttgatttggtgcatggttctacaaattatgtccagttgccagaaggctagaagagctagaaggaaattaatcactcattaattcactttttgttttacttattcattcagtgaatgttttaagcttcctcaaggaagcgataacttttgtttgtttgtttgtttgtttgtttgtttgttttgagacagggtttctctgtgtagctttggagcctatactggcactcactctggagaccaggctggcctcgaactcacagagatccgcctgtctctgcctcccgagagatgggattaaaggcgtgcgacaccaacacctggtggataacttcttatttagctgtaaacatcaaacttttagcatagtcccgagcatgttggggataacccgtgtctactgaattgcttctgacctatttcagatatcagttacccaggctgtgtgcagagcgaagagccagcaataccctactaaggccttcaataatattagtgtgtgtgtgtgaagagagactattgtgctaccaaaaaatatgaattaaactgtctttgtcaatactgcagacatcaggaagtagttgttaaaggttgaatgaacagaggtatgtagaggtgtaataatctgtcaggggtggcccctaaaagtcatggtcatggacagatagctaagggatcccagggacaaccaggatcagccatcccctgaatacacagggacctcctcttatgtgcagctctggtttggtgtgagccttttgtcaaattaagtagcaaatatcaccaaagcccccaatacatctccacagataacatgggtacctgagaatgtctccaagttgttggctaaaaatcttgtacactttctccaatgatctctgttctgtttgctgctccttagatgtcatctttgggatgacaggaaaagcaaacaggctttgtggtgctcgaagttttgccaggaaaaagccaggagctcctccgtgttcacctgcttctcccccccccccccccactttcctgggtgctcccttctcattctcattctcagttcccagtgacgccaatcctcttaccacaggcaaaagtttgctcgccaggagaaaacatgcacatttagcttggagatacaaacaccctctctaaccatctcccagactggtctgctctgtgctgattcaaatatccatgcactgtttagtaagaagcctgtttccagagttagggacactaatattttacaaagatttctgtcactggttggacacagaagcacaaacgtgctgtctgattctaaactccagaatgtggaattgtatgtgctaaaatctctgttggagaatcaggaccacacagccatacacccacaaagcctggagtgagaaagtttccgagttgggtgtgtaacatacaggcttttgctttgctggaatcagcaatcttccacctgaactgtcttatttgcatcaaacttgagctaatatgcctctcccttttctgctgattaaaataattcaggaaagaaacttggttctagagacatatagctaggacaagaacgagacttttcctgctagcctaaacttgtagactcttatctctcctgggcttttctggaaaagggctctgacataggtgggcagggcaggacctcaataagaactgtgacacttagacactcaaagggattgcctgataaaatgctgctcggatgtcaggtctgaagatggtttcatgtcttcactgtagttttctttgcaggaagagatttccatctcatggagcccagagctcacacctgacgcttcttgtggctgttaacttgacattttcagcccctggagcctcctgccttcttgtcctatttatctgtggtgtgtctgtctgccttcagtttcctaagcaggttcccagctgtgacttggcctctccccctctctttgcattgccttcctctgctcaccttgctagcctactggctcagatgctgtcccagtgagaactatgtaagtccctacacttgccaggaatggtggctgcacctatacacccgcattaggaagatgaaggctggataattgggagttccaggacaacctggattacacagcgacaagaccattaagagcaacaatgcaggcactgtaccaggcagtgctgtgtagtaacatctagccctgtcagtgaatttgtgttaatcaccacacccctttgggtgtggcttcaggtgtggacatgaccagaaggtagaggagtgcagcaggtcaggctccctggctggcatcggaaggaacaggaacacccactgttctttactcttatctgtgtaagttgttccccaataaaacacccatttatcatttatcttgggtctagtgaattcaccaatcccctgctttcagtgcggccatgaccctgaacatacacactcctgtctgtcagggagaacacagcagtctctccacattagttgagggtaagagatgggtccaggactcacctacaatccccaggaccctgcagcagagatgaggttcctcccatttcactgtccccaaaattcactattctcaatttccaatctcacttcagaccctggtctcttccccaaacggcttctcctcctgacagaggtcctatcccaatgacaccatctttctcgtctgcatgcctagcctaggttgttgtgccaggtttgtccagccctccttccccaccgtcacctctgtctcactcactgttaaatgccatcagtggtgctatcttttccttttcccagaagcttgcaccccacctcctgacaccatcccaggccacactgctctctgggcagtgaccttcagtggatttctgttgctagtgtcagctcagctcagacgctgacatgtactactcagaatttcaactgggctttttctgccatctctcagaaattcctccaagtgagtctcctacgagcagtgaaactgggccactaaggaggccctgagtatctgaccggcctcaattgtccattccattggatgggtcagcacctgagaggtcagtagggcaccatgtgggaatgacatgtgtgaagatgaggacctggctggagacaatcagaccaccatggctgcgacccagtgagtgatcgatccactggtgaacttgctatcacactgagctactgggaggtgaggcctcactggggaagggcatgtccctagagcctccatcttgcccttgccccttcccgttccggctccactctgcttcctatccaccaagttgtgggcatttctgcttcctgctggccattaggtgaagagtctcccgctgttgtgataccttgccttatactgggccctgaatgcagagctaggtggttgtgcgctgaacctgtggaaccatgagcaaaatgactctttcagtgccaggtaacagctcagtgggaaaagtgcttgctgtttgcaagagcagggactaggtttggatccttggcatggtagcatgtgtgcctgcaactccagtgctgggtaggggtgtggtggagataaatggatccttggagctcactgagcagccagtttagctgaaatggtaaactccagtgtcataattatgtttgctgtaataaggcaccatgacaaaggtaacttatagaagaaagagtttatttggcttatggttccagagggttagaggccatggcctttgtggtagagagcatggaagcaggcaggcatggagctggagccatagctaagagcttacatattgatccacaagcacaaggcagggagagctaaccgggaatgtcaaaggcttttgaaacctctaagccacccccagccagacacctcctccacaaggctatacctcccaatccttcacagacatttccaccaagtgcagatcaagtatgaaaatatacaagcctgtgggagtcactctcattcaaactatcacattgagatttgaagagcgactatctcagaacaaatataaggtagaaagtgataacgatagagacatatacatgatgtcaacttctggcttccacatatgtaggtgtatgcaggcacaactacaactccccacctcaagagtatgcgtgctaacacacacacacacacacacacacacacacacacacacacacctttcttcctttgaggcctgacaggtgtgtgtttgtcacactgaccatgaaagctaactaacacctctgaaggtctgagtgacttactgccagcctgtgtttggctgtttctcacaggaactcactctgatccagcagacaaacctcactgcacaagtcctgccttgtccattaccccccaggccacacagacaccctgacactcttttccacacggagcaccactctgactttcagcctctttggattctcatcacatgactgggcacacctggtatacccacttccagctggttgttcccccacaattgagttctacagaagggggcgtattctgtattcccagaaatattttatacaaaagacttgaggggagccagataaacacagttattccttttacagccgtgaggtcacattctgtaagttctgcatctcagatgcccttctcctgatgagcagctgggaaatgtttcccacaaacactgtccagaatgtgtggccacagccatgacagagtccctcaggggactcattacctttcccccacatttagaaaagaggagagagagataaatgtgagggacagacaaactactagattctgtccatctcaaaggaaggatgcagagaaagcagccataatcagaaatcaggaatgagaatgcctgaaagatgccaaggtacggaagctctttatacaaagtgttctggagacacacaagcacgtcaacactgtgtcaacccacactgttaataagacaatgcccagatggatggatgggtggatgaaggctggatggatggatggatgatggatgaatggatggatggatggatgggtaagcaggctgtggccagtactgtgtctttgtttatctaaataggtgacctgctccttcagggtcaggtcaaagccactttccttaccttactgactctccttaacccctcttcttagttccctctcctcaccttgatctcctcacctcactcccccacacaagtaccattcttaggactgaacagaagggtcagctgttctctaaaaccagaaagtggcattctcccaccaggctcccctagaacatccaaaaccccacacaagatgttttcaattattgattttggaaattcaaggactcttttgaagcatgacttttgtttgcatgtgacaatatgaaacttccagatttgagaactgagaggtccagtgatgactggaggtttggggccagaggttagagactttagtaggaaactcttcactacacagataatccctgaaaacatgttatctgttcactggagacacagatttgatggataacaaggatgatgtcagcaatgtcaaaattatccagtaactgacaagcctatgtaaagtctcacaaaaaagccagagctagaacatctctcacctaagaggaaggcaggggagagatggacactgaaggcctctgatacggtcacagttagagaatcaggactggctgaggcagccttactcaccgtgatcatctgagccacgtagctctcaggccctgtgtattctgtcgggtccttcaccttcaccaggacgatgaagtacaagtaatgccacatgttgtgctctgatttaatgtgttcttcaaaggagactgtcttgttgtcaaatttgtccctctccaggcctgcaaaacacaggaaacactatatgtaatttttctgttaatcatgacttcttcacataataaaaatgaccattattaaaaaatcaacaacaaacctgctttctggaagagtgtgcctctttaaaatactgttacaattagaaacaacaatacagaaaagctctagataaaagaggctgtggtttatagactcattcccaactaacatgtattttcctccccgtgatccttgggagtgtgcagttctattacagaggtcagaattgcaggtgatcttaaatgtagaccatataaaactatcaaactcaaccaggccaaaagcataagcggaaagagacaatgataattgttcaagaaaaggaaagcatttgccacagaagccaggtaatctgcatttgattactggagttcacagaaggtccagttcagcagagcacacctgtaaccctaacattcctactgcacggtgggaagcagagaccggagatatgcctggaagctcacaggcatcagaaacgcaagagagaccctgcctcaaaacaaggtggaaggcaagaagtgactccaaagttgtcctctgacccccacatgtatgtgctgtggcgctcacacaggctgatgctcgcgcacactcacacactcatacacactcacaggcacaataaggatttcagaaagaaaacaacaaataaaaggaatgctggctaattgtggcaggaataaaaaaagagattcctttccatcaaggccttgggttaaaggaaagcatctgagtcgtgccttcagtcacttgcaaccagagacagccctgagcacactgtgcaggggtaaggactctcctcagggcccctggtccatgacactcagggaagctggggcttgggtggccacttcaattctcaggtgtcctagtcagtggtattactactgtgatgaagcaccatggccaaaagtaagctggggagaagggttcatttggctcacacttccacaccagtcatcactgaagaagtcagggcaggaacctggaggcaggagctcattgatacagaggccatggagggtgctgcttactggcttgcttcttatggcttgctcagcctgctttcttgaagaccccaggactatcggcccagggatggcaccacccacaatgggctgggcctccctacttcagtcactaattaagaaaatgccctacagacttgcctacagccccatcttacggaggcatttccttaattgaggttccctcccctctgatgactctagcttgtgtcaaattgaaataaaactttacagcccaatcaatcccttgtcaacacaaaaacatcactgtaaagtcacaacctttcctttcttgttcatccccaagatcacacatttaatataaacatcacattgtaaaacattttacaaacttaaaagtcccacagccttacaaactcaaaaaacagttcctcctctttaaaagaccccaagtctcttttaaaatcaaaagtctctaaactgtgggtcctataaaataagaaaataagttaaataataaattcttacttcaagagggaagagtcagagcacagttaaaatcagagcaaagcaaaaccaagctccaacagcgtaaacaactcaacgttcaatgtctggattctttattatcttctgggctccttcaaggggcttgggtcgctcctccagcaccacacacacagctcatactctaagctgacccaggctccactccactgcggctgctgtccttgatggtcacctcatagcactggcatctccccaaaacacaaggccaggtctgtcacagcaacaccccaccatcctggcacaatttatgtcctgtttagtaaccctattgcttccatgaggcaccacgacgaggagcaaactggaaggaaagagtttgtttggcttacactcccaattcatagaccatcaatgaaggaagtcgaggcaggaacgcaagcagggctgggacctggagacaggagctgatgcttactggccttcttatgggaggatttgagtggtcaggcttttctcttcaagcgaggagcttatgaagacagtaaatggagaggaagagaaacatccatgggaaaacaactcttactggtgtgggagacgggatgtcagggttgagttcatctttgctgttcagatagtagaggagacgccaggaaactgagttcagtcctgactactccttccctgtgcactccacaggttgtccactgcggctgctgtccttgatggtcacctcatagcactggcacatttcaaaggtcatgaagaaacctttctttaagcatgttacaaaacaaatacatttaagaatatctgtccccagtgatgggttgacttttgaagttgttattggatttttttttatgaaaatgctgtataaaatacagccatctggtgatggtacctcatttcacttgaccaattatcagttcagcgtgtcggacatgagctccaatgtgttcccaccacagcctccctctggttatatagtggctactccagtgttgttgtccaagtcattatcccaggagtcatccttggcttttctctgcttctcacacgccatacccaatctacgttgaaattcctctatttcttccttcagcacatatccacatgtgtctgtctgtgttgaagggcctcctctgctgaggccgtgctctgagctattgccttccggtgtgtgtgtggatcatctcattatcggcccaggctgcctgtgtccacctgtgccctctactctcagcaggggagctggagtcactcctggaaaacctcacaatgtggaggctctgcttggctgtggccctcacagcagcccctcacaatagccggtagagagggcttacacagtattagataaaacacagatgttaagattgagacatccagtgacagctgaattccatatagatggtggagatagtgtgtgggggcgggcagggtatgggactcctactctggctctctctgacctactcacttgagacaggttctcatactgaagctggagacacactgacagctagcaactcagagttgctcatgtctccgtctccatgaggcaggggttaacaaccctgcctgtagcggtgccaggtgtttcatgtggatgctgagttctgaactcaggtctcaggcttgaaaccttggccactgaattctctctccagctccagaatttttgattggagtaagtgatgcctagggaataggttgggttgtgtccatgaggctgtttccagagacatccaactgagaggagaaaacctcctttgaatatgggagagaccatcccacaggccagacacaaaggactgcatcaggatggaagaaggcagctgagtgccagccttctgggttctgcttccttatctactaaggtgtgagtcagcagcccccctctgacacaggcaggacaggtccctgaaaatgtcctgcctgccatgaggtctattgtcttttctggagtagaagcccaagcaaacccctcctccttacataggagtatgccaggtgtccaattacagagaagaggaaactaaacacaaggtatagttatttagtctgtctgtgtctcatgtaacgtttaggtgctaactcccacgtggcctggctccactgctgctctgacctcacctcctcacctccccctgctggtgcataagcagccatgctggcctctgctattccacagaccgattcctccatcaggggccgaggctaggcatttcctctggccacagaactcattcgctgctgtgtccttggctaactcattcatgaatgtttctggtgaactctgattggcaggtgacttagggtgacacagtgtccccacacacacacagtccctccccattggtgacacagtgtcctgcacacacacagtccctccccattggtgacacagtgtcctgcacacacacagtcccttgtcatttcctggcactctgggccatctgtcactatgcctctcctttcctagttcaccactttctatcacactgacaatagcagtgtggaaattgctaaattacactggatcccaattcgactcataggtaacagagtagccatgccttcgagggagagcctgctgcgggccagcacggaggaagaaatgtgctcccccacgaatccgtgcacatacatctatactcactccttccttgtcttattctgtttttgagacagtgtctcattatttagccctggctggattggaacttgctatgtaaaaaaaaaaggctggcttcagtaataggatcttaatgcatcagtttcctgattgccgggcttataggcgtgtttgaccaagcctggcctaatatttattactcacatgctttcccgactacagatacctgtgcctctgctcttcaccatggccctaagactttacaactgtctgacacacagttgacattcaatgaaaccgagattggatgagttaagagcactcagtagtaaaatgtatttccactaaagttgaaagcagatgatgacagtgctgggagggtctggaaatactgggccctcaggctactaaaagaaatgtaaaacagggcagcagctttgcaaaacaagccatttctaaagaattctcacagtcaccgcatgacttgggagatcatgcccaggtgcccatgaagggagaatgtacgtacacacagcaccctgctcaaggatggtcactgcaacacagttcctgcaaccccaaagttgaaaaaaaaacccaatgcccacccgtgaggagcagaaagaagacttctgatatcggtctcagcatccgatagaacactctgctcaatagaaaggctggaagcacttacgtgaggtattacgcagcatgagggctaattttgattttcaatctgaattaataaaaaaaactgggggagctggaaagatatcttagtggttaagagcattcagggctcttgcagaggaccatatggcagcttccgacggcctgtacttccaggtccagtggatctgatgccctcttctggcctctgatgaccatatatatggttctcatatagggcacataaaccacacacacacacacacacacacacacacacacacacacgtgcgtgttgtggagttgcctccagggagagttaactgaggaaggaaggaacagcccgaatgtgagaggtgccatcctatgggctagagaactggaatgagtgaaggggggaggggaagcaggtgagcactgacattcaccttctcttctcagtctactgagatgtgagcacaacacctcccacagccaccatggactcccaggagctggcccactgccataccgtactgccacgagggactgtatctcctgaactgtgagcctaagggaacccttccccctgcatgttgctcagtcagatagtctgtcagccatggggaaagtgaccagcacagacaggagccttgcaagcatcaagctagtgataaagaccagatatcttaactgaatcttcaaaacaggaaaaggtacagatgcagagagcagatcagcggtcggccagggcacagggtgatgggaggctgctgagaacatgatggatgagtgttatgggaaggggcagtaaatatgtcctgaaatggatcataaagttgtgtgcccagttctgaatacgttaaaggcactgcactgtaggccttaagttggtgagttttaaggacatcacaatagagctattgattaaaaagaagagtattaaagtaagattccccagaattaaattcaagcctctcccctgtctgcaaagtaatagagtattaaagtactgattccatcatcactcaccctagaatgtggtagcgggaccaggtaacgtgcaatgctctgaagcagcttgtgtgggcaagggagcatagcggacaagatgacaaacggcttcgaggaggcagacagctttacagactctcagaagatgacttcagcaagcggaagagaggtacatgctcgtaaattctacctgggttttattgagcacctatttctgctggcgaccacaaagctgtctaaaaaccctaccatccgacatgacgtttatccacaccaagaaacagatccagaacggttcaagctaacccctgtagttaggtgaagaatcagtcagcattgaacagagccactcctgactctaaaggtccacatgggcgaaggcctcgaggtggcaaagctagagacgaatgtgggtggcctggtgtagaaaaggtcacccgtctactgtggtgctcaaactgaaatctatggcatttcccctttgtgctgtggactcgtgggtggaaacagcagcttcagaactatacttgaagtagttcttggggcagaactttgggggatggtaggggagactgatggagagggcaaggagccaggacaatggaggagaatggataagttgggggtcatgttgacttcatgctcataggctcttgctctctggagtgcggcattcacttccatatctagcagctggctagagaactccacagggctagctcctgggcttatccaacttagctcactgaaaagttgtttctctgcccccctttccacttctgataacaatcaggatgtcccatgggctggcacttgaagccactctcagactcctgtgctgacctcttcgtggacctttcttccaccctccaaattctccatgttctcagaaagactcttgtctccagctgcctctcttccaccttgcaggtgcttcttctccaagacccagctcagcctttggcgccaccggctcccacagacacaaccagatggatgatcccctgtctgcttagattttgaatgccccctacagattacccagacaaccacaggaattcaactaaacttgatggaagaactgaataaatgatggagaagactgaagaaacatttcagagtgaaaacccgagagggcataaaatctacttggactaggagaataagagaaatcaagagtgacttttattctctgccttgagtttctggtaacacccaccacagcacttctctttaccatggagctaacctgttatccaggcctctttgtgtgtgtgtgtgtgtgtgtgtgtgtgtgtgtgtgtgtgtgtgtgtgtggtgttggtgtatatacacacatgtgtgcagatgctcacaaaggccacaagaggcatgagagcactggagctggagctacaggtggttggaagccacccacatggatgctgggaaccaaagtctagtcttctacatgcttagcgtgtgttctttactgctgagacagctctctgtccccagtttacattattttcttttggtaaaaggaaatcaaacttggttcttcacatatggtgggcaaatgctcaactatagatccccagcccacattttttcaaagtttcaatttcatttcagatatgcacacaaatttgctctacttcacgatattctattgattataatacaaaaattttgtttagatttactctgagcttaggttaccaaacagcccctcagtcttttgaataagcatgaagcttccagaaaaatcaatatagacttgattgacatagcatcaccctgagcctctggatatgtcatccgtgccttggcgtgtcatgtcactgagacaataccaagtttgtggcaaaatttggagccatctatagtcagagccaggttttgtctgtgtactcgtgtgctacatacattcttatgtgcacacatgcatgtcgaggccagggggggatgttgagcattttctcaagcacttctcactttgcttgagtactacatggacagccagtgagcaccagtaagcctgccccacctcctaaagttcacaggctcacgttttcgatgtgagtgcgaacatctggatggccagcgtgccacaggctcacaccgccgtgcccagcttcccatgtgggtgtgaacgtctgagctcaggccttcatgcttgatggccagcacttcactgaactatctctccagtctgcatctaggttttgatatgaagtacagatcaactcagtattgatctttcttcccttccttgcgtacctgacgagcaatgtcatgttgatttactgtcattcattaacaaacactgatgaatgagcccgacatcaaacacgggagaataaaaacggttaatacgtctatgggtctacctctcctgaagaagcacagttagcttcacctctgcacaatagtagagaattttataaacaagatctcgattaccgctaccacagcctcaaagcctggctgcagactctcctcattccagagcagcaaagagaagctcagggaaagaaggttggccaaagctacatcatcaggccatgggactgtggaaggctgtgtctgcctgtctaagaggttcacatgctttctacagtatgagggtgcatgctgtcaagaagaagcaaacagatgtcactgagcatggcgtgatgacagccattcaggagcacccatgcttatcctgccgagtgagcctgcaaaagggttcatgaatcctagtattggggctgggcctcagagacagggtgagtgctatggctcacaggggtttggtatttcaaccagaacattcgctcactactgtgaatacagagtccaggatgagaacgacagggaatgcacttggactggatttgaaacataaactggataaaaatacactaaagaatgggaagaggaagggggaagaagaagagagagaagagggagaggaggagggagatgggtctagattgtaaagtgtcttattgccaggaaaattagaagtttacagcaatggatggcaccatgttactgagggcttttgtactaggaaagttagtctagcagcactgagccggcccatgtgtggctgtgagaatttgtgacaggatgtagtaagaacctgtggaggcagatctgtcagcccagggaggctgaagtgttggaaggagacagcagagatactgatgtgagggggagcttccagccctgctcaccgaaggcagagacacatgtctgtggctaccatatgccagccaggatctggagctgagcagaggaaggcagagaagagagggcactgggtttgggctgggtccacgtggctgccaggaggctgtgccagcttcagtctagtaaacatgaaatagaaaatgaagcctggggagtgtggtgctggtgatgtgtactcggcaaaagcgaggttacatgggtatgggagaaaagtgtagtgagacagtgtcggggatgggagaaaagtgtagtgagacagtgtcggggatggatgggagaaaagtgtagtgagacagtgtcggggatgggggtcaaggcaaaaatcaaaacctcttttctagagagctcttttctctagagagctagtataaaggaatgggacatcactgggagccaaagacacagacaaagaggactgtcctttggacggcaatattcaaacaatttactgtgaaaagtgaaaacagtgatgggtgtcccataaagaagagaaattagaggactttgattttgtttttctttctttcctccaaaatgcacgggtctagttctctcccaggatgaaagaagcattccttcaggtgtccagacgtgtttcttctccatacccctgagttgtcacaggacatctctttggctgtatcaccccaacctcattttccttcatccagttagacatggacaacagattgttatttggcctcagctctcttctagcaaatctgagctctgcactgagcagcctgctctgtaaaccaccaaagcatcccaagtgacaaaccgaagggcaaggttcttcccaagggacaaaccgaagggcaaggttcttcctaagtgacaaaccccagggcaaggttcttcccaagtgacaaaccaaaggacagggtcttcccaagtgacaaacctgaagggcaaggttcttcccaagtgacaaaccaaaggacagggtcttcccaagtgacaaaccaaaggacaagtgtcttcccaagtgacaaactgaagggcaaggttcttcccaagtgacaaaccaaaggacaagtgtcttcccaagtgacaaagccaaaggacaggatcttcccaaatgacaaaccaaaggacagggtcttcctaagtgacaaaccaaaggacagggtcttcccaagtgacaaaccaaaggacagggtcttcccaagtgacaaaccaaaggacagggtcttccattcatgttattggttttgtttgccttgctctggcatttggtcacaaattatacgtgtgtgtgtgtgtgtgtgtgtgtgtgtgtgtgtgtgtgtgtgtgtgtgcttacatatatgtacacatgcatagatgaatatgagaaagggggagggaggaagaagaagagaggcaatatcacgagccatgaagacacagaaacaatgcagatctcagagctcttgcttctcttcatgttgagtggcagaagcaagctctcttctagatgcttttgtcaacaattgtgccacctttataaagtgaagacttggggagtctgtcataatgcacaggacctgaggaacccctgaagcattttcatcttagctcacagacacatcattcttggcatcatgacaccaggctcaggagatcatcctccacctggatctgcccacagccacccaaagagggattcccacaaggttcttgtctttgcacggcttggctcgtccactccttttctggaattgctccaatctgggtcaccctccaggaggaacaccaaagggctgctcaggatatcaccatgtactgatgtggatccaggggccagaagtggcatgctgagccctccctgagacaggcccgctggcctcagcagcaacagcgcagcccaccatgctggagccagcagtgtggaatgtgcgcacacattctcagatgtctctgccgtgtcctccagtctcctcgcgaactttccacccatgttctctctctcctgacccttggtgggtgctgcttcctgcttacacaccacttgccccaccaagcagttgtccttcatgctccagattttgctgtaatctgtgggctgggggctgactgccactgtctacagactctcaagtcccgcacttccccgaggtaaattctgggtattcatgcctcacctccccatactcagcctctttgtatcacccatgcacccagtcatttctcatctcattcccaaacatcagcacttcaaagttctggagctggagagaaggctccatgattaagagcacttgctggtcttacagaggacctgggtctggttcccagcacctccatagtggctcacagttgcccacaactctggcctctggtgcacatacatatatacaagctaatcaggaatgtgcataaataaaaacaaatccacattttaaaaagattttaagattctgggctggagagatggctcagaggttaagagcactgactgctcttccagaggtcttgagttcaattcccagcaaccacatggtggctcacaaccatccgtcatgagatctggtgccctcttctggcctgcagggatacatgcagacagaatactgtatgcataataaataagtaaataaataaataaataaataaataaataaataaaaagattttaagattctatcacctaactttcttgactcggccttgcacccctaacactgcaccacaggctatcactgatcttccttacttgtcatctgggctgtggtactaaccagttactctgccttcaggtcaatcccctgatgaaggactccccagagctactgcaatgctctcaaacaaaagctagactcagagcttttccacctacagtaagactctgaggctcacaccgacaacaccttgtccctctgctatggtgtctgtaggaaagtcctacagcactaaggcacatgctttagtgctcagaacccagctggttaggggtctgagaacttggggaagtgggcctatctggaggaccaggcacgagtacagcaggccttgaggtgtgtagctcatctccatttcctgaccagctagcatgtaaacaagcagcctcacatccctacagccagagctgagaggtgctctcactgccgtccctgccctgtcatggtggtccaaaccttcaaaccagaacccgaatagacctctcatccagtaagctgcagtgtctggttacagcgacactcaaagcgagccccaggctgtgcccatactgtttctgtgccacctctggtcctggctgttctgctccacccacttcagcaactaactgatgccctttgtccctgatcaccacctctgtgccatgtgtccagggaaacatgttggctgttactgctccccgccctgactgcagaggtgtctgtcctcttagcaccttcagtaacccagaaaggtctctgttacttcccttgatacataagagatctgtgtgtgtgtgtgtgtgtgtgtgtgtgtgtgtgtgtgtctgtctgtctgtctgtctgtgcacacatcatgaatgctcaggcaggtcacagctgatggacattttccccagagcttgtgtattatcacgcattctttccaggcacacctccagctggaggaatgatgaaacagcttggaggagccaccaaggagaatgagacaagtgcgaaaagcctcggcaggcacagaacaggctgcacagaagcccagtttaagtcagatggtctgacactgtggtgaagaccaaaggacagcagaggggtaagtgtggcactggggttcagagtagagaccacggtggcaagtgaagccagagagggctgatggatagagaagggggagggtttgagagaagatgactgtgaagtgatgggggaagtgcttctgtgtatgtgtttgccttgccggatgataaataaaatactgtttggtcagtgaggcagcaacttacatgggactaggagtcgaagaggattctgggaagtgtagtaagaagtggtgatccaggcaggaagtgacatagcaaggagactcatatttgagcaaggagaaacagaaaggtcccttttctcctccgctnnnnnnnnnnnnnnnnnnnnnnnnnnnnnnnnnnnnnnnnnnnnnnnnnnnnnnnnnnnnnnnnnnnnnnnnnnnnnnnnnncttataaaatatatagatttatgataattaagactgagctaacagttgagaatcctagtcatcggccaagaagcatttgtacctaatacaagtctgtgtattattttgtccattcacacggcaggcagaacttaggtggctggcggagactgcccacatggcgatagaactcaggcagcttttggcagaaagatttatcataacagtgaagggaaagttggttcagtgtaagcaatgatgcagaagaaaagggtgtgtgtgtgcacacatgtgcagagtgtgtgtgtgtgtgtgtgtgtgtgtgtgtgtgtgtgtgtgcacatgtggagaatgtgtgtgtgtgtgtgtatgtgagtgagtgtgtgtgtgtgcgcgcgcacgcgcagcctgtggtatgttgcatgtgctgccggtgcatggggtatggcaggtgtatgatgtatgtgtatggggcatgttctatagcagttgtatggtctgtgatatacatattatgtatatgtatatagctttaacactgggacaatgcctggttttgaatctaagatagtgatgccaatgagtggaaacttgtgattcgtaatctagcaaaataaaaagtcactctgtaatacactcaatatgctattgtgattaaaaacgcatctgccagttggtggaacctcctggtatctggcagcagactctacagtcagaggactgtacaaattgcagaaataatggcaggggagtttgggggtgattcttgcatctatttatggaagcagagagtgtcagtctcacgtggcattacgtaacctgaatgttgtccagccttcacactaaaataatttcccctaaaacctgaaaactggaaatgattctcacccctccttcctgctaagcagtttgtcaatctgttatcttaagggtgatttacccatctctcgtcataacacagggtggaggggcacctaccgcagatgaagcaggttgtcttgagaatttcttccttcttctgcttctcacttctgaggtcagcaaaggtgtcaatgatcacaccgaagatcaggttaagaacgatgatgatgacaatgaagaagaagaggaggtcataaaccacccgggcggcgaacaagggctcctgcaacagaagtgtgaaacacacatggaatgcacactcacttcatggctgtcacgttagcacactgtctggcataaagcaagaggtgtcctctgagtgagcacaaacagtcgccctggttagagaagagaaacctctctctctgcccttattttccctccaaccaagggaatgcctgaagcctactctcagaattcctccatttctctggggctgacacattttcacccaacaggaaaacactttctcgtgtgtttcactagtgacagatgtgaaatgtctccacgggttcacaccatttgtccccatccagaggtactgtctgagtaggctgtgtggcctcaccacaggaggtgagctaccagggggtgggccttgaggccttggagaccagatcctgtccttgctcactctgcttcctgagggggggaagccacgtggccagctggcttcccagccttccaccactgtctctaactgaagttgcctctctcccaggatgatggaataaccccacagaactgtgagccaaaatgagcccatctttccttaatttgattttgctgggcaccttgtcacatcagtgagaaaaaactatcatgcaggtctctcccagacaccaagcaaaagggagtcaagcacaatcccagggccagctgagggaaacctggtgatttctcaacttctgcagtaggttctgtccttgttctgaagaggtcaagttacacacagctcatgaatacctgtgtggtctgcaatgttaaaactcaccccagagaccatgggatccggctgtttatattcgagctgagcttattagaaagatgactagatgttatctaacagaccagcagcagaagaaaacagtgtatgcttctagcctggtgattcaacatttacagttactgagaaatgctctcgctttgccgttttaatgtataaaattctgttagaacccatccatgcttcgcactcatcatggtaaataacagaggctcttcttccaaagcagaaacagagtgagtccttgctcctggggactctgtagacccccgtggcttgccgctggctgtgttctatttaacaatgggctcctatggagtttgtggccgtgatctggctgctgtgacaaaatgtgcagctcagactggagcccaactgacatccataggcttttagttcacctctgatcctgtgtgatttcactgtgcaattaactggtcttacagccaccctaacattttaaaagcaaatggcactgttgccctgaaaaaaaaaaaaaaatgtaagtcataccgtaaatactggtaaggaaggcaacaagaaagaagccaggcctgtgtgcatagggaggctgactcagggaggcagaggcagagcaacagcaacttcagggccagcctgggctacagagtgagtgagttcagggccagcctgggctacagagtgagtgagttcagggccagcctgggctacagagtgagtgagttcaaggccagcctgggctacagagtgagtgagttcagggccagcctgggctacagagtgagtgagttcagggccagcctgggctacagagtgagttcagggccagcctgggcaatgtagtgaagcgcctaatctcaaggtttaaaaactaaaaggagggctggagatatgttacgttgataggtttgattcccagttcaggaagggagggcgggaaacagggagtgaggggacatgaagggagggacagagagcaggaggaaataatctcggcttcttgaactaaaccctttccgtctgactcacatctttcgatggtcgtctcagcacatcccccaccccgccgccgttcctgaggccctggttcagcacggtgacgatgcacatgagcagggtgtcacatgtcctctcgattccatcgtcactcccttcgtcagctgcagagacacaagagagctttgagaacacactgtcatccacacccaagagtctgcttctactgtgcaaacacaatctttggaagtcacatgacatctacttcacacgtgaccacacgggactgacatgtgtagagctacacatataataccttgagattttgcatttctgggcttggtggggaatgacaggagagaaaggtaaagtgtgacaaggttaaaactcatgcgcctgactgtagtggagaatgtggtcaacacagctctccacctcccaagctgcaaagagttgcagatgaaggcgtcaggccaaggaagccatcgggattggggcaagtcactgatctcagcagcctcatagagaacgaggagaaggctgtgagttggagggttagccaaggaccatgtaaggcgtgttagaactgcccatagtaggagctttcgattacagtagccacaattctgtcattctgtctttatttggagtaagtttgagagttttttgagggaccacctgggtctagagatgaaatcctgcttagaaatgatctattgtgtcagaagcgtcctgagacttaaccccttgctgaaagatccagacagaaaacataaaaccatttaaagcaaggatggctgctcagctgggtatgagaaccaggattctgttacattactaaatgagcagaaaggccaaggctcattttgtcacaaagttaactgtccttggggacttggggctacagtctgcatgtcacggcaagaacgtaaaagcaaccacaggctgtggggcaggcaagtggtctcactgcatgattcagggccgtggatctctcgttaggagaaggctggcttctctcttctgaacagattttattttatatcctaaggaagagagaccctgatatttttacacgagtccaggttgctcctttgaaagcatggtggaataccgctggccggaaggctgcatgcagagacaggcacacacaagcccagcatcggagacaggcagaccgtgtgtagtcgctcaccatggagctgaaccagatttctgatttggaaatctgaaggaattgagggaggaaggagcaacggggaccggggacagctttgtggtggtgacagaaaaaggaaagacatgagagtgaaagaaatggttacagagaatctctgggttccaggaaggaggtcataggatgcagctactgccactttgcaaaagaagggctttcaatcagagcaaatgagtaacgagtttcgtgggacactggatacatgcacttgttaatcggtaactgcctggttgtagcatagcagatgccggctgaagacccacgtgtgccagttcggtgggcacgtggaagtggcagggaatgaagctgtctcaggagttagggaaatccacacatcacaccatgtgattagccacggtgaaataaataaaatgcactggctgccaagaagcatacgcaaaatgtcaccaccatgacgggccacaagagaaatacaaatcacaacgacactaaggtcccttctcacccatatcagagggctaccatcaagattccaaaacaaaacaaacacaaaaacaagaaacaaaaaatccaacaaccgttagtaagggcgtgtgtgtgtgtgtgtgtgtgtgtgtgtgtgtgtgtgtgtgtgtgtgtgtgtaggaatatgacccttacatacagctggtggacatgtgggaatgtgggccaatgcatggaaatgagcatggaagtccctcaaacaatcaaagcttgagccagtgcatgactcaactatgccatttctggctcagattccaaagactcaaagacagcccatcacagagaaacctgtggacaagccaaaggacagaaacattctgtatacatcacagatgaagggaccggcagagaaagaaaatgtggtttgtatatataacaggttcattcataaacaggaacagcattatgttatttgtaagaaaatggatggaaccagactcacaaagacaagaattgtgttttgtctgatatgtataacttagaagacatgaaagcccaaagggtagggaactattaggactgtgaaagtggggggaaggagatgggacccgagaaagggtaatggggattaaatatgctccaagttcgttaaataccaatatggaagtgtcataatgaagcctacgattatgcaattgacaagaactaagcaaagagttgtgacttggcagggttgcgtaagtttgtgaaatataaaaattgagtagcaggaggatgcccaagttatgtcagtgccagcattggcccatcatcttgctcaataggagctacaaacacaggcacactggggtctatgagcttattaaaagggtctactgtttgacatgactccactctcaataagtcattcagggctcccatagggaagtgccaccttgtggtcacttgtgagacaagcttatctgtacacaacacaggctttgtgtgaggaaaaggagacagaggtataagtgccccagcctactggaaccttatggtccccaagaggaaggcagtgggtcagcagatgagcaaacacacagcagcctaggtgtcctgaaggcagtggcctctgaataaatatcaaatgaagggcctggccagcacagtcgggcctagcagacattccctcaggtacaatgggatggcaggggcatacctgtgcatgcatgtgcgcgcgcgcgcgcgcgcgcgcgcacgcacgcacacacacacacacacacacacacagtgcttggtacatcataagggctcagtaaatacaagttatcaattacccacacacagtggctgttacatcttatgaaaaggccttgttttaatacaagaaacaaatctgacacttgagtgatgtgagcttatctatctgtcttaagctgaccatcagaaaaacatttttcttaatccatgatgattaaaagtttcatttgaggaaaggaataaaagacctatcccccaggttctgaagacattatttcacttggaatgttagtctatatattataaaaacattgaacactggctggggaaagtcagtggttaagagaacttgctggtcttccagaggaccagagttcagttcctatcactcatgtggggtggctcacaacacctgtaactctagccccaggggatccaatgccctcttctggcttggcatatactcacacaaacacaaaatacataaataaaaaatacatcttaaaaatactggacatgctcgaacgtaagtatttattgatgtcccctttttatgctttattagttaaattacttgctgtttgtggacacagcagcccggagctgagattcacttggaaatctgatggcaactcaaatcctctcgtcttaaactttagtgactctaatccaatcattagagaaatgctgttcttaaattttttttgtaattaggaaaatgttttaaaagactgatacccaatgggaatccaaaatgtagcatgtgttaccttgacaagctctgctatccaccaaccatttctattaaaggaggataccaggagattaaaattggtctcttaaatgcttaaacacatgtgaactttttattctcctgaatgtgcaaatggcattgactcacagagtagccatgattagacttttaatattgtcttaacaaagcttggcttttctggaaaagtcacttttggtggggatttaggtattttcacctgaggttctagcaggcttgaagtaaatgaaatacaaacattttggagtgtttttcaagttgaatttgttgcaagttgtcaggtgaatcctcggctgatggaaaaatgaccaaatctgcatctccaggagtcttcccagggccaactgtgcctgccagccattgcctggcttttacacaggtgccgtgtgcctgggtattctgtgatgtgcacctgctggccccaagagagcagaccaaggccctcaaaaatgctcaccacagctcacgagttagaactgcaccccagccctagacagggaaaagctatttttaagcctaagtgacatgtgttgcacaacaaatgccagacttcagctttctctctacttacgtggctaaacacacagagacatcatttaaagaagcacagaagatcaaactcataggcttgccaatcaaataactgtagctgcacacattctgccaaaagttagagcaaataaggccctgaagataagacctacacattttaattactgaaattatccacataggcaaaatgtataggtcaaatccactaggggtgttggtggcacacgcctttaattccagcactcaggaggcagaagcaggtggatttcggtgagttcaaggccagtctgatctacatatcgagttttcataactccagggctaaatagtgacagcctactgtaaaaaattaaaacttcaattataaaaataaaagtcaaatccatagacttcccaaattctaatcaaatcaattttaacacttgaacgtcaaatgcacgatggctctgctgtggcttctcagtgtctctaggtatggctgtgagaaaaccttcaccgggaaagctgccctaccctcaaagctgccctaccctcaccccagctccggaacagctctgccagccctctcctctactgtggcagctttctctacaagattcccacacactgctaccagctctgttgtaccccaaaggacagagactggggggggggagcactgcacaggggtgaagaacagtccctatttgtccttaggaaaaggagagacatctgtagtcagggacttaagatggagacagactctgaaaactgctgacaagtgactttatgctaacagaagatgctcaagtgggtccttgacaggatgctgtcggggggagcagggatggcacaagccgtccttatactggggatgagcaggcactgtgccccacgaccggggggggggggggggggctttcccaaagannnnnnnnnnnnnnnnnnnnnnnnnnnnnnnnnnnnnnnnnnnnnnnnnnnnnnnnnnnnnnnnnnnnnnnnnnnnnnnnnnnnnnnnnnnnnnnntctctctctctctctgtgtgtgtgggtgtgtgtgtgtgtgtgtgtgtgtgtgtgagcatgcgtgtgtgagatagagagggaaattaactgatagggtgcatgtacatgcccatgaatgtggcagccagaggtcaacctttgttgcctttctcaattgctcctagctagactggctggccattgagccctggggatcctcctgtcctctcctccccagttttgagattacaagtgcaatgcccagctgtgtgtgtgtgtgtgtgtgtgtgtgtgtgtgtgtgtgttatctgtgtgtgtgtgtgtgtgtgatgtgtgttatcatgtatgtgtctgtgtgtgtgatgtgtgtgtgatgtgtgtgtgatgtgtgtgtctgtgtgtgtttggagtgtgtctgtttgtgtttggagtatgtctgtgtgtgtttggagtgtgtctgtgagtgtgtgtctgtgtgtatatgtgtgtgtgtgtgtgtctgtgagtgtgtgtgtgtgtgtgagtatgtgtctatgagtgtgtgtgtgtgtgtgtgtgtgtgtgtgtgtgtgtgtgtgtgtgtgtctgtgagtgtgtgtatgtgtcctgggaatccaactcataacctctcacttatacagtaaatacttcactgattgagacacccacccagtcccatttgtgacaaatttctaggtagctgaagaatttcataaagcatctgagagtgtttccaggccctgaaattcctttgtaacattcctagatctcctgtggaagtatctagagcagtggttggattctgttttaatctgtgaggatccagatgaaacttctcagggtctctgggccacgcccattttgtatggtaaatctttctctaataagttagaaacggcagaaccattcttaggtcaagagccatgcaaggccaagtggcacgtcaggtcacatgaattagggaaagggagggcagtgaaacctggaagccaggtcaatagcgtgagatgagcttgagagacagctcaggggttaaggccacacactgctgttgcagaggatctgagtcgtctcccaccacactctcactctcggcagagagttcacagctgcctgtaactccaggtcaagggggcgtgacactctctggcccctgtaggtgcttatacacacataccattaaaagaaataaaaagaaatcttaaaaagagcatgtatgacgtgacttagagaggtctcgccacccacagtgagagcagcttgagtaggagtttgaagtccagaacctcctctgagatctgtggggaagcctgagaaataggaggtgtttaaaccaacagacacatgtaatatgactgtagagagtggacgcttggtgatgccttgtaagccgagaagacctggctcttgtgtgagttttgactgggggtcaggcaaaccttgctgggaacatctcaagtgcccacactgttggacactgcctgggataaatacaagcgcttgattctctctctaggtcacaaagtggagatttagtcagggagggggccatctgtgccctcccaccaacagtccaacatctcaagaaaacaaggtaacttgacgctccttccttccactgtctttcatgtcacttccttcatctgctctgagttcattttgccatttaatggactccaagcttccttagctatgacagctccagagtgacacaaagatctagagtccacaaggggtgggggtggctcccgggtagagcacttgcataacatgaatgtggccctgcgctcaccacacacactcacacacacacacacacacacacacacacacacacacactcacactcacacacacactcacacacactcacctacacacacacactctcactcacacactctcactcacacacacacacacacacacattctcacacacacacacacacacacactcactcacacacacacattctcacacacactcacctacacacacacacacacacacaatccgtcgtatttactgctttatgaaatacaccactattttttctataatttagaaaacatcatacatgccatattcccagactgctgtcacatcttaagggaatggtttagagctaaagctatttttagacatctgcttgctcccgaaagggggagagggattttgttcattcatttttctgtccttataagctatccaaacatggttctggaagcctgtgtaccgtaagccagcaaagtggcaaggccaggtttacagccaggtctctagagtagaacccctgctttcccacaccccttgttggcagccaagtagccagaagcggatcctttagtgtgggctgctgtttgggagcagcacatttccacatgctgaatctgccaggtttgggtaagcagaaacactgtgagaaccaagacagctcagaataacaagtgcggaatcctttctctagcttgaattatttcggtcctttaccttttgttctctgtttcaacacattatgaagtgccaagatccactctccttagaggggctagtacagacctgggttgtcagtacacacctgcgtcggaagaggggatcgtgggtgaacagttctccttctgacaggtccccatcatggaaggtagggtcatggtgggagccccgtgattacctgggagaacacagagcagagaactgtagagaggcaggtactatatgacagacagacaaccacagaggcatccgagtttaaagatatttgtgctttgaccacgctgcatcctaaagccttttggtgagttagcctggagctctgagcacacgtttgtttgcctgttttaaagcaatgttacagaggacagattagtcaccaatgtgcaaaaagctccaatcatctaattgttttcttttaggggctgtgataaagtactaatgatattgttgacctaagccaccatgaatactgctatttctctagccacatgcattcagggttctgacttgggctgctaggacagcttcctcccaacgcaggctcaagtcactggtccctgtggctgaaacaaggaccttgggtaggcagtcctcacaatgaggtaagggactcagagaataaaggcttcaaatagccggaggatagaagactttttttcagaaccatgtttgggaactaactttccttccccgagcccccaggaacccctctttctgctggcttcccactggtttccctggcccacatggtgcagagataataatctttgcacttgtatgaagcaaagttgaacctgaaagtttgactcatagctgagaggaccaaaagaagtagatttacaaatggggagctgatattgggaagagatgtgaagagtgggtgggctggggaggcccaggtggccacacgggtgctgtgacagctttgggaaggagtgtcacggagacggagttctgagtgaaccccgatgacagtcagtactcaacgtgtcacactgggctcccatggctcagactccaggctttggagaactgacgggaatcaagaggcagaggcgtaacgggagctgatggacgagtaaaggaaaggttaacacaaagtagcagagtaggagagaggagggagatggatcctagacaggaaaggaagtacctacttggggaaggatttccctgaaggaaccccgggcttatgaacatagatatgaagcagggagcccaggtgcaatcaccaaggtgcaatctataatatcaaaggggagcagagggcagagcaggctgagccatgcaaacccccagcccagaactttctaccaagcacccaacggatggttcagatccttagaatcagagctttggctggaacagtggagggaggccttaggttataaagccacaagggcaacctctgcactctgggtagatgcgaatgaggagtgggcaggtacgagaaacaccgtctacttgtcaggaggaccttccttcctagtacttcccaatggcactgctctgcccaggcctgtgtggctgcttcctatccactaagcagcagatcttggggccagaggtggcatccacattctcagaaatctccaatgatgcctgcaaggcatgtgtctcccgccctccccagcactcccaggccctgcccatcgagctctgactttccaactccccacttgctcccatctgtggggtttctgattgcttcacacctgcttgaagaactgcatccaatgtcactcactacctgagtgtgttagcctcaatgatttcacccatggtcagctttgtgagtgacagtgctcaaaacgaaaagaataaagacgacatgcactgagaccctgctgtaggccagatacttccgccaaggctcacactgaacctggctgtgaagtactgagaggtgatgagacatggcgtctctctcctcggggttggattaacgcgcaccatggattactggttatctctatagtggattcattttaaagcctggtctgcctctcctcgtggtggggtaccctatgttgttatctttcacaaaaacagcctcttcagacatcaagcagattcctccagcaggaaccatgaactaaatgaacctctattctttataaactaccatgtcttaagtaatctgttgtggcaacggaaagcagacttaaggtagtgtagttgtctccacattcggcactttcatagtatttacaaaagtttgtgtgtgtgtgagggagtgagagggggggaagggagagaaggagagagagagagagactggctcctacacattttcagtaaagacagagcttgaaatttcagctttaacatttcttacgttgtatttttttctatttctaaagaaagtgcattcataatttagcaccaacttcctccccaaacaacagaaaatatttaccacagaactcagaaaacagtaattaccgtgtaggtttgttctggaagctttagcgcttcttctgtctctgtctcacgtgttctcaatactgaatgaactgtggccaggcctctaatctagccagtgattataactccaggctctctgatctcagtttagaaagagtggagcactgggggactgatagaaaggcctttccttcttcacacacctgaaccctgctgggatgggcttcatcttcagtgtccgtctagggctatacactgagtgtctggtcaccagctcaggagtttatctgatcttttgggaggcctagtgacggcggggtcactggggatgcaccgttgaagcgatattgagaaccacccccaccccaccccaccccccacctgaaagccaacaccgggtaagaatctttgcctaaccacagagatctgtctagttctgccttgccataggcctaagtgacattaactgaaaacaaaagctgccaaaataaatcatttccttgtgttgaaattattttcttgggcctttttttattattattattattattattattattattattattattataacagtgaatggaaagctgctggcaatgcctgtggaaactctagaaaacgcacctgaagtaacaacaacacatcccacggtcctgaacgtgcagacagatatttggtgtggagttgaagtccccggtgaagccggtgtttctgtcacgtgtgtgagtcatgggactcactgatgaatggatctaaacaccgtttcctcgtcccataagcttatggaaggccttactatgcattgtcaattccatagttatgaactatctgtcacccctgtgggtgtgtggggttcccgtgggggtctcacctgacctctaaaagcaccttctagtcagctcttcccacatttttcccctccacctcatgccaggttgccttgcccagcctaaacacaaggggaggtgcttcgtcttagggcaacttgatctgccatgctttgtcgatacccacgggaggcctgcccctttctgaacagaaacggggaggagtgggtgggagagaggaaataggggaggggatgggagaagaggagggaggggaaactggtccagactattaaataaataaataaataaataaataaataaataaataaatggaatttagaaagaattatctgttaaaggcaagaaaggatattgcatatgtctccactaattaaagtgctttaaagtctgtggtttaaggagaaagcacgtcttttggggatttcctgtctctataaacagtagttagtggaaccaagaaaacagcacatcacagaaccgtggtttctacagagtaaagcagggttgggggaaaggttaactaaggaatttaacccagcaaagggtgtgtactagaggtgagaaagcaaacagagtagataagaagtctaaaataataggctagctcctcatgccggggcttctcagagagaacacgaggtgatgtccaagtgtccagtggcaaacatcatgcggggccccagcagtcactcgccgaggagtggggtcttttagccacagcctctaagcacgtcttccaaaacacacttctccctccctaatggtttccaaatcgcatttatcattttaaacacaaagcaatgcatgtggaaaatggctgagtggtggctctcgggtgctggatactgttctttggggaaatgggaagaagaggcaaaaagaaagaatttaggaattccccacagtgaagccgctgctgcctcctgcaatatggtcagcattaggaaaccctgtaggatggagtgcagatgtgtatttcccaacccacactgacagcatacaggctgcagtattgcaaatgctcaactcctagaagttccattattactttaatcattgctaggatcaaatacctaacagcgagcaaattgaggaaggaatgaacagtttattttggctaatggttcaaagagatacagcccgacctggcggcagccaaggcagctggtcacactgtgttagctgtcaggaggcagagggcagacaggaagtaaggccagactgtccaacccaaggctcaccacttcctccaaagaggctccaccagctgaaacagtgccaccacatagggaccagatgttcaaacgcacggggctaggaggacatttcacccttaaaccacagcactggtaaacaagaccacatcttaaaagggtgaaaataaaatttttacctatttcagtgtgtctgaaatcccacaaacaaggtgtgtacaagtcagaactgttagggggagcttggagggtggagtggctacctgggactggtgtttttattttcagtctgtccacttccatggtgaagtcatccttcaggaaaaggaagccaatgatggagaacaggtagaccaggatgagagccaagaccgcggtcaggatgatggagcggccattgcgnnnnnnnnnnnnnnnnnnnnnnnnnnnnnnnngcagggtctcttctctgtacaccaaatcaaagagctacagagacaaaaattaaaaaatagccttcaaacaaacaaacatttttaaatgaacgcaaacagttgatccagaacacaaggaggcacagtttcaatgaaggaggctctagcagcatccacgagcatcagctggcttcgtcaacagtgtcacaccgcttgctaagacacaccgccattgaatttagggcatttaaaatatcaggcacatgtggcttatggacatttgaaaaagtcattaaatttatcgttcaattgagggactcaaaacgaaatgaggagaacaattttgtgagcctggtgacatagaaaaatgtttgaatttaaaatatttgggaaatgcaggtactcttcgttattaaaataacatgtaaatgaggataaaaaatctgtgttagcttatccttttgcaagtagaaccacaaaaaaaaaaaaaaacaatggtaactgttttgtcaattccttctctctaaagggttactgtggtgatatcttacttgaacaaataaagcctgtctgggagtcagagagtgtagcttgccactagctaaccatagaggtctggaggtctgtacagacagacagaaagtgaggtagctgcatggaaacaggatataagcagggagaaacaggaactcactctctggtcttctgagacgctaaagaggtaaggtgtggcggtggcttgttccttctctgtgatctctcagcatttctctctatatctgactctggctttttattatttagaccaattaagaactctatttgcaggttactatccactctgtctttaatagcaggaaatctaaacacgaattgagagctcaagcacatgtctgctgcctgcagccaatgctgggaaccgttttacacattgctgcattataaagctgaaattatgaattagcgagtgcatgttttattatacagaggcacttaaaagaaataaaattatattcattttcagaaatgtccaaaaatgtttggaaatgaatccgatcttcaaacctggagacttggggtttgtgttcttatctggggataagaactacaatctagctggcctggaacaatctgtcaggtgtgtgtgtcctttgaaaatcccctggtctgctgtgtgcgagagttacaccattaatttccactgtaatcaatcacagccttgataatcactgctatgcagaacctgtctttaagacactggcatttgatgtgtcaaattcttaaaaaaaaaaaaaaatcactaccttgttatctttttatctcttgggaagtacagctattgttagaaacaaagtcaatattcttcaataaagatgaattaatgcaaactcaacctctagattgtcaatgttctggtttcttcaactttttcaccactctggttcacataaaggaggttttattttaactcatcagaggccagagtaggtggcattcataatgatgaaatgagaaactctgcctcaaacaaggtgaggggcacactcaaatatcgctcacagattcaagcttaccatgtttttacaccaactcctttcctccattcatgactataaaacagtgtaaacagagaaaggaaaatggcatttaagaacgagaggcatctttaagaaggatgtacagttgtgtgtaggcacacaggcacctccccagcacagaggctgaggtgggaaactgtgagttagaggccagcctgggcaacacagcgaagcaagtcatcttagaattaaaaaaaaaaaaaaaaaaaaaaaaaaaaaaaaaaaaacgcggggggggggggtgcaggggaggggaaactgtctaaagatttaaatatacatagataagcttagcccagatgacataagctaacaatggtaatgggagctaaatcataaactaatgatgatgacctaagctaatctatactttaaacagcttgctcttttgctaggatggcttttgttccttctcattttgcttacatactaccgtaatgactaatgtaactttgacattatagataagatatacatccttatttgtccctttgcatctggataatcagtgaattaaggaaatattacttggctgaaaacccaaagcctgggccaagagaagagtcaaggaagtttcttacttctcagcaaagaatagaattccatcacctatgtacttcccagagaaaagaccccacacacacacttctcctaggaaataccaaaaataacataatttgtgccctgctaaaaaacaaataaataaaacaaacaacaataaaccaaaccaaaagaaaccaactgggagtctaaggtgtacggtgctgcatcccgtgcccagcggcaattgtccctatggctgtactcaccaggaagctgtagaagaactcgtggacaaagaggccgagcatgcaaaccaggacgtacgccacatggtagagaaaggccatgtccaggatgaccgctcgataacctcgggtgaatgtgcctcgatttcccacaaaactcaccaggaacacgattttattacatagctaaacggaggagaaagtgggattttagtgcttcacagtatccgcagaacaagacaccgaaagaggagtattcctaagttgtggtttccgttctcagagccctcctgggttgtttttcaagcagtctgccaatgcacatgtgaacaacacagaactggctcactctgtagctacagggacagagaatgagaccctagctctgtcaccaacatggatgagtgtaaatctggcttttccttactcttggacaacctagttctttccatgggaagccttgatggtttctgaaaacctgctgtgaggaggttttacctcacagaagcccagatgacatgacatggccagagcaattactacaatgactcttcaaatgttccttagatacttatgactgtgtatttatatgtatgcctttaggaaaataggacgctctttgcaacactgattatgtatatcatacacacacatgtattacatacatatacacacacatacatgttatcaaacttgagagaatacaaactcttttccaccgacatcctgaagtctgaatccatacagataaaatgaaaaactggtaattattgcatgttatgaaggtctagtcagaacaacaacacagccactaaaggcagactctttcctccatgtccccaactagctgtccaccctctcaataaccagtaataatctcaaaccccttccacccactttcaacaacttcagcagctgtcaatcaagcaggagccttatttcactgttaggcggtttatgttgtcactcagtagcactgagacacgacggagacttcagagtggctctctaagagcaggaaagaaaactgctcaaaacccaagcaatgaatacacacaaaggtcctgtgtctggccacaagctggatgcacaacaagggtgagatgaatgtctggcaaagcaacatccagccgttattctgaattgcttttgagaaaccctgtccaaaattacaaaacttaccaacttacctggacttgcccacccaggttcatcgatgtgatagagagagggatttatacaaaagtagaataaagaccccctcacaagggtaattgtatgacacagacatatgctttctgtgtcatttcctcattttctacgatgagttacaaaaaacacacagggaaactgtttatgaagcagatatactggggaggaacagactaaactgaattctcaaaatgatcaataaattttggttacaaagtgtaaaagacaagatgcatttctgcctgagcagggctcggtcatgttaacgtgaaaaataaagagagatttgctttgcttgtttacccgggtggcgctgcacgacccttgacctgtatgtaacggggtgcatatgcttctgttctctagggcagtagttctcaaccttcctaacgttgcaacacttgaatacagttccttatgttgtggggacccccaaacataaaattactttccttgctacttcatagctataattttgctactgtactgttatgagcaaatgtaaatatctgatatacaggatattgtgacccctgtgaaaaggccagtcgacccccaaaggggttgtgaccctcaggctgagaactgttgttctagagacatctggaagtggaatgaggttgacgggtgtggtggctttgccatgggttcacacagagttcagaggcggaagcggtccttgtgtttaaggagtttatgccaaggacaaatgaatgcaagaataaagggcaggaaagaactgagagtccagtttctgtggcatgaagaaatttgtaaaatttttttgtgtgtggcactttccatgagagctgggacttggtggaggaataaagagccgagatcaccttcttcctgcttgtgtcatgacttcattgacatggagccggtctttctatgtcggcctcatgaggatgctgcagccaatcagttctgtggcaagcatccccgtgggcgatgcgtgatggtgggctgaggtggctacagggccctgctcttctgagctgctggaagcagtcctgaaacagcagcacagatgccaacagcaccacacattttgtttcactttttctatttattcctcaaagttgcccacagtgtcactttggtggatgacttgagtaatagtgaagaaggaagggtggagaaacagctccacacagttctctgggtctcacagaaatcagcatgctaaccaaccagtttaccaagagctccccttgtcacagcaagggtgacattaatgtttgcttatgagttagtgtctagtgaagaataagtattgattgcatcctggtgaatcacacggcagtgtgatatcttcatgtatgctcacaagtggtagacatgtctttgcaggactttcagtggtgtgatgtggtgaagtgaaagacagaagtcactgacttcattcttgacacatccctctgtttctagaggactttgttcacgtctataatatgtgcctagaaggtaatcgttactcagaatttatcttgttatttatttatatgaatgtgtgtgtcacccatgtgtgtgcagtaccttttggggcaggtgaggacgagccatttgagatggttttgagctatctgactttggtgctgggagctgacctgggtcttcagaaaaacaaaaacagcaaatgttcttaacactgagccttatctccagccccagactgaagccattaaagacgcctcctggccccataatttttgtgacatctttttgttattttatatggtcacagaaactgaccactgctaagtgttggcgatagtgttattcctttggtcttattcaggactctcttcctgagaagaatatgtaatcctcatttgtgctattactatgggaaaacatgacctattttccaagaataaattgtcaagtggaaaaacaacagacagtctgctgatggaaggtaaaacataagatgatttaattcaatgatctccaggtatgtgggttacacctcaggcaggataaaatcttaaggtcactatgtaaataaaaatttacacacagtcaaataccaccctgggaatctttgaaactgccagcagaacagtataataaacacagacgatgtgagcagcatcacttatgacacccaacacaacctcagagaggctttggttttttacaactgaaaggcagaaatagtggtacccggtgaccatattaaacaaaacaccgtgtgtgtatttgaaagagagagataatatgaagggaaagtttcagatcatgaactgaacttgtgtgtttagtgactgtatgacaggacacaatcctatagactaacgtgtcatgtggtcacccatgaaactacacacacaccgctcagaacaccattcgttcagctgagcctgtgggaactgtcaatagtctggctcgataccaaagccttatttgcttttccctcttgcaaagtggggagaacacactctaccgtgtcacgttaaaataacggtaagaaaggctagcaccactaagtgaatcacaggtccccagccattattagaagggggtaaagtgcggttatttgaatagatatagcccccacaggctcacagggcatggaggagtggccatgttggagtaggtgtggctttgttgggggaggtatgtcactaagggggtttgctttgaggtctcaaatgctcaagccaggtctagtgtgacattcactctcagctacttcttcagccccatgtctccctgcacgccaccaggcttcctgccatgatgataatggactaaacctctgaactgtaagccagcccccaattaaatgttttcctttataagagctgccatggtcatggtgtctcttcacagcaataaaatcctaactaagacaacagtgtaagtagatctctctagaaaatgttaaaaggtatttcactgtggggattggagtgtggctcagtggtagagcacttgcctagtatgtgtgaggctcggggttcagttcctagcatcagaaggaaaatctttactgataatttactatgcttttctttactacaaataatctaagccacacagataaatggagtgattaatgaggatataacagccatctaatgaatcagtaatctccttaaaaacaggaaatactacatctgtataaatgaggtttgcaaaaatattcagtgatgtgaacaacattaagcatttatagaatgtgcctctgtattgttcagaatgttaatttgtaccaacattagctaaagaggccacactgtgcacgagaagaaaactgtgtaagatatactttgcagcactcaaaattactgagttttctgagacaactgtgacaggaaaatctacctgaaatgtggacaaacttcaaactttacaaacgaattcgattttagcataataaactagaaactgataaattctgaggtattccttctattatatttcctttcttgtaaaagagacttttcatatttgcttaacattatgaaggacagagtctacagacaagttactgtatgcgctaagacacagacacatcatatggcaacactttctgattgattcattaatgatctgcacaggggatacttggtaaatggtagatgttatcaccagtgtatcaatataacagttactgttcttttctggatcttccataccaagattctcaacagatctcagcatccagatgagggtagaccagttgtccataccttactccaactgacaagaaggatgaaatcagacattggctgatttatatctgatgtctcaaatcctgcctcttgttatggctaaactgtcaggctaatgttttcttctggtttttctgatatctattatttcagcaatgacagcttctcattgctatacaatgcaaatgtctatgtacaaattaaattaattaacatattaattcatattattattaatatgtagttaataccaaggtacattagtataggattcatgttttactttatttttcctgtcccattagtaaagataaactaagaaacttgtgtaacgaatttatgtgaagagaaagtatatagtaattcactaaaataattttattattcttttggtagcaaacacaactttaaattataaatataaacttttctattaacatctgaagtagtatcaaattataataatttcattaaatttgcctcaaatcgacatagattattttctttagtcagatgaccctaggctggtggtagtgtcttgttgagtaacatgttttatgctattggaatactggaaaattcatggaattagcaatacagacatgtctacatgcataatactttctcgtgaagcagttaaaaaaaaaaacttggctttggtagagaattttttttatggtgagatgattttcaccaaagcacatggaagttatcactttatagtgtcctacaagagacaggaaaagaacaccagatgtttttggttcacgcccaccccaaacattcaaatgttttccttacctctgtctacatcgtcttggtccagagatttaaaaggaaacagaaagaaagagacagaaagtggcacataaattctagatggcaagctgcacattgcctacctcttggtgctctaaatgcccatcatattacataacaggtgcagagaatgtttgttattttgggggacaactctgcttagctattcttcactttcttaaacttggatttttctcatttagtcaatgatcagtttatgaataacatctgattcctcaaataatacaatttcatgctgaacatgttttctagagacacaaaatgagcccaacacagaggtatagacacgtttatacactttgtgatgatcctataattaccttggttgatgatttgacaacgtcagcttattttcaaagcaaagacaaaacgaactcagatcacggaatcgcctctgaatgttcagatgtcaaagacagggtggagtgagccagaaggaatgaattgcatcgccccattgagacaggggagaacaagggccagatcacacaggaacatggagatggggctgagcaaggaccaggttcatgcattaatgtgatatctaagccctaagaaacccagagaagggggcatctggtaactttcaaaagcctctgctcacactttacttcactgatggaaactgaaaattttctttttttttttaatattctaacaactgggaactgtggaatgctgtccaacattgaagagttgtaataaaatcaaggtcagaaacactgaaaacatagaagtgactatatattgtctcatcttggcaatctttaaaagttggttagctcatttattttcaatacatagtggccacagatccatccacttgctcattagctacttattccaaaatatttatagactccctgtgatgtcccaggatttcatgatcaatcactatccttaataagtatgtaaggtaatataggagataacaccagagtactgaacattgagttaggaacctgacaatagttacaggcagtgctttcagaattaattatgtagctacaatagcatttatgtgatttctgaccatttgttatttcatcagtttgatgatttaccttttcttcatatccatttacagatattccttgcctgaaattggcccagagtccattcaagttttttgtttgtttgtttgttttgtttaaattacatctacaaatctttcatttgcttcttggcatgatacttccagtttgttcattccacacttaaaactaacattgtcaaaagcattttcttgttctaatatactaaagtttggcgaaaagaatctcacccaggccttttataagtttataggattttctcatataaaaggagcccaattttggacctcattttttgcctagcacacttttctcccccaaacaagccatttgataggaggtatttcttaaattctattgaacataattcaatcttttgggatgacttagaacccactttcagttgttaacagtagctgggctatttttttcagtaatggcagatatggtactgggaggacattaaacctgatgaaagggacagccgaactgggtcacactgtaagggctacttaaacctatcgatgtgttactcatctttttgttctctctctctctctctctctctctctctctctctctctctctctctctctaaattaaagcaagtaaaaatgatactttagttaacataaatttatatcaaaccagaattcactgcatacacataaataaaagcatagttaaccatatttacactcaatacatctgaattccataagatacaaagttaagcaatgtacttacattagcagcaccaagaagtattagtgttggccccagaccgatggtgtatattgatctgagcatgatagacacaagaaatggccggatacccacaggcttggagaagaaaaacagcatagatgtgcagatcgctactgctatccaaaggagaaccgagaacaacggggaaagcgtacctggaaaaaggagcaggggttacttgtcaccaagaaaacacagatagaaaacaccaaagttttggcttctgtgcttcatatgcaaacaaagccatggtgcacaaatctcagaataacccagtcaactttctaccacaggaaagctttcttgactagtaagtttcagtgtcattgaggagctggaggtcccaacaagaaagtccaagagcagtcaccattcttcacttcgagtctgagaactctactttctctcttgcgggagtgatttatgaaatacttttgataaatgtacttcacttgggaacttcaagtcaaattgatgattgatgattgtgggaaatcaggtatagtccttcatcattcccttgttgtattagaatcaaattatcccattatggagtcctcaaaagaatctagttcaggccagcaagatggctcagcagatgaaggttctagctgccaggctcaatgacttgggtttgatccccagaaaccacacagcagaggaagagagccaactctcacctccacacagacacatacacaggaaagagacagcagaataaataacaaatgtaaaaaaacaaaaataaaagaacccagtttatagaaccttacattttatgaaatagagatatgctttgggtgttaaaacccacacacatgtgactatatctgagaaagctttaagtgttaaaacacacgcacatgtatttttatattttaaaacacctgagtcttcatatgagtgtaggaatatgaatggacacacttgaagactgactcaagttccaacaatatttaatcatcaggaaatatggagctgggtggatagccagccagggaagagcttgcctcatgagcatgaggatgtggatttgatctccagacccccaggaattaagcctaacatttggatggtggtgctaaggctgcagtgacaggcagagccctgggacttgctggccagtctagcgggatgggtgacttccaggccattgagggaccttgtctcaaaatacaaggtgagtgatgtcctgacctctgccttccacagacacgcacacactcacctatatacatatatacccatgcacaaaaatgcgtgtgtgcctgcacacacatgcacacatgcagtcatgcacacgcatgcacacatgcagtcatgcacacacacatattcatgcaatcatgcatgtatacatatgcacacacacacatgcacatatgtatgtgcacatacacaacatatatatgcagtcatgcacacacatgcagtcatgcacatatgcacacacagtcatgcacacacacacatgcacacatgtatgtgcacatacacaacatacatatgcagtcatgcacatatacaacatacatatgcagtcatgcactcacatgcagtcatgcacatatgcacacacatgcaatcatgcatatatacacatacacacacagtcatgcacacacatagtcatgcagtcgtgcacatatgcacacacacatgaagtcatgcacacaaacatgaaatcatgcacatacacacatattcatgcaatcatgcatatatacacatgcacacacacagtcatgcacacacacgcatgcacacatgcatgtgcacatacacaacatacatatgcagtcgtgcacatatataacatacatatgcagtcatgcacacacatgcaatcatgcacatatacacatgcacacatgcagtcatgcacatacacatgcacacatgcagtcatgcacacacacacacacagtcatgcacatatacacatacacacatgcagtcatgcacatacacatgcacacatgcagtcatgcacatacacacacaggcacactcacacatgcagtcatgcacacatacacacacatgcatgcacaatgcagtcttgcacacacatgaagctatacacacatgcagtcatgtacacagacacacatatatgcactcatgcacacacacatagaagcataagaaaaatctccaatgatttttaaataaacttaaaaaaaacaagttccttagaaatttctcacaaaggaggttttaaaattttccctcgaaaaagaagtgcaattctgtcatgtgtacggatgagacaatcgatgacagtccttctcaagcgtggcgtgtgctgcatctgcagaaggaactttaggcaccacgttattgcctccactgaagggtaccaggactcaagaagaaaacaacaaactggagatttctccccagcctcctgtgccaaaaccccatacgggtgctcattctttcagccacttctttctaccctaaaactgacttctgacacaaaacaccttgagtgctttcatgagaaaagctttggatccgcatcaaaaccctgaggtgacccagacacatcctttaataaatgttgtattcactgggggccaatgcattgaaacattacaaagatttttgtaatttgtcaaacatttcaactaccatcaaacaatccatgaaaaaacaaaaacactaatttagatcctgtgcttggatcctggctctgcatcatgttctctactgtggtttaggtacggtgtgtgctgtgactgtttccccagaggctccagacttcaagcatggtccttgtgaaatatgactaaggcaatggagtctttagatgtggtacctgcagcaggaaaccggattacagagctctgtctttggaagggattggcattgtcggggttggggggggcagcaccagacactcccgtgagagcatgatgcaaagtgcagcccccctgctcacctggccccttctccacacagccacatcccttgcagcttccccataaaattgtgatggaaccaaggagggtccccacctggactggacagatgatgacacccaatcatggacttccagcatccaaaaccgggaattatataaatgtttgccttatgaaacacccagaatcaggtgttttattgtagcaacacttttgttgccataacagcttccaaacaaacagtgatggagccatagagctggctcagagattaagagcacttgctgctcttccagaggacctgggttcaattcccaacaatccaatagaggctcacaactgtctgcaactctagtcctaggggatccgacacccccttctggactccacaggcaccaactatgtacacggtacatggacatatgtgcagacagaacacccacacatgttaactaaataagattttaagcgattttttaaagattgggaagaaagcgctcaccgtcctcattgtcagaatggacagcctccttttgatattggcttatatatgtgctctgcctagcaaaagcaagcccagccaccatctgccttgattcgacagctctcccagagcagtacagggtgagtgcctttaatgtccgactacatgtgtgttgactctcaggtctccatgaaaacacaaactctataagggtgcaaggtagtcttatcctgccacagtgtgtcttgcagcagtaaataatactggtctatcaagcagacaaaatatgctcagggagttcatactgagcaagccactaaatatttattaatccccagctgcacctggctttctacatgggctctggacatccacagtcaggtcttcaggcttgtgtggctgtcactctgctggccaaaccatttcctaagtccctggctttcttcttttaaaaattattttattctatttaacatgtgttctgtgtatgtgcacaagcgcgtgtgtgtgcaagagtgtgcatggtgtgtgtgtgtgtatgtgtgtgtgtagatgcccacagaggccagaagaggatcctaaatcccttggagctggagtcataggcatttgtgtaccaccctatgtgagtgctaagacccaaactctgctcagacaacagagcaaatcatgctaagatgtttctctagcatcccccagcttttcttttaagaatgcattaaaattgacatcttcagggaacatttgacagtgttcttcctatcatgtgactcgtcagactaactcataaataaagtctggtatgatattctgtgatttggcacaaatgctcattctgcaaactatcaccagtgccagatgatctaaccacacctttactctgtcccagatgtttgcggcccgctgggttctccccttgatatacaaaaaggcacaactatgcacttaaaactgggtggtttatccatttttacaagtaacttgtggactgtctagcacaggaccttgcacacagcttgctattgagtacatctgtgtggaatgagaaaataagatcaacagtcatttaatgcagttaattaaggatgaattctgtggccatctgtgagaaccatcaggttagttctgacctgaggatttatgccttggaaaaaaataaatctctctgacacacctagagacaggtgctaagatttttcaaagccaatctcagtggagtatggtgacttatgcctgtatccaaacacttaggaagttcaaggctggcctacactacatagtgaattctaggccaacctgggcgactcagagagatctcgtctctcaaacaaacaaataaccaaaaccaaagcaataccaagcagcagtgccaatccttacccaccaagtggaaactctttnnnnnnnnnnnnnnnnnnnnnnnnnnnnnnnnnnnnnnnnnnnnnnnnnnnnnnnnnnnnnnnnnnnnnnnnnttcccttaatattttgcatatttctattaattttccataataagtcttattatatttaatgggaagatatttttaggaatttattctttctaagatgttagaagctggtcctctataaaagaaaattcagacagtaaaattggacttcatttccacacttgtcttggagccctgcctcgggctgatttgttcatggcctcctgccaaacacagctgcttctcactcctcagccttctccaagtctgggctttctgtgcaggctcattagactccttcttcctacacccaggtccaataaagtcaacatctatctataaacccactggtggtccttgctctcgtgtctttctcatttcttggtccttaaccagaccatgagatccttgaggacaaaacagctttactaatctcagcatctctcagcctagcatggtgcgtagtacacaatggtacccataaatgcttatggaacccagtggattgaaatcacctggaagaatcttattttcctaagcaaaaatgtttgtgaggaagaattacacttaatatgtgaagaaaaatcctccctctagatttaaaattgataattctatcttgggataaaaagttctccactgactagtcttctaggaagggtcagttggcatggctggagatggccctagcatcaacagattccacataattcctggcagttaagagggagttccatctacagtggaggtagatggtgccttggagtgtttatctgagaggcaacatctcccttggatccctttgtgccatcattgtgaatggaggacactattttctaaactgacattgtaacccacctgtgaacaagacagttgagctcaagacacttccaagagcctgggtgacacctcaccattcattggaactggaggaagaccagcccatgcctctgctggccccttgccatgacggctctgtggctctcaagccgcttgtagtagggcccagggtgggaaagtgtggcccatgttaacagaggtccatctctggcccaaattttccagacggcttcatgattgccctccctgccccaaatgatgatactataggaatacgtagaaccttgtttctattttttaaattttataccaaagttccttaagacttaagcaatagctgcaagaataatggaaaaaccgccatgaagacccttcatctagatccaaatatcagtacattgcatgactgataaccatgaatgtcaacaccaggaacaatactgtcatctacttcatccctctgtctttagtttgaacagctcctaatctttgtctttgataagcttgagatagtgattgtgccaacctcaatctagactttaaccttattcctaaagttgttgtgagataattcacccaaactaatcatccaactcaggctcatgacagggtcctatgctcccccaattctcatgcttgccctccttctaaacagccacacactcatatcctacaactgaggatccatcttgctactactgctgactcagaaatccttttcaagagagatgtgtgaatctgtgtgcaggcaccaggctccacaaagcctggagatctgtgctttgcagcctcgcatttgttaggtctgcttcatttagaggctgaagggctcccctgggctttccttgtgtagtcagtcaaatggtgttagatgatttccagatatgcttccatcttaaagattccctgcctctctttcctggaactctgtcctgcatcctcagtggtccgaatgcaggtgatatgaatttatcattttatggtggggctttacctctcaagagtcgtgcccctctgtgtcaagatctcatcaccagagaagcccagacccaggggagagaaggctgttcccacttccacctgtgtggtgcacaaacgacatttttgctgccttgcttctgctgacatggtagacggacacatgcctgctgcctatttcctgctctgcagtcacacacatgctctactgtctgagatccccaatctccgatgtgctttctgtaacccccctgctcccccagctctacttatgcagctcaacctgcagccaagacagagacattgacaccggtgggacctgatgtagagactgggaaacaggaagttgatcttgggctccaatctcttctcttcactcccgtccatctgaaatttgcttacatatctgttgctgttatggcaccctctcccccgtgtcccctgggatggcagtgacaatatttaccttgtaacaactactccttgccaaactgtcaggacatcattctacgtgctctgttgacagcatctcattaacctaacaccccacgagcagatgtgctctgaggacgctctcaggttattatttgctgatttctctcatctctgtctccaacccattctactctcccaagtgtaccccacacctgtaacagatttttttccaaagcaatctgtcaaacctaaacaaaatgtttctgaaagtcccacctggtttctatggaatttcccccttctttgcctttgtaaaagctcatgcattactaatttaataacactgatttaatagtcaacatccttccttgtccatcattacagtctgtcttatgctgtgtattcaaaagactaagattatgaatattataaatgcacactggtatagaatcaaaacccttagacaagacagaaagtaagatgtaattgttgctatctcatcaaaatgcttggatgtaagattctcacataactgagataaaacattataaaacactaattaggttgaaacacaatcatgccatttcatttttcaatacttagccctaatagctatgctacatatgagctttctatataacgacatttctaccagccacagttttctgtctactctacttaatatctctgtgcttgcaataaatacagaaaaaaattaacacaaactaagcttctttattttaaatctgcaaagagttagtgaatgtaatttgggaattttcaggcagtcattatttgcagaaatgcaagcacttgccttcatcgccatcatccccgaaagggtagaagagagccacagccaggttgatgaacacagccaggttgaaggagacgctcccccagagggagatgtgcctggagaaccagaacagggcggggttgtctaggaagcaacaagtacaagggtgagaatggtcagttattgctgcggtcgacgggagccccactaagctaacggtgtgtgcaacgtgcctgtgaacagtcacagacgtgcatctgaagtgattgtgtctaatcttaggaagcttactgtgagactctagatggcaaaggcatttcctagttggttccttttctgtccttcaagagtgtcagcgaaggtgattctgcagtaaaaaccccttgcatctggcccgtgcagattaaggggaaggcagctagttggtctggggaccttttactgaagggcacaggcacatatgtgctgtaagtaatactgatgggtaaactggtcttattcttatggtgtgaagtcataaaagccaggactgcagacttggatggtccccccactggaaatgctcagtcagttaccttaaagcctgagtctcatcgctgcagcacagcatggatgggagctagagaaatgtaacctactcaagccagcgtggtttctcaggcttgaagtctcagcatctgaggagctgaggcagaaggctgggtattagtttgaaagaaaacgggaatttctagaaaagggaatacatgtctgtcatcagaaatgagctgatgaatgaatctactaaacagtgcttgccagaaactctgttctttccacttctaaataactgagcaaatatatagggcaggaggggggtgttggaggagctaaactgtcagcctactctgggcacctagcggctcctctgggtcttgtctattattcaacttgtaactaggtaacaattgcctgtaacccagacccatgggctatgacaccctcttctggctcctgcaggcactagacacatgtgggcacaagcctacaaaaggcacatacatatatacataattaaaaattaggattaaaaccttcaagataaaatgtcagagtcagtgggatgaggcatataaaatgaaaaccacttttgggatctagagcaaaccccagtctgggccattgactaacaaactgtctcctcctgagatcagctcatttttctcgtcttggagagggtgttccacagtgagaggggctgtggcagaatgctgtccccctgggcaacagatcatggcctgtagacatcaacaccactgtcattcctctgtttctatcagcccacaaaaacatttagattctgcctctacctttgttctatactctgcttctagaatttaaaatacaatgtccactaggaattattttaaggtttatttttttattaaaaaatacttgtcataaaacagagtcccagtttcttactaaattaactttgaattaatttgagcttgctattcaattaattttacatgaagaaaaattattttttcaaatatctcaaataaaaattttgaataatccacatatatattaggtgctccaatctttttttgctgagttctatgtggcaagattctaaagagaaacagtgttgtagaaaactaaagctgcatgacattatcttatacccaacagagcctctgaccagttctggtcatactcctaatctctctcagtaaagagcggagaaaactgaatggtggagaatggataacacacatgcccacctgtctgggaaagtctccaaagacaatgaagatctaatctcaagaggactgaccgcccctcctcaacttctgttattttagaaaacaacttaaaaagatttttcaaatgaaggctttaattttatgtgcatatgagtgttgccttgtggaccatgtgtgcacttggtgccctggaggctagaagaggatgccagaaccctgaaactggagttatggataattatgagctgccacgtaggtgcaaggaatagaacccaggtcctctgaaagaacaatacatgctcttaacttctaggccatctccacagcctcaagaaaatgatttaaaaattaaaattaaaaaaaattcaaactcagtgttttcaaatacataggagagttatgttacaggttaggttgcaaagagagagctgcgtggcgatggctttgactgcaatatcacttgactctctctgactacagctgtttggaaatgtttcgcttggtggatttagatgggggtgggaggtagaagaaagaatgactcctggaaaaactcttaagtaatacttgagaggtggaggcaggaacatcacgtacttagtcatctatggctgcatagtgaatttgaggactcactgagctgtgagaccctgtctaaacacatacagagttacagatggagaggaagagaggggaggggaaaccggggggggggggggcccccagagggagatgtgcctggagaaccagaacagggcggggttgtctaggaagcaacaagtacaagggtgagaatggtcagttattgctgcggtcgacgggagccccactaagctaacggtgtgtgcaacgtgcctgtgaacagtcacagacgtgcatctgaagtgattgtgtctaatcttaggaagcttactgtgagactctagatggcaaaggcatttcctagttggttccttttctgtccttcaagagtgtcagcgaaggtgattctgccacacatacactgagtgttgagggcaaggagtcagtgcaggatttcacatctgcagccatccggcagtgcaacaatgcagctgcagccttgcagttcataatacattaacaagcatgctcagaagctgcaggccatctcattaacctgggatttctgcgtccactgagctgcagaccgctcagcttcagtgacaggagggctgacacgctccaccctgcaagtgatctcggggacattaaacacgcctctgcacacgctccaccctgcaagtgatctcggggacgttaaacacgcctcttcattcagactcacttctgatcttcttctgccatttcatctcgttgtagaggtcctctgtttgctggaagaagtcattcaccttgcttccctgctcgtctctctccgtggtgttgaacactcggtacttggattcccgggtgaggaactcgcagatgttggggacagggaagacaatctgctccatagtcctgtcgtgccgcacaatctggaaacgagtttcatttgttttcagccatttgcacacctcagccctggactccacttttaacttcccttttcttgattgccacgtttagttctttgacaagtccatgcaagcatgtaatacgtacatttcagttaccatcaccgccattccctcattccccgaggcctgcttcttccctgtagaactctttcctgttctccttacttcctggttttggttggttgcccccatagattttgactaggaccatccgtgtggcttccaattctgaactacccagaagcgccgagtggggtcacctagtggatgtacagctgggtgccaagctttccttagttctcactgtcaacttgacacaactctgagtcatttggaaggaggctctgttgaggaagcccctcgatctggttggtctgtgggcatctttattattgattgatataggaggatcaagcccaccatgccagcgccatccccaggcctgtggtcctggaatgtgtcagaacactagctaagcataagcccaggtgagccagcattctttacagtgtctagctcaggttaccatggtaatgtctcccatgcagttataaaccaaagaaatcctttcctccccaggttggttttggcaagactgtttttatcatgggaacagacatgaaactagaacaatgagtttatgaatgatatttttatgaatccaattatgaaaaaggtaaaccagctgggtgaccttgaacctagtacgtaagcatttgtgtcctgttcttcctaagaggggctctgggaaacagatgatattagcattgtgggtcctgagttctctatacacagagaggtatctttatttatcattaaagtgttgtcccacctacagtttggtgttttgaatgagaaatgtccctcatgggcttatgtgtgtgaactcttgctccccagttggtggcacagtttggggagaccatggaacctttaggaggtgcagccgtgctggagaagtgtgtcactgggggtggatttgagagtttatattcttgctttctcttccattaccctcctgcataggaataaaatatgaccagtcagcttcacgcccctgccatagtgctgtgcctaccctgacttatggactcttcctctggaaccttaagccaaaaataaaatctcccttctctaagttggttttgatcctggaactggaggtgtgggtagttgtgagctgccccgtgggtgccgggaccagaatacaggcctctgccacagcagccagagctctcaactcctggatcacctctccagcccctttatatgctaacttaaaaaggttagaatatcaattgtacaaactacttagatatatttggtatgataggcaaccatgtgaaaagaaagttaagagtgtcaagtattttaaaaaagaaattcttagggcttactaaagaaaataagctttgattagataagccaaaatattcagtccctgcataaaatgacatgtttagttctggttgtcacattttacaaagggcaatgacaaaccagagaaactgctgaaggaaatgcattaaccgaagaaagccaaatatggttaatttttcccccgattatttaatgaatgctcactcagtcattagctagcagcactatggtactgaaagtgaagaaaacaagataatccccaagggctgaggagacagcttgctggttaaaagcacttgccatgaaaatatgagggccagagctcagatctccacagacccactaagccttggctgggtgtgccagcgccctgtcattccagccatggaaggaagagccaggggatcctcagagcaagctgtttagaagaggagccgtgttagcaggctctgggttcagatggcagagcccgcctcagtgagtaaggtggaagaataatagcagagtatgattcttgatatcagcctgggcctctcctgtgcaaacgaacatgaccacacacatatgcaaaagcatgcaaacacacacacacacacacacacacacacacacacacacacacgcacacacatatgcaaaagcatgcaagcacacacacgcacacgcacacacacacgcacacacatatgcaaaagcatgcaaacacacacacacacacacgtacacacacatatgcaaaagcatgcaaacacacacacacacacacacacacacacacacacacacacgcacacgcacacgcacacgcacacccctaacaccctgaagggagcaaacactgggaaattgggagtggtggataactacaatggtctagtgtgagctctccacagatacatgaaatctttccaatgaccgactgattaaaactggacgtgctttctgctgaagcagagagactcgtgggaggggctgacagtgaggtttggattatgggggattctttctcggatggtgattaggcctaacccttcccacttcccagagttattaaactgatcacaccaagctatcgttctcattaacacatgggtcagtgtagcagccaaatctgatgcaagctgtggctctgttgctgttcacacacagagcagaagggcaacctttggcatgaagtgatattgcttattaacgctcagagagttgtcaaaaataagcaataagacatagaaatcacccaccatagagcaaacggtgctggtgatagatcctgctaaaaactaaaacccatctaccagaatgagtaaatgcgctgttttgaacctggaatgacaaggtggccaccattctacctgcttctgtcggattagttctgcccagaagcatcaaaatgataacccagctagaagtgacacctcctgatctgccaccagacagtagatgatgtctcgtttatggggcagggagagggtagctgtcagacaatcaaagtgtaaacagctgactaccttgagtgtgtgacaccaacatgaaaattctattagtgctgccggtgttttctgtatacttttattttgcttttttttttttttttttttttttttttttttttttttnnnnnnnnnnnnnnnnnnnnnnnnnaagcaaggtctctctgtgtagctctggctgacctggaatttgctaaaccagactggtctggagctcacagagatctgcctgcctctgtctcctacgtgctgggagtaaagacaggtgccaccatgatctccatataagaagttcccacaatttttaaggaacagattctctagtaattatgttgtctctaaagtgtcactggtctgccctgactgcttctgtgacccaaacgagagaaaaaaaatttagtctccatttcaaaaacttcagccatgggggatgtccggtctgcatgctattaatatatgtttctcttattggttgatgaataaaacacagattggccagtagccaggcaggaagtataggtggaactatcagatgaggagaattctggagagaggactcagagagacgccaccagagagatgccatgtagctactgggaagataggatgccgggcattctccagtaagccaagagcacgtggaaatacttaggttaacagaaatgggttaataattaagagagagaaaatcagtaagaagcctgagccatcagccaaacagtttataattaaaataagcctcagtgtgtttatttggggctaaatggctgtggggccaggctgaacaaaaaacactccatctatacttcagactagttctggggagagaaaagactttgcaagatggacattcagtttccacatgtgactcttaggcatcggcctgcgagacagtcttttccacttaaatcatcaaatattatttcacagttctgagaaaaatcatggaaatggccttagctagtaagcaaatagatttttctaaaagtcacgagtaagtacctcaatctgtgcagtgtggttggcgtaatacttcaaggcttcgtccccttcttcgggatcagatcctggtttgagcatctgctgaagcagtttattgtgtcgggccaactgcaggaaaaagaattaaagggttaacgtctctgcacccttctcttgggataagactttgaagttcctctgtccattcgtgtgtgtgtgtgtgtgtgtgtgtgtgtgtgtgtgtgtctttcatagtcctgggttggcagtaattagccacattctaggaaggttatggctacacttgagaagcataagaatcggtcattcagctgggcggtggtggcgcacgcctttaatcccagcacttgggaggcagaagcaggaagatctctgtgagttcaaggccagcctggtctacagagagagtgccaggatagccagagtaaaccctgtcttgaaaaaagaaaaaggaatcagtgctcacatttgctggataacaaatgtgcggttgtaccgcagagaagaaatgttgacggcagcattgggaagatgaaattcctttaaattacacatgtatgtaaattactgtgaccagcagggcagcgggctgtagaaacaacacaaaggctacgctgctgtagacacataaagcgggctctctacccagatggctctctctcacctcgtggagctcagccctacaatagcagttcttcctaacctgtacttctgcacaggaccaggtcaaatctggcgctttatgggcacagatttcgattacactgtatttgaaactgggcattaaaaacccaacaatctaatgataaataatttcttctcgtgtacatatgtgtgcatgtgtgtggaggtcaaaggtgaacatcaggtggacctctatcattcttctccatcttatttgtgaagacagggtctctcggtaagtgtagagctcaccaagtaggcagcctgttatccgtgggagaactaggattacggcagccacgtgctgtgtgcccagtgtattgtgagcactggtgtctgaactctgcttctcacgcactctagccgagcattccccaccctgtctgtaagtcactgcaaactgctttcggtcagccagtggaagtgatctttttcatctgaacaccgaaggcatttgttgggtatttctctcactttgtagataattaatacacattcccttggagtatctttttcatagatgacttgaataactcctgaaaccttgcaatctccttgagctctcaagtgcaaatgttctatttctgccctgagttccccaggggactcctagggggtatcactgtgtcacaccaacccactaaccctggcggagtctgtctcccacctgcaagcttttaggtacaagatctcattagatcctactcagaaatcctggagtagacacttgcatcacttccattttacagatgaagaaactgaggcacagggagtgtgaacttgcctacaatcacacagttagaaactggcaaaagcaattagtactgacctcagacagttcagttccagagtcagtattttgttggtgttacaaggctgtaaacatatcatcctgttttccatgaagtcttaatataaatgggaccataaggaatcaatacagattcaagcaataatccagacctataaaaccaagtcaacaccctggaaagtgacagtttgatcaattaaatattcattccactgactccagaacaaatcatttttgaaatgattatttttagaattgccttttaggatcatgatgtcttgttttacttacattttatattcaactaaatgtgaattatatagatttttatgaccatccagagtcatgaaacttgctgcgacttgtaggtgttcctcaaagttagaatcactggggcgtactaacaactggcaagaattgggcagttccagggggtggaactgacatgacttacaaactgggatcaggaatgggaggaagaagaggtaaggacctgttatggcttcaaacttaggagtcctcccacagcttatgctgaaggctggagactccatgggaaggtgaggtgaccttaaggggggggcatacaggagggagtcgggtcattgggatgagcccttggtcccagcctctcctttcttcctctgccctgctgcccagatggtgtggtggacggctctgttctaccaccatctctcccatcctcttcaaggccacaatgttgtgcattaaagccacaaccacaaaacttggaaaccatgcactaaaataagccttctctcctcataagctgttcgcctcagctgttatgtcatggcattgaagatctgcttagtgtgagtccagaacgaatgagtggaagattaggaacgctgagtgctattggcaacacagcaatacattgaggaagaaggtcaaaacttggaaacccagagcttctagtgtcatgtaacacaaaaaataaatggcccagagactgatagaggggttcaaacgtctagcagaagatgagaaaagcaaagcagctggccactagcttctaacctctacctcaggctgaaagggctgatcctgttttcagagctgtcaccaagcctcagactgtaacctctcctcagcatggctggagactaaatgcctcctgctgaccactgaagtccctgcttctatcttttatacccttctagtgctgggattaaaggcgtgtgatctgttactcttttacactgattcaatctcttgtatccctgggtagccttgaactcagagatctgtctacctgagtcccaggattaaaggtgtgtgctaccacctcctagcttctggctgggggttaaaggtgtgttcctggcttctatggctcgtggctgtctttgctttctgaatcctcaggcaagctttaataaaccatacacaatatatcaccacagtgtcaccataaaggagaccaagaaacaggttgtagcatcagtttgtcaaagctcttggtagaggtcaggcctgcaacaacaaccannnnnnnnnnnnnnnaggaatgcaaaaataaagacacagaggccattgccttgggataggctcttccctggcaccaacagagcaggtttaaccacaccacacagaagttccaagtcaccaagcctatttaagtagtccaacaggtcaccagagagctcacgggacaagttctctccagagctggtgccagtcagcattaacaataaagttctctaagtttcagtccgaaccaaaaatgagccttaagtaacgtcacatcaatcaatcagctatttctctgcccccaccttccactctgtttccttctgtgagtcagaccactctctccctttacttgactcttcacaacccttaatccattatagtctatttctaggctcggttcccagcacccactgggcagctcacaaccacctgtaactccagtcctaggacatgcagcaccctctgctggccacttcaagaactgcgtgcactgggtgcacaggtaccagagccagcacaatatccacacataaaaattttaaagtaaaaactgtaaatgtaacactaaatgtatatgtatgtatatcataaaatgcacctatatgtataacacaaaccttatacacaaacatacataatcaccaacagtgtcttatacaccatcatatatttttaaaataaaaaactgggaaatgaagaccgaccacaaagtcccaaactccactaacaatgaatacagcttgaaaaaatgcttgttcatatctatctccctatcactaggatttcaatgttgatttaatatggccccaagtaaggactggacaataacaagaaaagccagcgactgtgccagaatgctgttctatggtaattataccttgatacttctatctaaggtttttttttttcagtgtatgttcaactattattaattggtaaaactgacagggagttggttttccccgtttgaagatccccaagtcacatgactgcctttgtgtttaggtcaataagtgaacggtgcatttacacccagcagcattcccatctgaagaaacaacagcggaggacggaacaggttcaaggaaatacaaaaccttgcctgcaaaacccgggccaaaagctcccagcatgctctgaggtcggacaggacatggagactaccatgaggaagggttcttccctcaagaagaaaacggcagagttgcccgaagggggggtgagaacgtcagaggtgagtgagggaagaagaggggggcaggaggagtaacgcagaggtgggtggagcctcgcgcctcaccaaccgctcagtggctgttacaaagttcttctctttcccaaccatccttgctatctagtcccaaaccggcgcccatatcgcctagaacatattttagaccaaaactggatcagaaagagggaggaacagtattttcttttacatccaaaataagctcttgagaactcaaagaaagcagggttaacaaaaaggttggcattagaaaaaaatgagggtgacgtttctgagaactagagtttgacagactaggactggacaccctgaaagacatctgtggaggacacacagacctccaggccaaaagacaagagccccaaagtaaagtatgacatctcagggtggcatttcatcacacctgcgtgcacacacacacacacacacacacacacacacatcacccttctacagtgaaataagaaattggtccctttgagatgcggtgggcaaggaaccaatgctgaggtaaccaaggaaacgcagctgcatcttggtggtcctctccggaaggtcagaaatccccttgtggtcaaacatccttgaagctgcaggctcttctagctataatagaaacctaaacgccagggcactttcccaaacaccacacatgtgcacgaagaaaaggtttgcatcatcaaagagccagacttcacagcagagtcacctacacggtgggtttatgtcccctgggcctctcaaaagggctatgtgaagaagtaccctaaaagagagggaagggaagcttcaacacacccttctggccatcccttcccaacccttccctcctctttctggaatgtgctgtcctttgctgtgctaagtaaacttctgcttaaatcgtctgtctctgcattgatcaattcatcctctcaagacacgggaatcaaggaaacatttacctttgccattaaccacaaggggtttgggggagggagcccagaatacttcttcctcctattagcaaactattcttcactgtctctctccctcactcacacacgtcctagtttaggctggcccggaacttactgtgtaataaaggcttgcctggagcttactgtacaacacaggctagcctggagctcaaggcaatccacctgtttctggctccaagaatgtttcgattacaggcatgagccaccaggcctggctactccacagcctctttacaagagtttgaaaaacatcctttgttttatataaccaatatttaaataaatccactatggctcttagagatctgttaattatttccataacagtggtgaccaaagtaagacaaagattacatgcaaaagtaacaaggaattgagcagagttgattattacaggtgaaaattcttgatatttcagatgatttacacccctactattagagtctgtcttaaattacagtaaagtcaattttagaaaaaaaaaaaacctttaatgataacaagaaaaagcttaggatgcaaaacaaataccaacccttacacacatgcacctccacatgtaccacccacacgttcgagacacacacacactttcccaaatacaaaacacacactatcacatgtgatggggatgtccttctgtgtgctgtgaatatatgcttttcttattggttgatgaataaagctgttttggccaatggacaggcaggatatagccaggcaggaagtatgggtggggctgccagactagaaggtgtggaagatggatgcagggagtgagctgtgagacagcggccatgggaagagacctatcaggaaggtaggacgcctgggcattctctgggaagatacagtcatgtggagatacacagattaatagttgtgggctaataattaagagagagctaaccaataataagcctgagccatctaccacacagttataattaatataagcctctgtgtgtttatttgggactaaacagctgcaggacctggtgggggacagtaacttccatctacaccatgtgtaacacacacaaacatacatgcacccacacatgtactacccacacattcaatacccacgtaccctgtacatatacatgcaccacaaatatacaacacacacacacacacagagagagagagagagagacagagacagagacagagacagagacagagagagaaagaatgtcccaacagaacaaagtacttaaaagcattttttgtaagctctccctgtgatgtgtttctgaggaaaacgccagagctgtcatgacagggaaacagttctccactccacaagctgctcacacccctcctaaaagaatgtgtctgcaagggggcaggagctagaaacgcaaatcccagcacctccttctgattcagaaactgagacaccatcatgtgacttcaatccagctaacatttgccaagttctgtcctaacggtagacatcattaccagaaacaatttggattcgtcatcacaaatccactttaaaatacagaaaactaaaaattaacaaactttcctttcttaaaggactttttgttttgttttgttttcaagacatgctatctctgtgtagccctggctgtttggaactcactctgtagaccaggctggccttgaactcagagatcctcctgcctctctgcctcccaagtgctggaattataatcagtgctcttcctgaggtcccagggttcaatttccagcacccacatagtggctcaccactgtctgtaactccagttccaggaacccgacaccctcacacagttatacatgcaggtaaaatgtcaagacagatttaataaaaggcatgggcataaagtttaattgtcaggggcatcgattaagaatataagtcactattatctgaatgactaaacctctgagaaaagacagtatgtagggcatcttcctatactcagtatctttcaaaaataatctaaaagaaggcaagaaaagaaactaattcttcacactagatgggcttatcccaaacacaagtaacattaacaggggttcctaaaggggcacctaaggtttccgcttttcttctgtggaactgatgaaagagacaagtgccctccactttgcgtcttttttgatgtgactgacgacgggttaataggtgtaactttaagacttctgggtctccctctttctacacaggaagtgatgtgttttcttcagactcacatatgagagggccccattacctgagctactcctgtaggtgaggaattagccacctattacaactgaacttgtagtcacattcagtgtgttttcaaagacagacatagggtgggcttcaaacacttcagagatctacagaatatgacatttaaaatgttttaataacataggttatttttttatgacaatgagacgtgtctgctcctggcagcatcaatataattcagagaagatgctgggcatcgaagaagctcacatggagtttactttctttgtggcaaaggtaagacactgggcaagaaaagtgcctttgtctctgctgctgacagtatgctgtccaaaatggacaaacaggacaccaaaaagtgtgagtgcgaaaccttgccaagagaaggcagtccactccttcagaaaatccctgcttcacagaaatgtctgtgagagatgctaggcctgtaggccaaagatggatgtcccagtgctgcagaggaaccttgggtgactgtccagacagccagctgtttctgtcatttctcacagttttggggagtcatttgatcacacttcctgtttattcggttaatatcacttccttcttcagtctctgagggagttgaagactggatagcatagttatagttttcattgtttaccagatttagaaaagaaattcactaaagatgtgtaaagtgtaaatgctttgagacacattaaagtattttaataaagcaaatgagaatagaaagtaaattagctacaagactttggactcgccaatttaggatagaaaatgaagtagtttctcagaattgtcaaatgcaaatggactagatattttctctgagacattgttgatgaacttgtctgtatatattgtatatatttattgtactttttgtatatagtttttcttatgttagttgtagacttctttttgtattggacaaaaaaggggaattgtagtgatatattatttatgatttattaaagcttgactgaggattcagaaaagcaaagtcagccacaagccatagaagttaggcacacaactttaatcccaacagccagaagctaggaggtggtggtacacacctttaatcctaggactcaggattaagaggtagacggatctctatgagtccaaggccaagtagaactacacaagagtgactcagtctaaaagagaattatagctcacacctttcatcccaacattagggaagtatgtaagacagaagcaaggtctcagagaggcatttgttctccagccacgctgaggagaagttacagtctgaggcttggtgagagctcatggagacaggaccagccctttcagcctgaggtagaggtgagagctagtggcctggctgctttgcttccctgatcttcagcttgaagactgaaccccaatatcagtctctgggtcatttattagtttgtgttacaaagtcctgcaagcaccagaaagaagtacgtgggtcctcccacccaccacagctctctgcctcctcctgcagggctcttcaaacatggcttgggaaatacctaagaccaaatacacagaccacagggatctctcctcaccatcaggagtgtgaaatcatccttattttaagtcagtgtctccctcacgcagaacgtctagaagggtggtgcttctgttttacttactatttactaccccacctatccaaatgtgtgtccagcagacaacggcggttcatatttgctggatggactgatggacaatggccgacagatgattagatagcccaattacttttcattatttgacagctctactttaaaatgatccacatgtttaactttccaacaggcccctctttagaaaatgatgaattggcataatccatgtaaatatttagaacgtgttttaattcctatttctagaatcaagcagtaatttcttgagatggtaaagaaaccaggaagaatgaattcctgcttctcttgtcaaaggcgttctcattctcctggcaatttttgtgcatcctttagggcaaggaaccgggaggtggagacaccgccttcagaaggagctgagattttgacgaatcacaactgtgcaggcagagtgacagctggatgagtgactatgctggtcccaccgatctttcacgagaacacgttcaagtcacttgacctttttaaggccgattgccttgctgtgacaccggcaaacaacacaccacagagggcttctggaggatgcagctactgttgctccacacaccctgggcaaactcccttgctcagtgaagagcccaggattcctctccagctcctatcagctcctatctaccagacctcctcctggaagactgagtcagttgctcatagtcttggcaaagccactgccagctgtgttaattagaggcttgaaattatagtggcgattcctacagtgctccacaaaaccactggcaggctcagaagcaatgtgaagtgcacagattagccagatgtaaagcctgggtggagtcggaggcactgagagaggggccctccctcccgccctgtgaatatttctcctctattcctgagctacagcagattagcactatcaggccaccgctgtctctgtttaactaaggaacagctactagaaaggtcagcttgtgttcatgcagtggtttgtaaagaaagagattattgctcaaatgaactctgtgttgcaacaagcccctgcccggcaatggagcaagcaagggcagggtgaatctcagctcttggaaaggcctcagcagtctagcagaactggaaagaggccagaaagtttcagagagtggaggcgcttactcagttaccagaaggcacctgaccgttctgaaggttgagggtcccagcttgcaaacaagagcagaggccggcaggagagaaaggaggggaagaaagaaaatttagacaaactcatttagaaaaatgcaccagtgaggatgacatttaaccatacagatattgaatgcacgcacacaggtactttggacaaagatgttacctgtagtataaatttccttgttatgacataatgagatcattgattatccatacatggaacgtgagttttaacattatcagatccacaaactattcatatgcaaatgtaaaaattcctcttattctaatccaatttcaaaagatctcctttaaaagcaggtgactgtggactaagtgcctggttctccagcctcacttctgcactctggttagcctctggtgtgagcgaagttacctctgatggggtctgagagtgaaaagacaaaaaccctgccttccaggaactccccacaaacacacaggacaatggacctatcagggggccaagaaagaagaaagctgagagcgtggaacagaggctgccatttaaaatcaaatcatcagggatcattttcctgaaaatgtaacagaacagaacagtagcaagctcaaaagacacaaaccatggctacaatttgtggtttcagagcacagctctgtatcctgagcagagaaagtgaggcagaaactgccgaaggcacagactggggcccaggtcacacaacaaggctttcaagactacatatatttgatttttaagccacatgtgacaacatacacttgaaatccctgcattgggaggctgagaggaggaggatggacatgagcctgaggccagctgggctacttagtctgtctctaaaacacttggaaagaaggagagaagggaggggggggcagaaacaagacttttgctaagaaatgagtgtcagaaggtgctgagaccagggttagcctgggcatgacataatctctttgttggggttcactgtggctactgtgtcagggaaagtttggggtgcacatgtgaacagaagcaggaagaacaaagcctgaggctacagtccaccagagaccacagtgacaaggaccaaacagttgtgaaggacgtggtcagatcccggagtaagtggtttttgaagagcaatgggacagaggtgggtcaagagtccagttagcaccacaggctctgagaagacccagggtcaaatgaccacgggcaaaagctgtcgctcctttgtactccaactttcttctctgtaggtggagctaccgagagcatcacgttaatatgaatcccaaagactcactgacggccagtgagacttggtgcaaatgccaagtactttgagcacaaccatgatgggtatccaaagccagacggtgcatacctccattagccagagtacggggcgtcgctggtggcatttgacttctttagggagagtggactggaaaggaactaaagtggaaacagagttcagaggctgctggagggtagtagagctgatgggaggctggctgggctggccagggaggtgggtgggcccaagaaaacatgggtatcgtcctagtcttttgcttataggacatgacattcactgagggaggggccctgagtaacctagggacaggtgggggagaattacaagactgaatttccttcctcctcagtacctcaggtctactgcctacaggaacaggaaatgggaaaatgtcaagtccaggggagaagccaggaagggcctggctgcccggccccactcacgccctaaaccatggagatgctctggatgtgtgtgcctaaactggttgttaaacaggtgggagtgatcaactatgatggaaagcaagctaaggggggcttctgaatggaggatagaatcaataaaaacaggggtcgatgaggaggaatggacaaggaaagccagcccacagaaatggcgctctgtgaaagccagccactcagacacctttctttatcccttttgcagctcaccttgggtcctcttgttgcacccacttagcatgtggaccccaggcgagtctgagctctttcctgctctaacgagcccctggacagccatgcttctctcctcttgctttatctcaaacacgtgagtgggaagcctcagtgcaactcccaagcccatttaattagcacaattgtgagtccaaagcatgtgccatagatgagagatacagagcaccacacagagtggagactcacagagacaacccctggcaagggcagagatcggctcttgcacactggaccctctgagtgtgtctacgtaactctttactgtttgtctttaggtaatgccactggcctaagggaacaccggtatgaagagactccaggaatgctggcatggatattttaagcccctcagctcccctgctcattatggtccagtttgggaatgagcctgcaacacagactgcctgccctgtcacaggaatgctgcatgtcaaagccaggtgtgcacttcctcaccaggtacttcagggccagttgtccaaacttgctgagcctcacagctcccctgtttgtaccccactgtctcagacctctccttcccagccatcccccgggggtccttttcctcctgcccccccccctttagcccgcctttggcgtttgaaatcactctgggttttcagtcttggttttacctgcttcattccaggtgctttgctaggaagtctaatcaccaccacaatttcaaacaccatctataggcatgtctgtaaccttaatactcaagcctagcttctcttgccaagaatgaagcacagagccgtcttctgatattcctttgtcctgtgtcccattggctcctaaacacccacagcctagaaccaagccctttgctctgttctactcagcttttccacctccaggctcagatcacatcgtcggcccggaaggccggggctgggaagaggtgagctgctcccccaggtcacctgcactttctctagcgtattcccagttagtaaatcagctggcgatggggacttcagagcaagtcagtttcctttcctccttaggcttcccgcctacaggaaatgaaaatgtcaggtcctggaggagaagccagaaagggcaaggagtctaaaaccctaagtaagactagcacgtgctctagacctgaggccgcccactccgctacctgatgtctctgaccgtcttccaacgctgtggaatcttgttgctctacagggccaaggagaacacgagcagaagctgtgagagatgggattcctttatttctttcactgtgagcttctgcttatttgtttgtttgttatcaggtaaatatcttgataaatggagatgaagttccgaagcttctgagacgaggcggggggggggagagggagcagagggaaagcaggcagcagtcgggagggggcgatgcccgggagaggaaagcacaaagagagaaagactgggaagagccttgtgtggccaggtggttgacctatcaggcattgaaagaaggaagatgaaaggggcagaaatccagagaagggtttaaaaaaaaacaaactctggtttgtatacacgttaaataaaaataccctggatggcctaagatccaacccaagtctcagcagacagaatccaggaattggagttgactccatttgagcaccccacgtttgctttgcactgtttcccaagttcatgtcaggcataagcgagaaacggccttggcctgcccaatgcctttggtttgtgctgagcctggacctcctgcttctactctgcctgattcagtgccatccctggttcacagtggactcatccatcttcttggcccaatgggtagcacacacctgtctgccctgttatatacttagtgggtcctcgtttagtgtcagagtccactgtccacataatgtgtaaatcacacaactgtgaaattataaggtccttgtcctggctagttttatgtcaagttggtaccagagggagccaaaccctcagttggggaaatgactccaccagattggtccttgatgcattttcttaattagtgagtgctaggggaggggccagcccactgtgggtggttctggggtgtagaagaaagaggctgagcaaacaaggaggcgcaagccagtgagcagcgcccctgcatgacttctgcttcagctcctgcctggagttcccacaccgatttcctgagtggtaagactgtggtgtggacgtgtaagcaaaataaatactttcctccacgagttgcttatggtcatgcttcatcaaagtaataggaagctcacctctaacgccttcctttcccttctactaaaagcgtgactcgtgtgtgtctctacttgtgtgtggtgttacaggattacacgcaaagagaagggcaccggcattccgcttgcctcgcatgcctctgactccttaggttcaatccccagcaccatcagcaacaacaaagaagaaagcaaagtgaattaaaatttagaactatgcactggagagatggcttagcaattatgagcacattggatcttccagaagacttgagttctatttctagcccctatgtgggtggactcacgactgcctgtaaccacatacctctggctccgtgggccatactcaggcactcagacacacatgctcactcacaaacacatactcatattttactttttaaattataaatgtatacatccaggcatagcaacacacagctataatcccaagactctacagatgaaggcaagaaggttaagaggttcaaatccaactttgactacataacaagttcaggcaagatcaggccacatgagagcctgagccaaaaaataaaaactaaaggatgaaaaaaatgaaaagagaaaatatagcccattttttctcattctttatacttacgtatttatttatggggctgggacacatgtgtcacagagcatggtagtcacaggataacctgtgggagttggttctctcctaacatcagtgagtcctgggggttgaacccgggtcattgggctgggggtaagaggctttcttgctgagccactgtgtaggcccagcccattatgagcaggctatttcaaatatggggcatgggaaaccgtgaagattataaaagccatttacagcaggctttggcaaacaaccctcctgggtaaaatctgttctgccacctgtttcataaaatgaagtctcacttggtaaacacaagcagaccggcttgtttacgtgtccaggctgcttctgtactggagttgcagagtgcagtgtgtgcagccgtcagcatggcctcacaagcctcacagccagacatttactggctgacactggaaggcccccacccccagagtggcacatagtggtttacaggccttacacagctgtcaaaaacttacacatacgtatttatgtacgtacgtatgtatgtatatgatacagacagatgagcgaactacataccttgaaatcatcaatttaattatctctaaagtggagcctctttcattgataacaaaaatcttacccaggggcttaccacagttttccatactgcataatttcagtcagtctcttgggtgtgacatgatccagggattttttttttttttaatctgaggggttgctttctttaacttaacagtttaccatccggtatctagtattgttctattgcaatgacctggtgcctttctgtgcccctttaagtaattctgaagcccaaactgatcaacagacacagaagaccagagttgagccaagttgtggctaattaataaggctcgaatacccatacaactctctttggctgttataacagaaaaaagctattttgagacatttaaaattctatcactggatctatcaacagaaagaatgtcagctggactctgtcctgacatctcacccttcacatgtccacagagagtgttcgggatggaaagtcggctgtgtagtcgtaaacaatcttcatttacatctgagttacaaaaggcagataatcagcaaacagtgtaggcaggtacacctacacacagacacacagagaacgctgctctagacagatccatgcatgcacacacataaacacatatgcagcatattgctgtatgtttcagagtcacgcacacatgcacagatgcataaagaatatcacctgatgctctgacattaaagtgttttccttcacttatacgttgactaattaagtgtgctcttgggttcggttatcacagacttacctttgaatagatgttgagtgacaccaggatataaactaggattcagacaacagtaaccatgaaaagacttgacctgacgatgctttggggctggtgggtattttctgaagcatatgcctgcaccggttttttgtgatgcttaatgttttacaaaaccattatcgttccattaactataggtcatgttagtaagaactgggcacgctggggaagagtgaaccgtgtgcgtggtgcgttgagacgagcattctattcgtgtggattcttccctatctagtccttcacaagttggtaagacgccccccccaccccactctcccccacccactcccgtcatttcacattgccatctcaggtcctaggagactgaccttccacacacagcccggtaaatatcatcctttattcttattccgaacacgctttctgtttgacaaaaacatctgcctctgaggcccacagaaggcaggacgccatcaaacctgatgatctgagtttggtccccagagtcctcatggtacaaggagagaatccactcatacagctgtcccttcacctcctctcgtgtgaaccacaactcctgcacatatgcacactcgtacataaacaggtgacataagaactcttcttattgctcaactaaactgtatcagcccataaccaccacggagatctagtcacacctccccacgacctccccagtcatctgcagcacttgtggacagtagtagtcactcacttaaaagccccaggtgtcacagtttccaccacagtactaggcaccagtgacagtcaagaatcacgcctcaaacctgagtcagctctggggcccctcctgtttctgcctcctcagtgctcagcatattctgtaatttttctattgttgcagaatgaaggtttacttggggctcacagttccagagggttagggttcacgatggtggggtgcaggaggcagtggcaggcagccagagcagaagaggggagttcatatcttgaaccataaacaggacgcagagagagctaatttgagatggtcttttgaaacctcaaagcctgcccccagtggcatactttctccagcaaggccaagggtctcctaatccccctcaataaccatcaactggggaccaagtagtcaaatgcccaagacttatgggggcatctcattctaattactgcactaagattacagctttttaggtggggactggtgtaagcattctgacagatcggatgggatggacagggatgaattctggcacttgggagtcacagaatactgagtgttacagctctgatggaaaggtattctggcactcgggagccaaggaataccacaggtcacagtaagcatagcagcttactgccctgcttcagggaaaggcttccccagatgtgtcagctctgctctggcaggagagggtttcctggtcagttcggccagttgggctccagatcctggagagcagagtgtaacaactctgcttagccaggggaaggtttccccgggcaatgacaagtgttacaaccctgcttcactccactccgcccaaggtcgtctctgctcctagaaaagaacatctcacccaaacctcattcaagagatttattgggagggaagaatccaggagagtgactgccctctgccagggtggcagaggacagctgagcagcccaaatggccagaagctgaacaggcacagggtttatacagggattcttaggggtggagtttttccagggagatttccagggtagggattggtcagatttcaatccctgagcttaggatggctagatctcctactcagagattggttagttttctgcacagggcctaagtgtgtttctttctctggtcccttttagcctttggctgtagttttagggccagggtgtatttctttcactggctctgattccagggccaaagtgtgtttctttggttctgctcagggtgtgtttccttggccggccccttttccccgacaactaggatctgaactggttccttgcacttgttcagcaagcatgttatcaacagcctgagccatctctccagcctgtttgctgactcttgattacaactgggaagtgatatcgatcctgtcagaggactgagaaacagagagtatgctctcacttcgattcctttccaacaccagtaaaagacgctcactaacaaacagtacagcacattatttttaactctgtgttagccacagctccacccagcactggcaagcagaaagtgtatcagtgacagctcattgaacatttagatcatcttccctcccagggcttctgagttcttattttaaaagttcaattacgcacaggcatctctcacttaacctcaaatccattgcaagcaggcgaggtgtatacaaacacgaatatctggtagccagttagttaggccaatacatgatttaaaaggtaatgaaacccatcagaagagccaccgtgactaaagacactttggcctgcagacaaagctcacaggagcctacactgcttttatggatgaaagttgaagtcggaaaatctgtgcagccctgacagaggacagaacaagccacgggggcggggggggggggcgcgcggcacaagcaacgtttcgttaccaggctgcttgtgcttctgtgagctgacaaatacagctgtgtttctacttcccacaagtgatgataatggtaagttagtcaacacccttcagaggtattagtgatggaagttacggatccaattacaaacccctctttccgcttctgcaaataaagtaaatgaagccatgctgattactacacattagcatcggaaggccggggctgggaagaggtgagctgctcctgtccccaggggcacacttgaggcagtctgagtgatatacacacttccactgatttcagggtatttagaatattttatatgcgtagcccttgaaatgagtacagctcgagcaattgcagcaatgaaatggattttttaaggggcaagtggcttaatgaagactatcagatatctagaaaacatcggcataaccaagtatcccagggcgagaagcagcaaagccacacctacccgtctgctgcctccacccctccccagagtgccttggttagcaccaagtgacaatccaagtggctgaaatatgctgccaaaatgctggcattttccttttggaatgggaacgacaacatacaactctctgatatctccggcactcctaacggacttcgtgaatggagggtataagcacatgtccctatgggtgcgtgcatccaatgtgctcacacatacatgtgcacacgtggaagccaaagaccatcatcaggggtcttcatccactgctccccacatcatattttgagcagcttctcttgcagagtccggagctccttagttcagctggggtggctgggcagtggactccagggcgattccccccccacttgctgaggttaaagacctgcatcagctcccaggagactttgaatcctgtggatatagctgaagtcagcatgggtgtgagggagaagaggagccaggcacttagccacagctgctctgttgctggacttcaggtgagtgctctgataaccacggcacagaaacctaacaaaaaggcggccagtaagccaaacataactgctcctcctgagcttggctttacagtccttccacccggctcaaaattagagtccaattttatcccacttctacttttgtgtatttttattgcttctgctaactacgaattcagaggtaacccaagactcttagatgctcagtgaaaggtatttcgtgcttattaaaaggatttaaatctaacatatccaagcttttttttttcctctcattttactttgtttttgaaattttctttaaaagagagagagagagaactcatgactacccatatttgtgagtttcctatttattaaatatccaaggcataaacagttaaatgtacacaaacaattgaacgtgcgcagctgaatatgtataagcaattaattaaagatgcaattaaagatgcaggaagaatcaagtgtgcagaagccaatgagcacaaacaattaactatgcatgaataattgcacacgaacaaacaaccaggcaagcgtaaacaatttaatacgcagaaaataaccggaagtaattctactagtgtgcacagcatttattaactactctgcttcagtgttgtggccaatcaaatacttgataggtaacaactgaaggaaggatttattttgctgcatggtttgagcgtacagtccacacagtggggaaggcatggtggctggagtagctgcagttatagcagcaggaccacaaggctgcttgctcacttctggatggatcaagaaacagagacaggacagcaagtatggaaggttataaaattccagagtccactctctaagagatgcacttgctctagctagacctcacttcccacaggttctacaacctcctacaaacagtagcactacctggagatgaagtcttcaaacacacaagcctgtgcaaaacccttcacatcaaatcactatctaccacaaatgtaaaaatgtggtttgggtgaacatgaggaatacaacaatgcaaaaacagaaaaaaaaaaagacaattgtgtacaatttatgcaggaggtaggggaggcaatggcaggagatgacaactattggctcaagagaagggtggtatcattggcacaagtaagaaaactgctcagcaagagggaagacagtgccaagccctgtctacactgagctatgtgaaaagactggccaagagtggtctataaaatgaaaataagccatcagtactgggtaagtgagatccctgactgcccaatgcctattcttagttcttacgttccataaaaacaccgtgaacacatgtgcctgctgtgacgagttattcctcagaactctctgtgagtatccactgctgcaaggagccatactgatgtgggaataagaaagaaaagagaaagggtgtcttgtcagcatcagagggtattagtgctgcactctgatgacaggaattatcacagtaacaatgataatagaaaaagcgtctatatttggattttaattattacacataaactaccaagtcccaagcccgagagcatttcatttcctagtcacttcttcactctccaacccttctctcatgtgcatgaccttccttaagtgcctatggctggttattccatttcagcgatgtccacgtggttccaattactgtagtctttgtcacataaaggtctaagtggacaggatggagaccctgtgcagagtcctgagcacaatgcccctctctagactctatgctgccttctcactgaagcagatctctctgcctcaaccatcctcttccctcgctcctgactgccaagtgcaaacaacctgcactttttccatttcaacacagcatctttaatcatggaagtttcccatccccctctccttccagaatttgctttcttgggagtttcttgatttaccttttcatctcagcaactagcatgatgcctgacttaggaagagaccaataatcactactttgtgataaacgaacccaaaatgaactgaatgggaccaatactcaagtgtcagtagctagatggggtagaccagctagccaggtcttattttctccctgtagacacactgagctcttgccattcagaagccactgaatggtgccttgtaagtcaccctctatttcatgtacttgtgttttttcccttagactccactccagtttcaaatcctcagagaaagccctccagatggtctcatctccagctttaccacaccctattcccatcagtgcatggctgctaccatggtctgctaattgccccgtgtttgtctctcctccactgttcctagtcagcgtgcaaattgtcccaatgctcacctgtcgctgttactgcattgtgagagtgtcaaggtgcctggaagccagacagcttcactccatctacacaatnnnnnnnnnncagtatgcaggaatgtgtatcctaggttctacccgtggtaacctaattccagctaggttggcctgctccgtgactttacattttttaaataagttgccaacttttaaagattagatttcatgattttagaaaaattcaaacttcaggcttcttttgaagtgctggaaggagtagaacaccgaccggggctgggacccgatggaggtgcataccagcttctttctcccgagaggagggtcagacagcccaggcctgccctgatccaggtcactcacacacatgagtctcaggttcatctagactctggccttcatagcttctccaaaagcttccattctctacattcctgcacagggctaccacagaccctgatcaaaactcagaatgtgccttctgagaagagttagaaccagaacctaccacctcagctgggcatggtggtatacacacatgcacacatacatgcacacacgtgtgcgtgcaggtgctcacacacacacacacacacacacacacacacacacacacacacacacacgatcagagcaactggaaacttgaggcaggaagactgctacaagccccaaacatccatgtatgatgatagaaaactacatgattaaatacaaaagttgaactcattatgtgctcaaagaaaccccagggaagtgtctaaaagatttaaggttatggacaaaggggatattaaaacactgaaaggtcaatgaattggaaaatagatacaatcaatatgatggatgaatggttatgatcctcaattaaaattctgtaaggcaaaggagaactgataaaagataaatacaccttcaagtaatccacaggagaaatacaaatgatcaaaggaccaaagaatgtacagggagtcaaatgaccctttaacagaggtcatccaagatcatcaaaaaatccagatatttacattataattcataactgtagcaaaaattacagttatgaagtagcaatgaaaatagtttcatcattgggggccaccacaacaagaggaactgtatcaaagtgttgcagtgttaggaaggtggcaatcactctaaggaagtgactacaaatgagatctccatttgcatctcacacacagacatagtcaacaggagtctgtggactgagagatatattccagacgctatcagttcaggaaagaattttcttgcaatgacatgaagtttagggttcaacagcataagaaccatcacgcactgtggaaagtaattttgcaatgtatatcaagaggtatagagtagttcctatgacccagtaattaaacttcttgaaaattaccctaggaaaaccatcagcatggtggacaaagattaatgtatgagggtgttaatcacagcataatttgtaatatcaaatatattagaaacctaattacttaacaatatggagtgattaagtaaattacagaacattcaaatgatgtctaattatgcagtcattaaaatgacatgttcaaaggccatgtattgattcaggaaaatgctcatgaaaaaaagtttaaagcttgcattttgagaagattttcgtgtaacgaattaaagtgaccgttgttactttccactgatttactatttaaagcatcttcttgcccacaaagcctctaacatttatccatttatttcttgtatctctttctgttattttgtgttttcagacgggggtctcatgcaagcacctaggctggcctggaactcacagcagtcctcctgcctcagcctcctgagattagggattataaaggcacgagccgagatgccctgccctttccataaacatttgacttcaggtgagagtcaaaagaagagactcagacgacaagaagatgaattgtttgatagagctaaagaggtgatgtagcttcacacgtgacgagcttctacggaggggtgggaaatgtaccagacggtgggtggtgactgcttcaagagaagccctgacagagaagggatggggagcagaggcgacctggagatggggagggcagagccaggaagcactgctgagtggcaaggaaattcacagcacaacaccgcagaaatcagagctgaagaaatttcccttcatgatgtattaatagttttatgtagattagacaagacaattacaagaagcactgttggcttcttgtaaccctgaccacaggaagggcccagagggatgtcacggtggaaaagcagaaccttgtccctgccacgagaagcactaacaacaaaaactgaaagtctgcgggcaccaaaataaactgtctgcgcagaggacgattgtagtaaagtcaggaggagggagctgcagctcggttctcgcatgactgggctgtgcaggggcagactcagaatctgcaaggtcatcagctgcctgagtgcctcactcccaccgcaggtgacctcagacctgggtctggcaccgtactgcacagctactggtcccctccagggaacagctggccatcttgtacgcatttcatgtgtacctctgtgcaggggctgtttgcacagtaggttcacaaggaacacagctggccgagaaaccaaataacactccagccgaaagctagccataggacccacacatggaagagtcaaaagagaccaatgtgggtgaaaattgctaacatctcaaggaaaacgagtggtataattaattccagaaggaaaccacacatgctgacgagggaatgacaccttgtatcactgaagggaacaagacgagttacacacaccagcagaaccactgaagggttctgtgtgtctgtatgtctgtatgtctgtgcctctgtgagtctcgagtctgctcctacagcatctctgattctaagagggacctgtttggataaatcacaaggccaatgagtccagcagtccagagcccacttgctccctttctgagcctggtccttctctctgcaagcctagcttcccttatgcagctacacagcatatccttgctgttctgctgttctgcttttccaaagtcgtgtctggaggaagtttggtaagagccgtctacgggaccccagccatttccgaatctgctgctctcccacttcctctcagcaagttgtttttgacccctggtgacccctgggtggcttgaattcctgctctttcgtctttgaacacattgtttctctctaagaacgtatttgttctcagctcaaatgcaccacactcagtgcccctcacagggtcttcattcccctgccctcagtctgccttctctgcttctgctctagctgtgtgttctccttccttcactccacggccacctctagcatctgcattttctactcctatgctcaacctactaaaacggtgctgagctaaacgtgagtcttgacttcaacgtttggctgtccactctcctgctggtgtctcgagacttcaagggtacgggggttgatttggatccaacacctgcaattgtgttggtttagcctgactgtggggttcatgtcctgtggcgtatgtacaaggccaggcctgaagcatgcagctgctcgcccatgctgagggacagccttcgccgagaggggaagaccagcttccagtgaagagtgtgcaggtgggctcgactcctcttagaaaacaccaatgctgctcgctctgccccaaccttcactgcctccccgcaccaaggtgttacagactccgaggcaaccctctgccccagacacactaactgtcactgtgttcctgtggcatggcttgcaattttaattctcagcctaagggttatttctttctgttcacattcaagttcattttctactcttcttttttttcccctagcttgaatcagctctgtcgcctgacttttctttctctgaaatgggactttcccacatccgccttcccacttccttctacttgtctcttggcttggcttttggttcctcaaggcctaaaatgcctttctgtctccacagctgtaactcggctgccctcacgctgtgaatggacagactatgaaaatcttgcatatgtctaggtattgactatatcacaaaagagcaacagtcctgtggtggggctcttagacctggattccttccttgaagacgtaaaaaacattattcaagtttatgtccattaggtgaacatctgaaggtggagggcacaggaaatgtccaaagagcaaccttcacaatctgacctccatcaatcagtatctatttcatcaacagataagatgggtaggaaaacagacaggagaggcttgagacattttcaaagcctgaactttatcctctcaaaatgatggagccattggcaacaaaaatcaagtcactgtgtgcacatttagaattttacattttaaacctgtctgtgttagatgatgcaagttcaaaatcaaccatgtttgtggaattgggcttaccaagcaatgcttatcaatacttaccagcaatgaaacggaaacaccactctgaagaaatttaggacttaacttataaattccgggagtccagtggggaggactgagaggtgcaagcctaatgacttctattaaaagtttgtcaatatgactgaacgcagagctctctctgggctagccctggctaagttatagaataccgctaacccacctcttcacaccctgcctcctcagaagcctgtcttccctctctcgaggctctggtgtgagaggcttacttcttccaggcacagaagttttctcccaagcctcttcttcttgtcaatggctcccttgcggaccctgaattgcacaatggggcattctgccaacttactgttttctctgactgaaagcaaggagggtgggtgctgaataaataaggacaccagaaggtagaaatacaataataaggcatctgcatgagacaccatgaccaggtaagcaagatacttgctgataagaatgtggtacctggtgggccagaatgtagatgttgtgtccaacgtccttgggagaaaccccgtcatcccctccttcctcgtccccgtggtcacactccagtccttggttataggcgttcttcatcacatccacctagcaataaataataaataagtaaatcttgagaaagggtctggaaggtggcagcaacacttcatattgtttgtgagctataacttaaaactgggaagcttcatgacagccaaaaataaagcagctctaaataagcaaatactgcatttttctcttctctgcagactctagactgaactgtgtgcatgtgccagtctgtcgggtgtgaatgtagagggcactgtgagaagacagaaagagacagaagggaagggagagtgctgagacagggcaatggagtacgcatgaaataaaatcagcaggtatatagggtgaaagggggaaccggcgaaggggagacgggatagaccacgtgacggggaccaaaaagaaagaagtgtagtggcttccactgtcgactggacacagcccagagctacctgagggagtttcaatcgggaatgtgcctccctaagattggcctacagagcattttcttcattggaattgatgtgggaggccccggcccactgtggctggtaacatccctaagcaggtctgcccgaggctgtgtaaattaatgtgagccagggcattagccagcagtgcaagccaaataagccctttcctccccaagttgcctttggtcatgctgctttatcacagtgggagaaatccaactagctcaacttatttgtgccaaagcgccataataagaactaataatatctaccaacagaaaataatttttaaaatattttttgaaaaccacagctatttaagtgaacatggaatcaccgtgttccctgtttacggcgtatttaagtgaacatggaatcacactgtggcaatgttccctgtttatagccaacacttctgcttctgtctgtgaacactagcacgctgaagtctccacgatttaagagagtctggaaccctgagaaatatccactgtttactgagcactcaagagggagctggggacagggtgctggcaccagtgctgggcactgaagaacctgcgtggacaaggagagtgcctctgcccaagggcgtgcactgttgtatgacaggtctccggcaggcacctaactcagcttgagggtggatcatggaggaggagcagatgacagaaaagggttaaaatggcagaggggactcttttcaaagtgagtgcacagtgctctgtcaaataaattcatagccatatcccccttaaccagagtgcaattcctagtcttactctactgcctggagagacgaggctctaactaaagaatgtcttctctctccatctccactctactcttcaccagtgagcccagagagtgtggcaccagcctcccttgcagtctccacagcaccagcagcatcactgacatgacaggactttgtcactggcgggagggcgggcacactgagcagtatgtcttgagcctgctctctcgggtatctggaacccattgcttttgaagcatgcccggatgacatcattgtttgtgtgccagaaggcaaaagaaatggagcttttaacttgtgcttgtggagtcctgattgtgtctccctctttctctgaggccagatgttctgtgacagttcattcatgagaatgatacacaaaacacgcaaacgaatttatctgtgtttttggaaatgtacaaacaaaactcgggggtgtggtaaacacagtcttcagaccttccttacaaaccatcattcctgggtgttctggggacccggcttcagtacctcctgaggattccaagacctggggatactcaagtaccactataaactggagcaacttgcatgaaaaccacgcacctatttgcaccctcctgcatactcaaaaatcatctccaggtggcttgtgacatgcaacatgatgcaaacatgtgaatcattgcaccgatgggagaaaacagggtaagagtccgtaagtgtcggtgcagtgtgctttttaaaaactcttccagtccacaattgtgactctatagggctgagcccactactacagacaactatacccagaaatcattaagccaagataacttttctttttttgcaaaaggcacttgtatatagttaagtagtgtgtggaaatttagcaaagagaagtgcttaaagtcgataaaactggcaaaatcaggctggagcaatggctcagggttaagtgtgcttcctgctcttgcagaggaacccaagtccattcccagtacccatgtccaggcatgtacaacagcctgtaactttggctccaggtgttctgacacacttttagagcctctaagggcaccagaacacatgtgacatacatatgcatggacacacatacacataaataaaaagagaaaactaattctaaaataaaacctggtgagtccacaagcctgagtcacatggtccttcaccaccctccctgaatttaggccatggtgctcctgacagccctgctggagcagcgagagatgctgcccctaacagacagcctgggcaagtgttcttaccagctccctaggtctcatgttgaagagaatcctctctgcgttctcgctgtcatgtctgctctccataatagccagcaaaagcttggaggcgttgttctggggacaaggacagggtcagtacatgcgcaaaatccacaccacagattaacaatccctggcatctgtgttaacttagctcactggcaccctttgtgttttctcaaccaggtgaaatttgaaacttcttatttattttgtctaactaacggacaatagaatattttattcattatcaatacaaaataaaagcaacaagtcatgaaaatgggggttattttataaggatttttttttctgagacagggtttccctgtgtaacagtcctggctgtcctggaattcactctgtagaccaggctggcctgactcacagatccacctgcctctgcctcccaagtgctgggattaaaggtgtgcgccaccactgccctcccaaggggggatattttaaaattacaggtgttttaaatggaagactgactagatactacattaaatagaaatatattttcttccaatgttttttaaattggatttctatgatgacactttaacacaacagagaaacaggaatcagtgatattttatggacatggtatacatataaagaattcagtacaaccactttttaaatgaagtaataatgttactctaatattgaaattttacataaatttgtgaaccaccagtgagaaaagttgtaagttcctgagttagaaatataaaggtcatttcctgatagctcgtttacctcaccacatgctgagtgacattgtctactattctcttaatatagaattaaagcagtgtatgtttcagctgttacaattttgtttttaaacacactacctcaaacactgttgcttaagatatcaaagtaagaggcaattttcaatgctgaacgggtaccagagagtcaccactggaagtgctctgtcctcattgagataaaaccttactctgtctgatgtgtctgtgtgtctgtatgtatgtatgtgtatgcatgtgtgtgtgtacatgtgtgtatgtatgtgtgtatgtgtgtgtgagtgtatgtttatgtatgtgtgtgtatgtgtgtgtgagtgtgtatgtatgttgtacatgtgtgtatgtatgtgtgtgtatgtgtgtacatgtgtgtatgtatgtgtgtacatgtgtgtgtatgtatgttgtgtgcatgtgtgtgcatgtatgtgtgtgtacgagtgtgtgtgtgtgtatgtgtgtgtgtgtgtgtgtgtgtgtgtgtgtgtgtgtgtgtgttatgtgtggggtgttaaagacatgtctaagagactcggagttctcatggttttagaatgaaataattgagctgaatccatgtttggtgtaggaggacaaagcactaattgataagatcgtgtaaattaactcttgttaaacttggtcctacattctgtccaatgctcccagaacttccagatgccacctttaaagggatatctaatgattctgaggataataagggtgacgtcgggtcacaccaatgccacagccaccacaaaggatttcagtgcagcgagagggattctactttttttttctgtcccatatttgtattttacaaatattttcaaatcctacaatccacttttataatctaggttccaaaaaacaaatgtttaaaaaaatatggtttagggattagagcggatgacgggtccttagtcccacatgagcagagctgtcagaattccgaggttacacctcagcatcttggggcctgttctcagatgagccactctctgcagggccagtgagaaaggactttaaaatgtatccagttccccaacaccattggcagtgtggtgctttcaatcaaatttcgtacttggtgagattagaaagaaatcttgcaaataacatcctgaaatctgaaccgatctggaagtacatgagcctggatatactgaaaaacccaacagacatactcctgttagcgggattttccttccaatggaagctggagtgtttctaagcaaaacacagacatcacctcttagcaaatgcagcactttgcattcacagaccagttacgaaaacaaaatacaaagtgaaggacgagacaggcatctgagaaattcattaagccatacattaaatgaatatataaagcatatttaaaactgtaatttgtatgatattatatttaaattatattatgtcatatggtatatattcatagcgttatcttttattgaaggtatattactaaaattatggataattaagccatcagatccaggagtcaatgttactaaataattatttatagtgcctcatctcatgaactttcctaaactagccaacatatataattctgccttacaggtgttctcttaccaggcaataataataaaacaaaatctttagatttaaaaagtacactcatcttagtccttaagtataaaaccatatttaaagtatttcaagagaaacaaacacatgtgttgctttaggtgcagcctaatgtagctgactgctgtatgcttgaataaattgtgctactgaaataaataaaaattaaatgatccactttaaagtaatttaactagaacacctagtattttgattcattaaatcattatttaatttttcaaagtaagatctgcctttataagtaacctgcatgcccataagctgtgttaagtttatgagtcattcaccatctcccttacagagccctgtgattgacaagccagattttaaaatacagcctttaaacaaacaaagaactttagaggcaaaggaggaggcctctggatgttgagtcttcatgaattatggctaaagttgaatttaagagagaatgacaaactctttttagtgcttccagttgggttgcctgtcacacacactagatgctcacaaaccgaagaaaaggcacaagaagggcagcggggtgtgtgtgtgtgtgtgtgtgtgtgtgtgtgagagagagagagagnnnnnnnnnnnnnnnnnnnnnnnnnnnnnnnnnnnnnngagagagagagagaggggggggggttagatcttataaacagtatggattgtagggagaaaccctgattaagagttactgctgaccatgcccaacaagggtttaagaggagggaggctcgcacgcggctctctttcgcctggctgagctgactgggaagcatttctggatccatcttgctcaggtgcaaacctggtcactggctccctttcgtgagtgtttttcccccaataaactaccatttatcaacctgtctctgactccactttgtaaacatcaataatggataaaagcggtaaaaacacaaatagaacccagcacactattcccagaagtggagttggatataacccagcacatacaaatagcattttagattctcctcggccactcacctgcacaaagttcaacctaattttctatcaagttggataggcttaactttacaaaaaaaaaagttatgtttaactatgtgaagagttttgtttgcatgtgctgtgcatgtgaaggccagaggacagcctcagtcatatcttaagtatgccctctaccttgccgtgtgaggtagggtctctcaatggccggcagctcactgattaggggctatgttgtcaggccagaggtgctcctcttcagcgctaggcttagaaggcctatccccacacttggcttttccagatggtttctgggggagcaaacttgagtgctgtgcttaccaagctatttccttagtccctgcatttgctttacaccatcgtaaacactcaacacaataatgtggcctcaagtaacttatctaacttgagtattatttcttagcatgtaagatttatgtacgttgttgtggttttcatctatttatctcttttcgtttgaacaaaaaatatttgattgcccttatatgcctaaattttgataggtaggattttctggaagcatacaccaggctcaagactaacactgtcattgggaggcagctagatcctaatataacacagtaagaaggaagaaagaccttaaactaaaatgcaacattcctttatgttagtgaattgtgaccactagatggaattctcaagccagggaagattagaaagcccatgtcacagtgcatctccaacacctttcacttctgtttgtaatgaaaaacaggaagttaaaacaggggagaagaggtgaggggcagcctcaacatctctaccacagaacctcacaatgactatggcctgcaggtgaatcatgctttccctggctcagtgagcgcctggtgggctcactgtcctctcctgtcagttcctgggttgaaaagggttttgcacaatcatcacttgaagagtctgggtgagacggtgttttgcacaatcacttgaagatttaaaatccactccaagcaggagaggcacacggaaaatgttggggtcacactaccttcagctgtagcaccaggtccattctgtatttgccaagagggttgatgtcattcagaatcaaggcgatgatgatgtcaatgccatttgactcgtgagtggcgatacaggtctagaaaaggagatatctgtaaaacggcatgctattttgacacagcactagacgtggtcacagaagacttgaaactttcaaataccaggtacagacaatgttggacattttgattagtttttttgggggggagtggggtctatcaattgactggtactgggcacaaaatactaacacattgcgaaagacactaatctttgacacaaagaactgcagaattccaaagaggactgggtaacttaaaactcccccagtcactaatgcaaaatgagattctggaactgtgaattttaaggtgcaataaatataagaggacaagaaaaatgggattgtagatgaatttcacaaaactcggagcagatgtgacttcgtgtcctgggtggtgggaaagttcacagggtccttggacttgcatatttgtggagggaatgtggttgaacaaagtagaaaaacacccacgcagagagtgctgtgtgtgctctgagggtgaaaagccactgtgtgaggatttcaagctttgttctatggaagcagcatgaggacttctaagccacatgagcagcttgagaaactgacaccccagtgcgtcacacaagaaaggacagccccagccaataggacagcttggcctgggcatttgtgcagaggaaagctattcccatccaacactgacattatgtcctgaggcttctgctcatgggaacaccagccaaatggaccttccacacattttcagagcatgggggattatccaggtaggacttgttattttattatacatttttactgagaacttacttggtttcattaaggaatttcaaaacctaatttcattgttaaccacaaagtaaggaatgctcagtcacaaaatgggaaactactgatatatatgtgtgtgtgtgtgtgtgtgtgtgtgtgtgtgtgtgtgtgtgtgtgtgtgtgtgtgtgtgtaacattttctacaatagagagaattttatcaacaagaccaaactctgaatttctgtactgtgcattgactttgaatcagcagccaaggatgtctttgtcattgttgtaggaaactaaaatataatcttgaaaattagggggaaagatctgaaaatccttttagtgtcataaacacattacagagaaggaagtaataaccttacatgatcgacgtgtttccaccatatgaacccatggatgtatacatattgtgtgtgtgttcagacatatgtgtacacacagacatagtatgtgtgaggaaagtcatataatctacaatagaaaagctgaacttttcctttctacaccaaccactgatgtttagtgtcaatcgcaactttaaagtttatgtctagaaatgattgacatggagactccgccctaaaccttgcctgtgttggaggctccaagatgcttcatagatgctaaaaagctgtcaaaatgacatcatcccctttattcccttatatgttctgtcttctcccataacgtgtccttcaagtggagcaaggtactctgggagctggaggtgaacattgggtctctcacacatgcatatatagcatcaaaggggctcagaaagtactctgcagcttttttttctgcagctcgctgaaggcagcactctgagacactgcaaagtcaggtgagctctgggtcagaagccactgactgaaggacagtagcgagacccacttgataagctcgccaagcgtgtaacatgggtattagactagcttacctggtgtgtaacacaggtattagactagctcaccaagtgtgtaacatgggtattagactagttcattgagtgtgtaacacgggtattagtctagctcaatgagtgtctaacatgggtattagactagttcattgagtgtgtaacactggtattagtctagctcaatgagcgtgtagcatgagtattagactagctcacctggtgtgtgacacgggtatttgactagctcaatgagtgtgtaacatgggtattagattcctcccacactgcagtggagccaaagccacagtgagttaattccacacatctggagagattccctacagagagaaactgaacactgggaggaaatacaatcttgcccttcttttgataagtctttcatcttaaatattttcacgggaatcttctttcatgatgaaatttaaaatgtggcctaacatttgctagtctacaattccacctttgtatgttttgtgagagaagtggcaatgcctggcagagtgagcaggaaggcttcgaaggtacacaacgctggctctatgcctagcctggcacaccgtgactcacgtctcatgaagctctgcagtcatggttacctggttttcatggcacgggccctggcagtactccgtcaagctctccagggtctggttcaccaacgctacattcttctcattgatgtagagccccagcaggcccaggccgcctgtggtgcttccacaaatgcagtccagaaactgcagcgtctcacacacaagattgtagtttgttttgttgttctgattcctcaagaagttctggggggggatgaaagaaagtgcaactgagagacggaaagcaaaacacagaaaaaggggtgctggccatgctctctctctctctctctctctctctctctctgtgtgtgtgtgtgtgtgtgtgtgtgtgtgtgtgtgtgtgttactcaaaaagattcttgccagtatggaattcaattggtcttcacaagaaattggaacaccttggggaaagtggggggaccaacacaaaaggggagcaatcaggggacatactggtgtgactatgtctaagcaaacgatagggatgagactgtcataataaaactccttgtttttcagaggggaggaggcagagcggaggttggggggaggggactgggagaagaggaagcaggggaatccacagttgggatgtaaaataaataaataaaatttgaaaaacagactcattattttccaagctaatttgaaaactaagtaatatttaaatatcgatacgctaagttaagtttctcttaagagaggccctcaggttgtagtgtaagcaccttcagaacaggtcatagtaaacgctgctccactgccatcattttaagcctacagagggtggaagggagtgtgaaaagtagaaaggaaaaggagaacaaaatctgggggagggggtctaacttccaaacgaaccgtccctgacaaccgtgtcttcgctgtgcagggtccgtcaggccgtggtatgggaaacatgaagccctactaggcttctcagggaagagtcccacttgtgtggatgatcctaaatctgtgtagatatacacaaaagatcctcactgctcactgtctgttaggcgccagggccttatccctggcagcgtgatggttttgggatcttaggaagcacttccatatggatggatgggcgccaccaagaaataagcagtgtggcagtacatgaagttactaaattaaacagtcgagactacttaggtttacatgcaaagatcaccgtttgtacataggattttctggaagaaaacagtgttattagtgcactttggggaatacgctaaagaagagaaagaatggggaagagaggggatcttgtattttaatgtacttacagatatctatttgaatttgctttaactatttgttcttagtatcaaagtagccttatacattatctgaaccagcttctgtgagtggcacagtcagatatgacatcatctgctctgccgtctgtgacccacattggcagggcccgtaggttgcactgagcaagcaggcagcacacactgcagaagcttgacctaagcggtggcaggctggtccacatgagccacgctcgctcctcatgcattccagagcatctcatcgccacggacagcactttgtcttgcctttcggatcctctgcgttctagacaacagtgaacacatctcctcactctgcctctctctgtgtggacagatgctctgagaaccagattgcttagtgacattacaaggtaggagatcctaggcagaacctactgcagaaatctcagccagttctctgcaattcattaataaagatcatttgccagctacactagcttgcagcatggcaaagcgggctggcgtggtggccctgtgtctttcttggaagcagtctgccaaatggaagctcttcaggtgagcattctcaatctccctcagtcaggccagtcaagatagctcctttcgtgtgcctctgctatggcaccatgggcaacgtcatgcatacacataacgccagggaggtagtcaaagcctggagcagccctcgtccacccaccccgtctgacagaggaaatggcagtggtgggtggagatgttatggatgtgggctgcattaattagcaaagcaattttcactatcatagtaatgctttatatgactttgtttctaatgaaacgtaaaatatattcaatattgtgccaacaactacggattgggaacaatgtaaacacccgagtctaaaaccatgaactgcagacaaagatggccgtcctgaacaaacactgcagaggagagggaaggggctcagtggtgctataggatgtgtacatttgcttgttttttaatgcctaaacattttgactcttattttttcttccttaccatttcaacagggcactggtgtctttgttgattatttctccagaatcctctcctaaattcccttggatgactcacagtcacaggctacagagctcacccacagagagaagaggactcacctgtagctcccggttgtgattctcacacagtaactgcaggaacctgaggatgggctgcatgacggtgatggctgggctcatggtaatttcctcggcagacttttcctctgcactccccgcttctgggcctgggcacatcatgtctatctctgggtccatctctcgtctgtacacacagtaggctttggaggtggctgaggaggcctccgttagctgtcccttcattccctctttcaggtgaagtgatggatctctcactgaaaagcaagaagtagctggattttgaactaattttttttaactaccccacaataggaatccaaattttcccacagctgaattttaaaattatctaacaagatgtttaacggtttcctgggggggacacaacagctaaaaagttaatacagcaatctgaagaaaagctctttatatttaatcaattttagaattttctgactcataaatctatatcacaaagacacataagaatgtgtaaaaacacatacagatgacttcacaaggacataaccaaagggctggacaggtggtgtgttagttgcttttctatggctgtgcttaaacaccctgaccaaaagcaagctggggaggaaagggtttatttcatattgtgatagatatatcacaagatttcacacacacacacacacacacacacacacacacacacacacaggaactgaagcagaggtcatggagtgcttactggtttgctcagcctgctttattatagaacccagaacccaggaaggcactatccacagtgggctgatccctccaacatcaaccattaatccagaaaatgccccacagactcccctacaggtcattcttatggaggcatttcctcaattaagattccctcttctgcagggcattggtggcacatgcctttaatcccagcactcgtgaggcagaggcaggcggatctctgtgagtccaacgccagcctggtctctagagcgagtgtcatgatagctccaaagctacacagagaaaccctgtcttgaaaccccccctccaaaggaaggaaggaaggaaggaaggaaggaaggaaggaaggaaggaaggaaggaaggaaggaaggaaggaaggaaggaaagtatcccctcttcccagttatgtctagctatgtgtcaagttaaaacaaaaaacaaaaacaaaacaacaacaacaaaaaaaaggacagatagcttagcaggtaagagcccttgctgctcgaccagaggactgggttcagttcccagcacccatgtcaggctgctcctagccttctatagatccagtttctaggatcccacaccctcttctggtctctgtggacacccatacacacatgtggcacacacagaaagaacaagaatgtataaagaaacacatgtgtgtgcacacacctaagaattcctatagatctcataggagagaatgatcatttgcaaaatattaacacctccacaaattgtatttagctggcaatcatctggttatatcaaacgcaaacactttctgtcctcagagtttaatttccattcccagaaagtttgggatggttttcttactgaacagaacaaggaaatcaaacgtctttcatgttgcccattgcttccacaccaattaaactccattttagtttggtcctgcagagctagtctagggtcaagcccttaaccaaaatcctttaccgctggaagtccacactggaaacactgggaataattaaaccccagaagcaagatgacaaagctacatgagatttaaatgcttccttgctttcttctcccaggtattcaggaagctcctcacctctcatccgagggcctgaggccacgaggtcattgtcatcgtctctcttcttgctccctaagtctatggtgttgacagtcaccgtggatctgatctctttctgagcggccttcatccggtcataaaggactttgaagaatttttctgacttcttttgttcatgcaactgctggtagaaagaatactgcagagaaagcatagtttaaagtatcaatccctgaggcaagagaaatagtggtttactctgaaataaacacgtgcctgacagataaaaagcacagtgtgctaccttttatttattctacaaatggacaggctgtcagtgtctcattccacttaatacacactaatagcacatgtcattatattaataacagccagttttacttagcacctcccactaaattctaaccttttatattctatttgatatatcctcctgaatgtatgttttaattatgagtctagtaagttgtcatctaaagctgtgcattgattcaacacacatttattgaaagcctactatgtgtagggtcctatatttttgctacagacaaaacaaaaagaaaaaaatggcaagactcctacccacatgagtttgtaatccaaagtgaaacatgatcactcacttatgactaccccggacaaataagggctccctgttaggtgacaaagttatttttcttgatagtacatttaatttaggatgcgttaccataacaacttcactcacgggcacccactggtaaataggttttaagttgcttagctacttcttaagcaatgatgctctacgtgtagtttagggaaaattgactgaaaacaaactccagtttatcattaatgattcagggaggatttaagaccaaaagcgtggcaagaggtaccttcccggagagggaaatactgagctgcggttactcgtcaccgtgtgcttggtaactttatggaaggattcgtaagacttgacaggagatggaggaggggatgcagtccagaggagacacccctgagcaagtggaaccagccacacccccaaataaaatctaaagaggcaggttggtggggtctgacagctgtgcacatgttttcctacaggaatggccggagcggagccaggccctaccctagacagaactctaaagtctaggttacatgtgcagcatctacacacagtgagttttacacagccttcaagcatcagcttcatgtctgttaggggatgctcctaagcagagagctagcaactctacaggagcaggccaaaaaaaaaagaaaaaagaaaaaagaaaagaaaagaaaaagaaagccccactgtaaccatggcaacgacactgagacagtcaagctggttctgatggcttgcaggataaatgcagcatccacagacctttatggtcccacgaattaagctgatgcttgagctctaatctttgtaacgcagtctggctggaagggggaagggagggtgtaaaacgttagtaggaaagtcgcagagtcacggcaatgccacagctctgtgaggacaaagctgtcagggccccactcacacccaccctctcgaggacactgtcagcccctgtgatgagtacggtcttctcattccaggcacatggtattgattaaaaaaatgagatgctgtgaagcagagggatttgccacatgttatgtaatactcaatagcctgtatattatattttatttctatttctaacaaggccttactcaacagcccagggcagcctcaagtgatccttctggctcatcctctgggtatggagtgacccataatgcctagcttttatttctcttattattagtgtctgaagttgtaatttcttctatctgcctccaccaccccgcatctgatggagcatattgggcgcaggaagtgacttgtgtagaaagggaccagggattctctctggtctttaatacctggggggggggggggggtgggggagggggggaggggcactagtgactaaaggaaattaagaatattaaattcggggctggagggatggctcagtggttaggagcatttgttgctcttatagaggaccccgagttcagttgtcagcacgcacatggaatctcgcaaccatctgtaactccagcttcatgggatccaagttcctcttctggcctccacaggcactgcacatacgtggtgcacttacatacattcgggcactcaacatacacatgaatcttttttaaaaaaaaatgtaaaatccctgtggaactggagaagtctgggggagtgagtggtgagaatgagaatgccccatgagcgtgtgcgtttgcacgcgtggtccccagccagcgacactgttggtaaggttatggaacttttagaatttgaagcctttctagagagagtatgtcaatgaggtcgagggactttgagggtctccagccccaccacactgccaggttcctctctctgcttcctttgtgtggacggagatgtgacctctccccctcctgctccagccacctgctgccaggcctctctaattattgtgaactgacccttgggagccataagcaaagcaagtttttccttctatgagctgctttgtcgtggtgctttatcccagcaacaaatagtaactaacatagtggggacacatctgagtcactaaaggggagaggtagattcagcaggtctgatctagacctcttaaagccacggcatacagctgacatctagggacattctgatgacatcatgaggtccctaaatcagagacctaagcagcagaacctacagagtcaggtttccttaagcaacaaggggattttcatgcacagacttgaattaatggtgtttcttcaacagttctgtgtgacttttgttttctttttctttagattgaagccatggcctcggaaatgctacacacatgcttactactgagctacaggcccagctctccttttacttttaagcttaagacctgctttcactaagttcaccagaccagccttgagcttgctccttagctcaggtttcccttgaacttgtggtcctctggactcagcctcctgagcagttgggattacagatttgtatcaccagccagtgtgtgtgtgtgtgtgtgtgtgtgtgtgtgtgtggggggggggggggggggggggggggggggggggggggggtgtgtgtgtgtgtgtgtggtggtggtggtggtggtgtgtgtgtgtgtgtgtgtatgtgtgtgttcatgtgtgtgtatgtgtctgtacgtgtgtgtgtgtatgttcgtgtgtgtttgtgtgtgtgtgtgtgtgtgtggtgtatggtttagggaggtgatatgtattgaacagctataaaagactatgaaaataaaaagtaggctataaccctctacaaatattagaaaattaactggagagacataatgtaagacagacaataaaataaaggaacacagagagggctccaagtgagaaacaagtgcagtgaggctcgccagggagcagctgccacttgcccagctagaagagaaggcttcatcacaaccaatttctcatcagcatatccaccactgaatagttactgggcattagcgctccaaacacaaacagcaaagcaatgaagatgtgttccaaaccttcaggaatggaatctggggacacctggagaggtgctgtgacatgatagaaacactacccaaagcaccaggaagtcacagcaaggtcatgcagtaactggcagtcagctctgcccagtgagacaagggcctgaaagcgattctgagagaagcactgacgggacagacagaatgacagatagcctgagcatatgagggacctgcatcaggaagtannnnnnnnnnnnnnnnnnnnnnnnnnnnnnnnnnnnnnnnnnnnnnnnnnnnnnnnnnnnnnngggttataacatagtgttattaaaaaatgtcactggaggcaacgaaaagaacgttagagggaaggcaaaaaggaagctgggaaacttggtccccgtggagcgaacggtaaggagttgtgacgatggcttgagaagcagggattgaagagttagggatagaagcgatatcagaagggcagaatcacccaggtttgtcatcaagggatgaccaacaaggagacagggtgaccagtcagtcaaaagtgacaaccagaaggcacggtgccagtcacacgaggctggaagagaagctgggggcagcggccagggggagttgcagggtccaggtagtaaaggttacagaacaaacaatttcccagtgatcaggactacagaaacataaggcaaatgaagactgaagactggatctcgggagcaacgctctggcatttaataagtggagcctggagttctcctggagctagcccgcaccatcggcacccatgtgaggatgaagagcgttcccctgggatgaccctctgcagcccagggaaatgtagaaagtgcagctgggtgactgttgctagagatgccagttcaagccagttcacaccggtgctacactgctgccttttttgctgtctcttcagcctttgtccccaaagccctgctatcaaaccggtctctcatacagaaaagctcctgttgttaaatgtaccggtaacaaattaaagcaaaataccccagttttgaatctgactgggcttctgcctgccgctcctggggccaataggtttggggatttctagccatctggggctatgcattgcttcatggcttaggaagatataggaaggtcagtgagccaggaagttcagaagtgctccctgggaagtttccagagcccgggctcgtgcagcacactgttgggtgcaaaggagccaagaggaacctggcaggggtcgccaagggacaggagtgcagctggacagtgtcatgtccttggtacgcacatacacagcacctaccaccactgtagagcatgtgacacagcgcccactgccaccgtagagtgcgtgacacagagccctctgccactgtggagtggctcctgatgcagaatgagcttcaaacgatgttctgattagagcaagggggaagccctatcatttcaatagcaaatcacataaatttataagggaaatgtgatttgtgagttctttcattttgtttgagccagcaaggggaagctaaaaggatacgtttccctggttcctttaaccagtgatcaagaaacaggaaagactataggagttggaggtcagggaggaccagagcaaaaacaggaccacagcacccatgagctcacagcggttgtggctggccgcacgcggccaaaccaggggggggtccagggagcaaggttgtgtgccctcaaccctggctgggatctgtgggtgtgatctggctgctggggcaggagagttagttttctttaaggggtggctcctgataggttaaccaagctccagaagacggctcggcacacagggtatctgagcagcacaaactgtcatccaaagtttactggtttggcagggggagaagacacaaagttagggggggttggggggcggagtggatagtgaagagttagagagaggagtggaaacaggagatgtgaacattgtatgaaattctcaaaaacaaaagtattctttaaaaatatatagaaatcacaacccgaacagcactagcaacagacgagcacctgggtctgtgtgtttcctccttccagcaaggcgatgccaagcaaaatgccttcggagaaaatcctgtcatttttggtgttcactatgacatcgatgacaagttcggatgctccttctttgtccagcagacactggatgtcagacatggaaatccccatcttgtccgagtcctgtccagagaagcctcctgtggtcggggaagagaaacacagaacagcaactcgaacttcagcacagacattgtttttagcagcaaacagtgttttcaaattcttaaaccataacaacatgagccacaggagagtttagttacaaatataaaaaatctacaaagatggaactcttaaacatccaacatgcaattcaatgtcaccaactgtcattcctttaagtactctagaaagagctgcagaggtggctcggtggttaagagcactggttgctcttgcaggggacctgggtttgattccagcaccacttggtggctcacaaccatttgtaattccaattcaagggactccaatggtcaccaggcacacatgtggtgtgcagacacacatggcaggcactcatacatatgtataagataaaaataaataaatctctataaaaatattctacaaattttgtctttaatacgtgcatgaagaaattgtgaggaaaccacccagaatcaaagacaaaatccacgataatgctcaacctatggatggattcatgaaccccaactacacaaacatttcactcgtgttttacgtgaatattttacacttggatcatcactgccatgaagcagcactgccatgaagataatgccgtgagaccctaaaatgggtggaagaacacgtacctcccacttgtgctgtcttggcataggcccctgacagaggtccattggcaccaacgccatggtcacctttgaagtagcggttcaagaggattttccggagtatgctaccctggaaaaggagagctgtcatcatttttaaaaatacaagtaaagaaggctgacagctaaatgcaaatgtatctgaagcaaaaacgtgaaaaaaaataatttgacgccagatcagtattttccgagggaaaactgcaaaggtcccagtaacggtaatcaattttataatcatgaagtgagtgatcatgaggtcccctcatcccagaagtcaacaagctgtacacaattaacacatgctgactggagagccgtagagctggctcagtgggtgagggaactttctgtctagtctgaagacacgagttcaaaccctgggatgcactctgtagaaggggaaacctgacctgactcctgaaagttgtcttctgacttctacgtgcatgctgtggtatgcacatgcacacacacacaacaaataaataacataagccagttatacatgtatgaatgcatgcatgtatgtatatatgtatgtgtgtatgtacacatttatatttagagccagggagatgacttagtgggtggaagctcttgagccaagtctgacaacctgagcttaatccctgggacgcacgaacacagtagaaggaaagaaccaactcctacacacatgtgctgtgtcgtgaacatgaccccccaaacatacacacacacattaaatcagtgtaataaacatgagtttgctcaatgggaaaagctgggggttctagtgctgagaatatagtgcccagagaagataacagacaccctaaggactgaaggctgaagcctcagagctgggaatacagctcgtgctcagaacattaaacttgacaaaataaagtggactctatggctgggttctatacagacagcaggcaaaggacagtatatgtcttcataaatggactttttaaaatcctgtcttccacactttaaaacaaggaggaggaggaaaaggagacgaggggtacaaatagggaagggggaggagaaaaacaaaataccatgtttctctcacatagggaatccagaatcaaatacatacatctattatacatatacacgcgtgcacatacgtgcacatatgaaaatagatgaggggctattagcgggtgggaggacctgtgagagggggcagcagggacgtgtagagaggagggtgggggctacgaacaaagtagaacaataaatgcatataaaatgtcctaggaaagccattatagtctatgctaactggaaattacttgaaaaggtaaatatacttgctctcctgcctgcagctgctgacactagccctgctcctgaggtggtaccccatatttcagggaagaaacctgagacacagttcacaggcctcaagcagggatgcactcttgtgtctataaaccccaggcatgtccaggtgcctgctccacgattccctagtgttttccatatgtcccgcccctccaaatctcacaggatcctctccagtgctgtgacatctgactcctagaacctaggggcttgcccctgggtcctgatgttggtctatcccctcccccttcctgtccccctccccctccctctctccatctgcagtggcttctctttttctggatttcttgtctctgtcttgcactggcacgggaaactcagaatggaacattccttctctcttgaatctgttttcctctctgcattgagtcattgtaagagcaacaccgtcaccccggctgctcgctgacaatggcttctgaatcctacctttgcatgggagctcctgggtgcctttgatgctatatttgaaccaaactaaggtatgttttctgcatcttcctgtttgtgtaaggacaaggcttgtcttccctctccggtctccatgctgcccgggagctactccttcaggcaccattccaagtgaagaggtagaagcttcctggatgtcaatttgattaaacttagggtcaccatggcaacacacctctaggtgtgcccatgagagtgtttccaggaagtttgactggggaaggaagaccttccttattgggaacagaaccatctcatggattggggtctcagaattaatcaaaaggaaaaggcattcatctccctctgcttcttgcctatagatgtgatgtcacttgtcactagagccctcacactcacacttgtgaaccacatcttccctgccaccaagcctgcaccctcagagtgagtcacaacagactttcccaaccttgagttgcttttgttgagtatttcatcacatcaaagagtaaagtaaccaacacagcgttaaagagtttacagtgagatgggctccttcactgttatgtgtgaggctctggaggctccagaagcccttaaaggagggaggctgaccccagcaggctgtgcaagtcacacacacccatgatcttgcccagtgagcaacagaatgccctcggtgttactgcgctgagaacttcatggactctgtgcctgcaattgttcatttttgcaatgacattttattgatgcttttattcttggagcacagactgtcactgcttctcatcttgtgttttctccctctaacaccttttcatgtaaggctgcagtacataaaagtaatgccaaggcttagaagagactaggggagggagagctgacttccccatggatgtacctccgctgtcctctattagacctacagaacccaagggctcagcgatggagagggaaggctgctcttgcaaaggacctggattcagttcccagcacccattcatgtcaggtagttcatggctccagggcattggagggatgatggggaaagtccaagtgtctctgtatactcatttggggctgaagcagtgggacctggtgggacaagagaatctccacaacagaggaaaactgcactaatgtacacacacacacacacacacacacacacacacacacacatgcacacacactcacacacacacacacaccacacacacacattattgaaagtagatcttttaaaaaaccacccaaggagcccaaggatgctcttagctaaaaataagcattacttcctctgttctttcttttaaggaagggtcccttaaaagaaactatctctgtctctctaatgaactattctccaaaaccagggacaaacatgtctttggtttgtctctcaatggcaggaggtgaggccatgagagttttgggactcactactgggactgaagtcatcagagagacctggaagcctgaggcctgtggtcttgctgccaccgccaccccgttactgctgccgctgctgttctgagacagtctcactctagggcccagtatggccttcaactcattgcaatcctcctgcctctgcctgcagagtgctggggttccacatgcaccaccatgcccagaaaacactgatttaagagtcgccctgcctgtcatgaacactattcatgtctctcctacacacactggttggcataaccccacaagacaagctggggtgcctataaggactgaggaagataggagttgaagcaagctctcttcttgagcagtcagtgttggtgtccacaaagaacctgtcgtgagtcaagtctggatcctgtgagtcggtttctgttaagaagctgtcattcacaccttcaatatatttccccaaaattccaaccaagaaaaaaaaatcacccttctactgcaggcaggaggaagaggaagagaaataatagatttgtgaagagagacccatagacttagtacatgggaggccaaagcaggaggattgtcatgaaggagaggccagccagcactacagagtgagttccaggaacccgagttacagagtgagtgagagaccttgccagaaataaagccaaaaatgttttaacactatattattgcttttttttttaaaaaaagcatcccttataggttaagaagaataaagtatttttaaaatccagagcagaacagctacatcacgctaaaataatgattatatttgccaacactgtaaaaccctcttaggcaggtaaaacaggctggtaagcaccagtcaccaagaaagcctccttcacgggtccacagcactcaggaggtccacggtgcatttcccgacaaatatcagaatgtcacagaatggggaagacagcgattgagcctcctatggacccacagtgcccaggttcaaatgtccctgcgtgctgtattaaccaggggatctcacacaagctacctcaccaccctgagcctcagccctcagctgtcaaatgaagcagtagttgacccttcttcctgtggcttctgtgatcggcatagttcccagtgtggactaagggcggacacaaagtcaatgagcaaagtcaatggcatccctgccgtgttaacacggccgagcacacagaagcacagggctttgcactgatgtacatttcctgagctcacaccaaactttcctacagaagtgaaaagtttatattgagaagagggaaaaaattatcaactatctcaaaaccctagcttttccctgttaatcatagtgagtgaatacagaaaagtcagtccaaagcatgtacatactgttgtaatttttaaaaagcgactcaagagagagagacaccatgtgacaaatcaagagcagggtttttttattaagggaaaaggattgcaaaaggggaaaagaggaggggtgagactggcctctaggaccaggagcagagggagagaggaaagagacagagagagagagagagagagagagagagagagagggagggatggagggacggagagagggaggtgggcagggcccttttaaaagggaacaatagtgaatgtgcacagaaatcctgtcagaactccaaaggcgggccaggacaggtgcctaaatacgaatgcatacatcactatagaaaatatctccataatttcaaataaagtggaaataaatctatcttggtttgaaggccagtttttagctaaggcagtcatccctacttcatcatggtagacaagtaaaccacaagtgctggcacacgctggcgtcatttatcaaatcctggtcctccagaggcaagtgctgcgccgcagtttgccatggccatccgtggtctgttctctctctggcagggaacagagtcaggagcttcagtgtgagacatgtccctaaatccctttaagccaaataaaataattgtagaatctgtcagatagtctggtgcaagggttgttaaatcctttccaagctataactgccacggcagagagtaaggacagaactaaacgtacaaaatgccattttaaaaataatcccacgggggctgagctgcgtgacctctgtgctgggtcttcctctgcgggcctcccacagaaggttctgggctaggcccactcactagcaaggactgtcctctgtggctgtctttctgtcagaggcaactccaggccacaagacacatattccagccaacatcttcacaggaacacattccagatgtgcgaactgttaatggagccaagaaaactgcaaccaccttctgaaattacaacaaaatgtctccataaaaagtcatgtccatgtccggaagaggcgtgccagcagtatgtggacacatgggaagatggccgggtctctttgatttcctggccactccctgctatgttaggccgagtccaaggtatcagaaatcaagcagcccagaagcggctggctttggtggacagaatggagaaaaataagcatttatcctagaaaagtataaaggctttcactcactttgaaaaacagtgcactgtttgacgttttagacatgaaaggctatgaggtgagagtctgagggtgttcccaagcccttaaagagtgaacggatgcatgttccccattagaaggaatctaaccaagacttcattaaacaaaaaacaccatatgccaacgtcctcaaactctaatccttcaactggcaaagacatttgacttggggttcccattaatgatgacatcatcgactcgtcagcttgggtagacctggaagcatcctgacagccagggaaagacaacctctaaagatgaaatgcccttttctgagcaaactactccaggcttgagtgcggccccagcagctgcatttcaccctccattccccaaaactccaggcatcccctcccgcctttgcaggcactcccttgcccttgacagagtgtctgccactggctgttttgaaatagacagtcccatctgttgaggtcagactggtcttttgctgcccaatgtctctttaagctgcctcggaaatctaaccaaagtggccaatggcagcctgtgttcatatgccaatgtggaattcctaggggtgactgctaagcttccagagtatgcagctagaagggttcggaggtccaaaatgaccttgtacatggcaggaccccaaggcccagggaggaagtgggaacaaagaaggaactggcaatgacctgacggcaggcctcttcctcttgaactggggaaagtcaccacctagtgctttaaaggtgcccacgggaccaggtggggagcacggggttgccaaggactcatcagggcatggccaccccattggaacatttaataggcacccagtgtttcctataagaaaaggaagtgtaaggagcttttcccacaagacaggcaagagcagctggctttctcatactagttcaagggaagtcccaactgtcttctggagaattcctctgcatacatcactcacacaggttgtttttaggatgctaatgacacatcaaattggcttcagagaaatctcgttcatgctaattcccatttcccttctattagacggtgtggtggttgggacagtgaacctccagctatggttcctgagtacagacagacacactggccttccctgagacctggcaggacagggagaaaggagctgtagataaaaggggccagaggctccacctcactctctttttttcctgttctgtcttcctggagtacaagccatgagctgcaggctgtggtctgtatgtgcagccagggaagaacggctggccaggttgtgagatctcatggctcaggagagttatccaagaaaacagggtggcaggagcacaccacacaccccacccataagcactgtctacaccctaacacatcccctacactcacatccacacatcctaacacacaccgcactcacatgtacataacaccgtcacacattcagacatgtgcacacacaccaccacctccattcacagacactgagaaacacgcacacacacacacacacacacacacacacacacacaccagcacatttatagaccacaccannnnnnnnnnnnnnnnnnnnnnnnnnnnnnnnnnnnnnnnnnnnnnnnnnnnnnnnnnnnnnnnnnnnnnnnnnnnnnnnnnnnnnnnnnnnnnnnnnnnnnnnnnnnnnnnnnnnnnnnnnnnnnnnnnnnnnnnnnnnnnnnnnnnnnnnnnnnnnnnnnnnnnnnnnnnnnnnnnnnnnnnnnnnnnnnnnnnnnnnnnnnnnnnnnnnnnnnnnnnnnnnnnnnnnnnnnnnnnnnnnnnnnnnnnnnnnnnnnnnnnnnnnnnnnnnnnnnnnnnnnnnnnnnnnnnnnnnnnnnnnnnnnnnnnnnnnnnnnnnnnnnnnnnnnnnnnnnnnnnnnnnnnnnnnnnnnnnnnnnnnnnnnnnnnnnnnnnnnnnnnnnnnnnnnnnnnnnnnnnnnnnnnnnnnnnnnnnnnnnnnnnnnnnnnnnnnnnnnnnnnnnnnnnnnnnnnnnnnnnnnnnnnnnnnnnnnnnnnnnnnnnnnnnnnnnnnnnnnnnnnnnnnnnnnnnnnnnnnnnnnnnnnnnnnnnnnnnnnnnnnnnnnnnnnnnnnnnnnnnnnnnnnnnnnnnnnnnnnnnnnnnnnnnnnnnnnnnnnnnnnnnnnnnnnnnnnnnnnnnnnnnnnnnnnnnnnnnnnnnnnnnnnnnnnnnnnnnnnnnnnnnnnnnnnnnnnnnnnnnnnnnnnnnnnnnnnnnnnnnnnnnnnnnnnnnnnnnnnnnnnnnnnnnnnnnnnnnnnnnnnnnnnnnnnnnnnnnnnnnnnnnnnnnnnnnnnnnnnnnnnnnnnnnnnnnnnnnnnnnnnnnnnnnnnnnnnnnnnnnnnnnnnnnnnnnnnnnnnnnnnnnnnnnnnnnnnnnnnnnnnnnnnnnnnnnnnnnnnnnnnnnnnnnnnnnnnnnnnnnnnnnnnnnnnnnnnnnnnnnnnnnnnnnnnnnnnnnnnnnnnnnnnnnnnnnnnnnnnnnnnnnnnnnnnnnnnnnnnnnnnnnnnnnnnnnnnnnnnnnnnnnnnnnnnnnnnnnnnnnnnnnnnnnnnnnnnnnnnnnnnnnnnnnnnnnnnnnnnnnnnnnnnnnnnnnnnnnnnnnnnnnnnnnnnnnnnnnnnnnnnnnnnnnnnnnnnnnnnnnnnnnnnnnnnnnnnnnnnnnnnnnnnnnnnnnnnnnnnnnnnnnnnnnnnnnnnnnnnnnnnnnnnnnnnnnnnnnnnnnnnnnnnnnnnnnnnnnnnnnnnnnnnnnnnnnnnnnnnnnnnnnnnnnnnnnnnnnnnnnnnnnnnnnnnnnnnnnnnnnnnnnnnnnnnnnnnnnnnnnnnnnnnnnnnnnnnnnnnnnnnnnnnnnnnnnnnnnnnnnnnnnnnnnnnnnnnnnnnnnnnnnnnnnnnnnnnnnnnnnnnnnnnnnnnnnnnnnnnnnnnnnnnnnnnnnnnnnnnnnnnnnnnnnnnnnnnnnnnnnnnnnnnnnnnnnnnnnnnnnnnnnnnnnnnnnnnnnnnnnnnnnnnnnnnnnnnnnnnnnnnnnnnnnnnnnnnnnnnnnnnnnnnnnnnnnnnnnnnnnnnnnnnnnnnnnnnnnnnnnnnnnnnnnnnnnnnnnnnnnnnnnnnnnnnnnnnnnnnnnnnnnnnnnnnnnnnnnnnnnnnnnnnnnnnnnnnnnnnnnnnnnnnnnnnnnnnnnnnnnnnnnnnnnnnnnnnnnnnnnnnnnnnnnnnnnnnnnnnnnnnnnnnnnnnnnnnnnnnnnnnnnnnnnnnnnnnnnnnnnnnnnnnnnnnnnnnnnnnnnnnnnnnnnnnnnnnnnnnnnnnnnnnnnnnnnnnnnnnnnnnnnnnnnnnnnnnnnnnnnnnnnnnnnnnnnnnnnnnnnnnnnnnnnnnnnnnnnnnnnnnnnnnnnnnnnnnnnnnnnnnnnnnnnnnnnnnnnnnnnnnnnnnnnnnnnnnnnnnnnnnnnnnnnnnnnnnnnnnnnnnnnnnnnnnnnnnnnnnnnnnnnnnnnnnnnnnnnnnnnnnnnnnnnnnnnnnnnnnnnnnnnnnnnnnnnnnnnnnnnnnnnncacacccccacatacatagaccacaccacacacacacacacacacacacacacacacacacacacacaccatcacatacacacatcgtacatatacaacacacaccatacacccatacataccgatgtgcacaagaatgagaaacaactcatcataccccaacactaagaacaaactgaacttcgcacccaggagcaaagcaacagttgaatacctgtcaatcaatgcaaatgtttgacaaaggaaacaggaagctaaattttaataaattcaggttaaatttagaatttttcatgtagaagagaaataatcgtggagtctatgaaatgaagaactctgcatagatcaacttcaaaggaagttcttgagaattaagaacacacacacgcacacacacacacacacacacacggtccagcccaggcccttcatcttgggagacccacctgagctgcaaggtcacacacatgatggaaattgctgattctgtgtggacctccccacctggctcaggtctgggtttagctacatactagcactgtgactcaagaattctactgacctgtcctgagacccagttacagatactgtgcatgataatatccaaacctcagtattatttaaagattgggggttatatatgtgagaaacattgtgcctttggctacatcaagttctaagcagacagctcctgagcattctctttaatggttaaagaaaagcaagcttttgtccagggaagtgatgagggtatggacatcagaatgcctgggccacagagacaggcgccgttccagttgctgcataaaaaccactctacatatccacgtatctctaagggaagacaaatcagaggcagtactaaaagtcttgttctcatctctatgcctgcttgttcacccagccctatcctcccctgcacactcacacagccctttgctcccctgcatactcacccagccctatccacccctgctgtgctatcaactggcccaggattttcaccttgctaaaaagcacaggcccatcttgaggttctgatttcccaaactaacaactcaatgtcacgtgaatctgtgagtgtaatgagacagacagccactgttctcctaaaatgctgttctaaaagaaaatattcttaatgcaatctgtcaacccatgtgattctcaaagtaaaaactgttgcatttcttgcaagtctgtattatacaactatagtgtttttaatactgtatgaatcatgttgatctaactttggtaatttttgtttttatctttaagacagaatcttgctatgtagcctgatctcaacctgagtgttacaggcatgaagtgttaataatttcctacattaatttgctcctaagagcatacgttttcctgttaatatgaatagtccatgctctcgtgagctcctgattgtgttctgtgtagaaagcatgacttttgaaaaactccacagcaaaaacacagacaaggatgaggaggaataaacaacagggttctcacatatctaacaacatcttaaaacacagacacggttactgcctggagaaaatgagatctcagttcaaataaacagaacaatgccaccgcccaagcactgctggctgcccgcctcaggacggagcttgttcagaacttgggctaggtgcctcccgggcttttgaacagtactgaaaatcatcttgactctgtgtcacacattatgccatgacaggtattttactaccgtatctagaacagtaactaaaatgctaaaataggtgaaaccttctcttatgtttctgtgtctgtgcatatggtctgtgtgatgctcacacctatgtgggcgtgtgtgtgtgtgtgtgtgtgtgtgtgcgcgcgcgcgtgtgtaggggtgctgtgtgtgagcatgcatgtgtgtggaagcctgagcttgacattaggtgtgtctccataacccttgctctccgtcttgtgtgtgaggcagaggctctcactgaagtttatgttttcgttttctggggtctgcttagccagcctggtctgaggagtccgtggctctacctcccaggagcgggactgcaggtggcccacatgcctgcctggctttgccacgagtttgggatgcaaactcaggccttcacaattgcatggcaagagctttatccaccaagccaggccccagtcctgagactttatttacttttaacaacagccagtgcacagcacacacgctgttggggaccgcagctgcaacctccccaacctccccagttgcatcaaacacgtgatcgtcacaggcttttgaaatcagtttctacctgaaacatgaacactattcacaggctaagaaaactcaaaccaagtgtgactggaggtgagtgagccatttgaggataatgtcagtctgtcgaggctgagccgacacattacctcctccctccttttctgtctctagtatgtgtggatgtatatatcatacagatacacagatgctcccaatatgggctgagagtgcacgtatgtgtacagggtggtgatgaactcaatgcagcattaagatcccacggtgcacgggaggctgtgctgccgtgtgtcattagctgtagcacacaccttttcctcaacactgaccttcaccaactacaggtcactttaaagtcaacagtgtgctacagactctggaagccttgatttgctttttagtgatacgagaggttttggtcttacacctgataaaatatattgagtgaaacatcagggtcatttgttcaatcctgggagctaggattgaacccaggaccttacacacgctaggcaagcactctatcacctagctgcatccctgtctgaaggtctttggcccagcgtcactgtgcttcacactccatgacaccactgtatgatgccactgtatggcccatttggctaatgtaagatgaaattataccaggaacctgaagattttaccttttattcaaacagtgcttagagactttcctctttctacactacaggcctaccaaatagtccaactcccagaatcatcgtttttttttttttttttttttttaacgtcatcttccctgagttgggtttgtgttaaaatcagaaaagaaaataacattgtagatatacacaagaagtgcatttccctcaactctccagagtaatggaaacataaataagaagcatttaactggtttgtgaactagatattgatttcttttaaaaaaaaaaatgcccctggatagccttcatatccactaggatggttaagatttacaaggtaacaatgcagcacacagtcaaggatgtggacaaattacgaacctcataacttatgggtcagatacaaaatagagcagccatgcggaggaactatgtcacggtccccacacattaaacacagagttatgtttgtacccagggacctcactccttagcacatgaccaaggggaaaaaaaaaaaaaaacttgggtattgtggtgatattttgtttaagagaaacaaatcggccagccactagagagttctcacctctgccgatgagcagaacgaaggggcgatccaccaaacctcagactcattctgctcctgtcttctcccgccttatattcctctttagtgctgggattaaaggccagggatccggtgtgctgagatcacctgtgtttctctttgagacggattcattctcatgtagccctgggtggccttgaacccacagagatccatctgcctctgtctcctgagtcctgggattaaaggtgtgtgtcaccactgcccagcttctgtgactgactagtgtggctggccttgcgctctgattttcaggcaagttttatttgttagatcataaacaaaatgtcaccacagggtatggttcacatctatagttcccatgctcaagagggctgaggcaaaggaattggtagcttgaggccagcctgaactacataatgaaacttgatctcaaaaaagaatttcacacaaaaacctggtatggaaatgtccatagcagaagcagcagcattcctaacagtcaaagagcagaaagcaccccaaatggccacggaatgatgagtaggcgagtagcatgcactataagcataccatggtgtgttatttctcaataaaaaggcccagagtactaacacaagcctccccatggctaagccctgagaacagcacaggaacaatgagaaaaaacttagaaaaaaaaaaaacatatcgggaacaggagaattcacaaagattcgtacaaagtagacagctggcttccaggagctggtgctgtaaagactgggagagagggagaaaaactaactcctgaattgtacattctggtgggacaaatttatgacacgagtatctcaataaagcagttataaaaatagaaaataagtccactagcctagttaaggaaaattacttttttcttttaacttaaggggaaataatgctgcctctgcccagatttttgccaagcagctgagctgtggtgtgtgaccatgcctcctctctgaggcacatctggctaacagctgcatgaggatggccaacgttctaaatgccacatctgctggtaaagtgtagtgagactcgtactgctaattaaatatggaattgcatgtgccaattaggaaccggccacttgggagagcacaataatctgagctgggggctggcactgctcgcttcctgacctgtgtgggaagacagtccatggctctgaagacaggcgaggcagtttctatggaaacctcacacacccagaggagaaactcaaaatcatacacaactttgtggaaatcgggctttgcaaaatatttatttttaagcgtaaaaacaaaacaaaacaaaacaaaaaaccctcatcttcttgaagatgcctgacttcctttcatcggttagtaggtaaggtttggaggaggtaggaaaagccggatctcagatcagggatgtccgtttaggactcgtgtcagaaggagggacatttgaaacatatctttcatcataagtttaatgcgaacctcaagggcttaaagatattcagcttttattgaaaccaactgcagagaattattccagctgagattaattaatcctcccactgcatgctaatatgctagtctttccaaataaacgcacactgtaattacacccaggctcctccgcccacggcccgctgttccttcccatgaaataggacgacatgtcttccagatgtggcgtacaagcaacagcagtcttcgccaagagtttcagaattaaacaaagcatgagacaaacatgtgtagcttccctaagaatggagacacttcccacacctcagacctgaccagcctgtcgatttacatctccaggagtttggaagactgtgtgatggcacatacctttcatcccagcactaaggaggctgaggcgggatgaccatcaggagctggagaccagcttaggctacagagttcaaggccagcctgggctacatagcaagacactgtaacagaaactataacaataacaaagatgcttagaggaggaaaaagacatcagctgactatgacatcagcttcatccatgtccccaaatcctgacatcagcttcatccatgaccccaaatccactaccaaacaagtcataaaacggcaaaggcagtgagccgcacaggaagccagtggggttctttgtatctctcagtctagacattgtagagagaccagcaagggcaagatgagaattaaagttctaatcaaattaaatgaacactgcactgtgtaccagaagcatgtcacagatattctctcatgtgacacgcacaggaagccaacaacttgcttagcagcaagaaccaactgtgttgttgttcagtgtgcatgtatatgtgtgtgtatgtgtgcatacatacatttatgtgcagtacacgtgtgcatgtgtgaacatgcatgtgggggcagaggttgatgtcatgtgtcatcctcagtcatttccccactgtatttgttttgagacaaggtcttctatgaccctggagttagcagactcagataggccggctgactagcaagactcaggaactgtcctgtctctgacctcccagcaccgggattacaggtcacaccatcacccctggcattttgtgtgggtgctggggattatgggagctaaggtccttgtgttagcagggcaagctcttcaccgacccagccatcttttgagccatgtattgtttccttcccaactatttgttttttaagaacacagcttattttcatttcatatgaaatgaagacaactgtgagggcggccatcagaaaatgttcacatgaagtgctgagagcagagcttggtaaatgttcacaaaaaaacagctcagcctagagaacacctaacagcacggacatcaccccatgccagcatccttccctgcagtgacctgctgtcccccggctggctcaccactctctttctttccctgctgcccttctgcccctgggtgtccagcctctcagaggaagaggactttcaactgacaccaccatcacagggtggtcacggccgagcagcagctgttccttatcgtgtcacgccaattcttccggacactcctttctagccttatcccatgttacacacccgtctaacactctgaacttttcccctggagtaattaaagcattcaatccctctccaaatatttggttcatgactattttctcactaaactctgagggtgtaattaattgcttgccagtgcgtctctgggactgagtagtagacagtcggtactttttgtctaagcgtgtctcgttcaacttttctatttccaatcctttctgtacacttccactttcagggttcataattaaacgttgttttcagaactcagaaaagccgggccatgcactggttcttgtgtctctgatgaagtcagtgcagtctgtggctttgacactgggaatgaatccatggttacctcttcgcctcccctgccctctgcctcatttcccaagtcagacctcccagccagcagaggattttagctctaagcctctgcgcagacactcacaaggcctcatgggttatgagagtcacttggagcctgcacctgaaagggctctgcttccatcagaatagagactccttaggacgcacatgctcctagtctaacctctggggagaagttgaggggagcttttcttcccaggcaacgtgagtatcgaaaagaccaccaaaccttatcctgcatttgtcaatagtacagaagatgactctcagctttactgccagccgaggcttgccaaggctaggcttcccccatacgaaggagacagagcaaaccaggtggggccacctggtgcattgctgatcttaccaccaggtggggccaccaccttcgaatacagtaacctgaagaaagcaggggtatcctgagtctggcccatatcaggaccacagagcagccccagacagcacagggtgtggggtgggagaagcgaaggcccctcattagtatagctaggggtccagcctccgcctcggagccgtgctgctgtgtgaactgtgattcatcaactagcaagtaaatttcagttgggctcttagcattgtcagttttcacggaaaaggcttccaacacgctggcgtgtttcaaaagacaaaaaaggaaatgggagggagggaagggcaatggtggacactttgggtcagggtttgtatcagctgagtctcacacacaaaggacgaagaagcactcacacacagctgcctcctctaatgaagccctggtagtgattcacaggaatattcatggcagtcgtatttctaatcccgaaagaaatccatacaagaagacatttctctgtactggatcaatcaagtcccaacctggctctaagcaaagataattatcggaaagtaaattgttatgtttcgtctgacggcctgttgcctggcacatgtttcttccagggctgtctggaaataacagtacactgggccatcctgggtgacttatgtaaccaatgttattatctgagagctttcagcctcaggagctgccactgtgtgcagcctacctactgagtgcagcccacctactgtgtgcagctcacctactatgtacagcccaccaaaggagcttgggttccacctcatctatttctttctgctactaagaaactatgtcttaacaggaaaattaattttaaagcaatctttagccacagcttctttaaatgtggttattgacaacacatagaaaagaatatggtttggaaaataattggaattgtttttgctggttttactgggtaaaactattgttaatggagacagagggattgctcgccggttaagagcactggcttctctcctagaggaccagagttcaacccccagcacccacaagacagttcacaaacatctgtaactccagtcccagggaatctgacaccctcttctggccatcacaggcactgcaggcacatggtgcgcagacatacatgcaggccaaacataaaataaaaataaataaatcactcttaaatgatgctgtcatcacccctagagcaatatcactatgcagaacaaaagcaaagcaaaaaggcaaaaacccaaccaaaaaacataattaaggaagggatggtaaaaatattaggaaattaaagtaataatcatgtcttcagaaattaacaaataattagcgacaaaaccaagctaggaagctgaggggtgcagaaaacaaagcaacataagcaattcctccgaaagttaaatgaacataaaaggaaaagaagaagacgatgacgatgacgaccaggacagagtttgaaggacacagcgcacaaatgtaccaaagcagaggaagcctggagacacacaactgacagcccacaggacgactgtgagacacacaactgacagcccacaggatgactgcaaactgttgttcttgttgttgttgtttggtttcgttgtttagttgaaaacaagagtaaacccaaactaaaccttagaatttctagaaaggcatggaaacataagagacgagaaggaggaaagggagaaggaagagaagggccagagactgtgggctccacacagacgtaggagtcagtggggaagctggttgttagacacggggctcagtgcagaagcaggtgggggcggtgctggaagaataaacggcaacgataacgttctagaaacacactctttgaaagcagaaagacgctggccaccagacagcctgattttagaacagactttacacaaaacattctgaaaaggaaaaaaagaaaacaaaagaaatggagaataattgtaagatctgctctgaccaacttaactctcaacaagcctggataaaatgtgtgagttttgaagaacaatgtgatttgcccaaatcaaatcaaacaagacagaaaatggcctaacaggattatttctacagaagaaataactgtctaggaatgacttcagaatcccaagctcagagtgtttcacagggaagttccaccaaatgtacaaggagctctcttcagtgctatggtactgctgcaggttagaagaaaataagaaaactacccacgttcgtcttatgaaataagtaaaagtgattaaaaatcctgattgagagcaaaaatatctagacatttacaaacatcaccccacgctcagatgtactcgtgttgccactgaattccacaacccagtgtagtttgtcccaggagccacaaagacactcgataccagaagtgtcaggaaacattaaccaaactcgagttcagggcaacacattgctcgagataactataaaaagaaaagcttcatggccacagggatgctctggagccgtctggcaagacttaatctcattctgattacaacgtatacacaaaatatgcataaacagacagacaggccgacgagaactagagaggcagataggagattcattaacaaaataaaacacgctttgccagtattacatttggtgggaaatactagacactttcaatgaagctgagatgacaaaaaagatgtctgctatcatcttaaatatcttacgtgtgctatgtgtacagtccaaaacaattagccggaagacttgacttgaagatattttttaatctgtgagtatttttagataaacccctttatcctataagtaccaaagacaataaaaacagtaggaaaactcaaagtgctgagatttaaaacacgaagagatcaggggagatgggaagacacgctggtggggaagcagtgtaaagcccttctgtgttcagcgggatgtggtatagcatcgaagggtctgcattagtgttggcttgagtctgcacacacttgaaagggtgcctaagacgctaacaacactgattgggtggacagaggggtgaggaaggtatatagtttgtcatgtgttaacaaatcaaattgtatatttaagccaatctttaattgcgagagttctcttaagggtctcagagaaacatcctggtagtgaccaagcaactgcttttgcaccacacatgagctcgggagagcaggacttggctctgatgtggcttcctgcttttgtacgtgtcctatgtcaccccagacacaagttcttctaggtcaagggtgtttcttgaccagagtgacttgcctttccctcagaaaactctgtccctggcacttgcctctgggctctgaggtaggcggccacagggctttcctccaaggctttgttttgagacagggtcttctgtatccaggctggcctcagactcattatgtggccaatgaggaccttgaacttctgatcctctggcctccgcctcatgagtgctgagatgacaggtgtgcatcacccacctggctcatgcggtggagaacatcgaaccaggctttctgcatgccggacaggcatgtgctccatgactgagtcacaggcaggctctgtaactgctatttccagtccagccctctgctctattctgggtacaggcggctgctttctgaaactgctgcgggcacttcagagtcctctcttagcattctgttgtttcggttcctagttaccgtgaccgagtcttgctattagtgttcctctgacatgcactgcttccgttccatgttgaatgttcacgtcgttatttcttgttaaggtgtcgtttcttttctatatcctaattcaagcccaactgacacatcaaagaactctttttcgttctaagcacagactgtttgtgagtttgactggttagcaatctgcagggtctagatcttctatgagctgctgtaactttgaaaattgtggaagcacctaagaaccggagagaatcggttcacagaggaacagcacacatccctctctggggtagctgagcacagtctttttgggtgggatactctgttaacccagcaatagggtcttggaaaatgccagaaagatgtggattttgtccccagcggcttcctttctatggacagaagcagacaaatgaactccacccaagcaagatccctaacgatggttcctttgcctcgttaccatggtcattcagggcacaatttgggcatctccaacatttatgcaaagtccacaatatttggttcatttgcaaagaaaagttgactctcccagtatcaacaacccacaaagccctctaccatggtttgcgtacaagttgtaagaagatttccaggtggacccaggacccacctccatcaaactagacacccaaggcccagggagaactggacttagaagagcacgggaggggttctgcggaatgccgccttctgggtgagacggttatgagtcaccacagcacatgatcagggcacacttcacagtcctatcataggagagagagacaggctactgaggcctcgcctcagctcaggagttactgacagctactttgatggctgctggaggaagggagcggtcgctggtaggttgtccatagatgagctcacactcatggccatatgagcagcactaaccaagcagtccacgaagtcctctaccactgtctgtgtacaagtcataagatttccataagtggggtaataaaataacagcaaccataataatattcaagggttgctttattatgtggtacacatactaaaatttaaatttaaaaaatataaaccttattctgggttgttgtgcagcagacaggtgcaccattgtgaccacgttcttagaaaaacatttacattcattccttgtcctcagagtcctctacgacgcttacaaggccacagccatggtgctgaggggtcctgaatcacagacttaattttgccttttccaacactccccccctttgaaataaatatggaaacataaaacaagatgatcattgcaaacaaaatgtgggggggggtgaatacaagaaagaggttggggagcccagaccccagcccagggatagatctattctatcatttaaataaaaccaggaaaagaaataaacaagaagccagaatcaatggcaggaggcagagcagccagctcctttattactgtgtaaagatgtaagagcaaaacttcactggctggtgataacgagctgcccttccgtcagcaactcattagaccaactctgaatctgctcattaaccaagttacactgagtctcgatttcagagctggaggctagctagcctttttatagcacaagccatttcctactgtgtcctttcagctgttaaagagtagcaccacagctttagccgaagagtactgggtgactgtcctaacaaggtatagtttctactatgctttcgccaagaaacaacaaggaatgaactatgtgcatagtttggctataagcatacagggtgaatggaaaagcacatgtgcacatacatgtacactcagtgtgtgtgtgtgtgtgtgtgtgcacgtgcacgcgtgcgagcatcccatcactgagtgccaaaggccttcgtgtaaaacagcatggtctttgcatataacctacacacacacacacacacacacacactcccataaccttggaattgtctctgggttaactcttagtggcttataccacaaaatcacattagacaaaattcttttttaatatctattttatttatatgtatatgtgtgtgcctgagtatgtggacatacactgtgtgcatgtaggaacacgcaagaagtcagagaaagtaacagatcccctggagccagagttacaggaagttgtggcctccaggaggcgctggaaactgagcaagggtcctctgcaggagaggatgtgctcttcaccactgagccctgccccagacatggcggggtcaaccatttccatccacatcacaagctcagcataaaggtctgtgctctgatgccgatacacagggagctgacatgcctgtcacatcagagccacccagggagttatttaaagagcacccctggggctagcaaggcaggggctcagaagacaaaaannnnnnnnnnnnnntccctacaaacctgagggcggggctccggctcccagaatccaagggaatgatgggaagtgtgctctaattgcaacctcagaaaggcagacgggagccgggagccgcacagcaagctgggagagcagccccatggggagggctctggtctccctgccacaccctgcttcaggaagaaggtagaagggtacctgaggatgccttctgatattcatcttgggcccacacatatccacacacatacaaacatgcatacacacacacacacacacacacacacacacacacacagaaattaaaaaaataaaagcagaccttctgggacctacatcctaaatgaaagtagtcagcatggccctggaaagtaaccatgggtgtggaccgttcacacagccgggtgaaacacttagggtccatttgcagcccacaccctgtcacctcttggcagggtggccctgtccagcttcctttcattcaatggactaatcatgcctcctacaaacatgcattccaacgacagggagagtaagctacacacgtgtgtgtcaaatgttccacatgggtgaggtcgtctaccaaagagctaatggtgataatctgggcctgactgttagacaaaatctacatatgaagaggtcagaagagaaagtggcattcaacaaaccagcaccatcccaagaaggttttaaagaataagacaaaaataaaagaccttcgtaagagggggaaaaaataggacaacattggttttgctatagtttaagagaatccacccaaaatcacagacctgcgccactaatccctgctgactcagcagactggaggactccaggcacctgggttcagggcctttgatttctgctcacagacattagcatggaagccagaggtggtcaggaaagccaagctggagtttggctatcttctgggttctccttaaggccagggtcagatgaaagagccctcaccctctttcccaggcttcagtctcccaacactgaccgctgctgtcttccggcatcacccagatctccttctgggagatgcagtctagagactcagctgcatacaaaggttcatttctgacaggtcccgattccataacctcagtaaggagataaaatctgaaaggctgtttgaggggctgggaagatgggtctgtagttgacaaaggctttagggtaggcgttttcaaccttcctcgtggcgaggaccctttaatacagttcctcgtgctgtggtgacccccaccataaaattatttcattgctaattaactgtaattttgctactgttacaaatcataatgtaaaaaatatctgtgtttcccaatggtcttaagtgacccccgtgaaaggatcatttgacccccaaaggggtcacaacccacaggctaagaaccgctgctcttaaggggtctcacacccaattccggcctttgtgggcacctgcatacacagacacacacacacaaataaagttaaaaaccttaaaaattaaaattccacttgagctcacaatttaaaattctttctcagtactgttccctaaactgtaaactccctttctctcctccacagatcatggcattgggggaaatgatggcagctgtctacataaattcccagaaacaatgcccaaatactatgtattttgtaataattgctgagtcgttgtaaaaatcatttttaagtgatgtggggataagttctctagtgaccagaactgagttgcttccttccactacattatttatccacattacataatgcttaatttttgatcttcagaagcgtagcgagatatagacacacagacacacagacacacagacacacagacacacagacagacaaaggacagccagacagcaactgttcttactggaattagattatgtgtagtatctgctttctagtacagagagctgcaaaagcttatctcaggcagactcacgggtcacccacagcattgcacacacgtgacatgtctccagtgaagcccagctccagacactgcaggccttacataacccatgctgctgttggcagagccgccgcctcagtggctcagctgtccgtgtctcctccagccacaccctgcagctctaatctgcagtgtcctcatgtgcagtcacgtgtttggggacttttcgtggcagcaaacaaggcaggcactattccctgcctaccgctaggcagaattcagtaacaccaatcacaaggaacacagatcacatcaggacggaggtcacaagtcttggagaaagcaggtgtcaagtgtacactacacaacactccccccgccctttcaaacaaacctttaaattgggactacatagggtaatttaagatgctacaacaggtatagccagctgtcaatcataaatgcttctcccaacatgagtcccagggaacaataatcccaaatatcagatatgcatgcttttgctcccagggctcagagagaacacgcgctatcatgagatgctaagtatatctagtctccaagtaatgttattaggcttgttaacactgagcaaacacacatgtatgtgatgggtgtgtctaaacatctaccccaactccctgacccccaccacctgccccccacctccaccccttttcttctctggcattttattactaattcgggtccctagtataaaaacactgaatgccaaatgaactctagtctttcatttactcaaatatttaaaaatctatctacacacagtgaccctgccctaggtatgaggcaaatatatgcctgttattttcaaaaacagaatctgtgttggtgtgaatgtgacataaggacggaaaactcgtctgaacacaaagagaacccacaaaacacacagaaaaaaagtcaaaaatacacacttttttatcactccaagatgtacctatgtctctaccaaatagcaaaataacaccaaaggtggtaacttagtattacagtagctaaaattaagcagtggtgaactgtatgaaattaacaccaatgactagaattctgaataaaatttgactatattggtgtaactagatttaggtaaaacagcttttgatctcctctggtttgaatatttatgttcatacggtgagaattcaaaatataaatgagaggaaataaaaacatttacataatttaaaggcttctagtcagctaccctgagatatcatttatggaacaatgacaccttttggcaggctatggtattgcagcccagctctatagtctgttcattaacagaagggagggagagggggggttgggaggagaggagggagagaaaaccgcagtcaagatgttaaataaataaataaatgtttaaaaaatgaaaacaacccaaaatacgttatatgcatgcaagagaatgccaaaaacaaagccattattttgtacaaataatttgtgcttaaaaaatgattccagggctgacaagacagtcatggtagcctggtaactgagtttgatctccaggttccaacttcacggagttgtcctctgccacagtggttctcaatctgggggtggagtgaccctttcacaagggttgcacactggataccctgcatatcagatattcatgattcatagcagtggtaaaattagttatgaaatagcagtgaaataactttatggttggggtcaccacaacaagagggactatatcaaagggtcacagcatcaggaaggttgagaagcactgctctaataataagtaatttttaaaagatttcagtgtaaatattgctaccagtaggtgagccaaggagacagggaccagcaagggagcaacggtttcatgtccccatgacctctgtgacttctgtgacctctgcatcaccaagactttccaaagcccagatctctgtttcattctacatcttctgtttaatactttttagctcgggtttggggacaggcatacaaagtcatccttgatcagaaaccagattcacacacacctcagaagcgccagcctgcacagctacagtcctcgtctactgacctctccaacttgggtgtctctcaccaatgtcattgtagcaggacaagcctggaagagccagtcctcatcaaaaacctcaatccagtaagttcaagttcactaactggctgggcaatggtggtgcacgccttaatcccagcattcaggaggcagagacaggcggatctctgtgagttcgaggccagcctggtctactcagcaagtgctaggacaacctccaaaacaatacagagaaaccctgtctggaaaaaaaaaaagttcactaactgcaagatgaatttcactctcactgctctgactatcagaccttccagaaggtagttggaacactccatacttataccccaggactagaaaaacagcctcacagcccacatggggactccacacaaggtaccgtgtcctgaacaatgtgcagaaattcccttgtgtactccacactaggcaatgttcctgatcttctgaggtgtttttctctcgatgatcttggcccttctaaacttcttaaaagggcctggagagatggctcagtggttaagagcactggctgctctagcagaggaccttggccatcaatccccagcacccacatggcagcccaggaccctctgcaactccaggtgccaggatgtgatgccctctttaggcctctacaggtactgcatgcatgtggagcacatacacacatacagacaaaacatctctatacctaaggcagtaaacataaatcttttaagtgtcccttctctatcaattcccaggccattcatgagacacaattttcacccaccttttagaccagtataaccccagtcccaggacccaacctccaactgaggtcaacacagtcaacaatcctgctgggatctgacattcggggaccagacaggagtcgtgtgttgcccactgcagtggtaaacagtttctgggcccttgctctcagcctgatgcagcctgccacattccctttctcgtcacggaagctgtgccctttattgaattgggttagcccaagatgctccatatacacagcaaacaaagtaacacacggagctctgagtctcatgaaagtcacagtgctattgagaagacagaccatggtaacaggagtgagaccaacagtgggcactcgctgaaactccctaagacatcaacaaatgaagagctatgtcggacggcctcatcacgaaaggcactggctgtgactctgagctgagacctaaaaaaatattaatcaggcacacaggggaggagaaattgaatccctttcaattcaggtatgctcctggacttgctgggacaaactactccaaatactcatcttagaggacatacagtcagtctgccgtggaacgcctctgctaccggtcctctgtcttgagtgaaagaagcagactcaggatgggggaactggacaccatgtgaagtttagcagtagatacgtctatgaagaaaccagctagaactcgattgtgtcctacaaaaccaggcacccacggcatttctctgaggatggtggcctcagcatggacaaactgtgaggacactgaaccctgaggagtagccttacccctcacctcatgggcaaatgcaggtgcagggctgtcctgtgttagtgccgttgcaatctctcagtccttctgagagaacagaacaacccttctctggtgggaggagcttgtgtggtggaccacagaggcaggaggattctgggcttttctctggccagatgctgtccttttgagtctgggagaaatgcttgtgaacacacagatctacctcttggctcctccacatggatgtgacggcaatgtcctgtcatccgccagaatatcacctactccccctgtgactcaagtcccagaagaagggaactgaaatgggctcgccaaaccccagcactaacaaacacatgtaagcagaaccagaggtgccaacattctgtttgggggccacagaactacatttgagacctgccccagctgtctgcatcaaggacagacagcaaatcggaaacctaggtgcagaagaaaccgcaggggtgatgtgatgtaatgagaaccgtagagacccatgtctccactcctgacactgtcctcagccacgcccatatatggagtgacactgaggactaaatctggggcctggtgcatggcaggtattcactctgccacaaagcaaaaccttcattttctaaatttactctgaatgtcattattggtctgtgtagaccaacacaaagagaaaagctcctttatcatagctgtatgtagacggtgagcaactgttttctcattcacacaagaaccaactaacttctcaccgactcgctagaaaccagtgcatcagaattcctcggagagacccaggggccacagaatacttaagactgtatgagtgacgctcttgggccatgttcccatttggaagcactattgccagcgttgtctacagtaaaagtctgccgtggtggggtccatgctagattgtcttccccaccaatcctgcaaaatgccatcccttgaccttccctttgtagagggcaaaaggtccttgtgctcatagatgagcaccagggaaaccgggagggttaaacagacagggttgtgtcctcaacagaggagatgcaagcctgtttccacccagacagctgggagtgtgtgccgttaatggcctgatggcctgtgctatctgtaggcagggccacatccaaagcccagagactatgtttatcccagactctccctacccaggctttatcttgagcactgtttctcagtcagtagagcccatgcttaggggagatgccccgtgcactttataacagcgtaggaacctctgtgttatcagtagggccaggccacacccaactccctaagactttatgctttcctccatcattctccctagacccttcagaattgtttctcagtcaacagaaccatctttaggaaagaagctgtatgtactttgcaaagactttcaatgtaaacatgtcttaagtttgctgtacatataggattgagttaaacaacatcaggaaacatattaccaaatgtttgctgtccttaaatacggctgagataaactgcctgggtgtcagactctaaagcttgaaccaacaccactgacctagtcatggtgatccagttttccttttttgcctcacatggatcattgctctgccagccctggtgtctgtggagaccacacatccctagggctacaaatgtccttgacccaccctatggtctagaagccacctggattcaccacgcccatcagccacacactcgagggttcctgttctctacttctctacttcgaattctaggagctgtgtttgccatggggcttctctgaagtcagcctcaaacttaaagtctccacaaaggagagttaagatgacacggatctgcttaaaagtctgtcttgacatagctcctctgggcagcatgttctatatattaatagctgggactactgcaataagctggcagtgaggataatttctgtcctgaactattttattgtcctagtcggagttctgttgatgcagtcagagaagagctgaggacggacaaaatccagagctaagtctggagtcaagcactttcaatattcaagtcagagccacatttaatactgaatggtcagcattctcagggttgggttgctggtgaatgcaaagtgcattcggctaattaaatcagttacagtcaattatttctctcctgaatgccccaaggagtgagataaaagacagctacttaataaccagacaagcctgcttctgcatctgggtatttcagactattgccaacacccacaggattctcctaatgtgtctcgccatagcctgtccaccaaaataactgggcaatgtaaagaacaaaccagtgttgcatgctgcagaaaaacaaaaacaaaaacaaaaacaaaacaaataaaaaaaccaccaggcactattggaagatagcgctattattctgcaaatgccttcaagttttgttttattcattcactcatttatccattcattcattcattcattcactcattcattcattcatcatgtggaggctctcgggttaaacttaggtcctgaaacaaattggtcaagctctccacctctgagctccatccctagaccttttactctttatttcgacacagggtctcactaacttgcccaggctgaccttgaactcaggcagattctgaaattataatcctcctgcctcagccttctagctatctggtattgcaagactgagatatcaggttaggttccagctttactgttctgattctgactgcctactctctactggcaagagtaaactcaataaaatataattgatgtagaaaatttttagacccaagaaaataaaatgttgctatgagaaacaataagcataaaccaagatgctcatgaaatactgacatgagtcacttttttctttagaatagttgagaatttattcttccgtttttctctcgtatatggacatagggaatggcccattgaaacgccgctggagcagtcactacaactgctgttgtcttctttgtttcctagcgcctgctttatatgagtcttagaagtgaccaccagctgtttaaagatttgcattttccaaaacaagcaggagaatcatctgtgatttatgaaaacttataggaagtagggagcctgcttcccaacaggacatggttttcaattaagggcatttctgtttgtttgtttgcttgttttgcaccagtgagtatggaatccaggcatcatattccctaggtgaaactctacaaagaagctagcatcaaggccctggataaagcatttttacatacatattttactatggaaacgaccaggctgtcaaaaggatagccaagcagaactgcttcatttaatttgtagcaaagaggagatatcaaagatactacccaattacccactctcaattcttcatgatcaggaacatcgaacataaaaagtagtcaataaaaatcggggagactgcagaatcatcgctggctaaaaactaccatgggaacattttctgtcaattttcaaattcccatattggtttttttttttttctatactacttagctctttcagtacatggcccaactttctgcgcgcacacacacacacacacacacacacacacagagagagagagagnnnnnnnnnnnnnnnnnnnnnnagagagaggagagggagggagggagggagggagggagggaaagtgtgtgtctcagtgtcacgggacccccctgtcaatcagctcttttgggaaagcagaaaccatgtcaggtttcctctgttagtttgaacatgcttaaataactgtttagaaacaccttcctaactagctctgcagtgtgtgccaccaattggctgtctactgcgctgtcctcagcataagaagcggacagcaaacatttatttgcacacagcccatgatgatgagcagatcagagaaagaaatggcattgggatgagcagattccatccacaatacaggttgaagtcctggtgccccaaccccacttggtagctctgaatgaacaaatcatccttaaatggataattaaattaaaactaggtcattggctggtatcatcctgaatgactaatgtcatactgaggaaatttagataaacctatacggcaagacaggatggttgaagacacaaggggacatgagggccacctacaagcccaccagagaaacccggggcagatcccttccccatgaccctcagaagaaaacacctcatcatcaccttcacctagatttctggagccataagaaaataaattcctactgtgtggggacatactgtttatgattgcctgaggattcagaaagcaaagtcagcctcaagctatagagatcaggcagtggtggcatacacctttaatcccagaactcaggagacaaagacagatcgatctctctgagttcaaggacaccttgggcttcatgagattgaatcagtctaaaagagcaatagagctcatgcctttagtcccagagctagagagatataaaagataggaacagggtcttcagtagtcagtctcatgaatttctatagccacgttgaggagagcatagcagtcttagtgaatctggggagcagtttgacgattgcccctttggtctgaactgaggcagagttaagagctagtggctgctgctttgcttttctgatcttcagcttgaggcttgacccccaatatctgtctctgggtcattcatttttcatgctccaccattaaccaggccactctttctgcagaactctgtatgacaaatgctgtgaattctaacagtttcattccctcatgtaacaggcgccaaacacctgacacctgtccacatgaccctccttgtggtagctagtgatgagccagaggacgccagtcaacccaaccatcctcctagccatgtgggctggctagctgccatgcagtgcaccctccggaatagaatattcatctccggggcatctgagcccattgtggtgtggtttacgctgtgtgtgatatccacctttctccctgagataacactctgcagacacatggggattctccttccagaaaacacccctggtgcacaccagcaaagtgatgtgtaaacaaggcatcgtgcttgactcccagaaaatggaaggcaaggaagagtaaaggaactttctactgggcctcagagcaaagggagccccaaccccaacttggttaaaagacagcagggcacagtggcccttctctacacagaaggctcatgcgaatccacatggagctgaagaaatacattttcatcatggaccgtgggacactgtattttctagaagaatgaacaacggaagaaatgaaagaaagtccaaatctctcatgaagatctcctctcaagatcttaaatgtcaggctgaggggacggctcagtgggtgaaggggttttcggtgcatgggtttggatcctcggaacctgtgtaaagctgggtgtggcggtacaagtctgtaattgcaagggctcccacactggaatggggtggacacaggacaggtggacacaggacaggtggacacaggacagtccccagaagcacagggccagagtctctagcatatgtggtgtagcagccaccttgttttttgtttgtttctttgtttttgtttttcctgttgctgtgacaaacactccaacaagcagggcgttggtggcgctcacctttaatcccagcacttgggaggcagaagaaggtggatctctgtgagtttgaggccagcctggtctccagagcgagtgccaggacagcctccaaagctacacagagaaaccctgtctcgaaaaacaaaaacaaaccaaaacaacaaacaacaacaaaaaaaaccaaaaaaaaaaaaaaaaaaaaaaaaaaaaaacccaaaaaaaaaaaaaaaaaagcaacttaggggagggatttatttcagctctcacctccaggtcacagtgcaccagggaaggaagtctaggacaagaactgaaacagaaactatggtttgttccctcctgctcagctccctttcttaggcagttcaggactctcagcctagggagagtcctgcccatggtgggctggtcctcctaaatcaaatagcaagaaaaaaaaaatgcccacaggccggtctgaaagaagaaactccccagctgagactccctcagataactctaggctgtgtcaagccagcagtagacgctaagcaggaacacgtcaaaccacagagacccccacctctaacaaggtggaaggaccaacagcagaagctgtcctctgatctccacacacaagctgtgacacacatgcatgtggcaggggcgggtcttaaacatgcctttgaaaaagaaaccaactagagtccagggcggggcaggaggctgcctaaggagaatgtcaaatacagtgacagggccacatagctcccccaaatttcaccacctggtctttcctgttgtcagtgtcgcatgacccaccgactccctgacagccttcaaatcaagtgcccgtgtggaacaccgttcagtcttgaaattaaaatgattccattactccagcatcacacgtgatcatttaaagtgctctgagcaccggcctctagaggaaacagttaaatgaaccaggggtgccacacataatcaaaatgaaccaagattcagtagcgcgcgcacgtgtgtgtgtgtgtgtgtgtgtgtgtgtgtgtgtgtgttccccgtgtaagctgtttgctaataaactccactccaattatactgggtctggtggatcctaacttccacacctccccatgtatgtgagttaaaatcttcctgggggctgtgaagggagtggggagccacacacgcccactagagctgccgaccactgtaaaacagcaactcgggcagagggcctgttaattgcatcacaggcttgctgagtgagcctgtgattattggaatttacgtatcaatcaaatgtgcatatatatgagttacctttcttgttgctgtgaccaaacaagcagtaacctgagggaaaagggacccgatggcacggtggcaggatcggtcacgtggtgtctgcagccacagacaagaggcggggccagactataaaatctcaaggcccctctgcactgagctacttccgtcactgaggcaccacctcaagcttccaccatcttgctcatcggtgccccctgctggagaacactgctctcaaacacacagtcttgtggggaaggtccattgtcaaatcacaacacattagaacatcagaactactcaaagtccaaaaccatgatccaactttacaattcacagttccagactaagatggattcgcttttccttttagaggaagacagaacaattacctccatcaagtacacaatgcctttctggggtgctttgcaaagactgaagctaattacccacttccacaaacaaacacgaaagcattattctatagccaacgcatttggttaaaaagaaggaaaatctcaacgtaaaggaaaaagtcacatttttttctttagacatttcgtaacccccattttagaaataggaattttttattttaaaaaatcccttttcactgtaatttggcacaattgtgtaaagatggcacatgaaaataagaaaagaatccgaaagaacaactcgtatgtcagtcgagatctcggagattaatatttatgaaaacaattggcaaacaacagcttatgatccaagacgagagtgcccagcagatgtctcgttaggaggcacagactctgagaagaagcaatactgccgcccatatgttctcagccttaggatccctcagccacttcactcccaagatcacacggtgcccacgtgtgcaaagaggcagacgctatcttgaaagagaactttggaaagtctgtttattcagagagagaggtggtatgaggggctgtgtggggagggagcagaaaacccagccagctaacttagtctggagacaccatctgctcaagtcgctctcgggaggaagcgggtgttcttttgttcttggagcccatctcacatctcttcccttgtgttttgtcaacaactctccaactccttaggagttgcctcccttctgtggtagcatcttgcctgagaacctgtaacagtggctacaccctttgggtgtggtttcaggtgtggatgtgacccatttaagatagaggagctggggatggaagccccttttgggtcttggagagcataggagagacagggtatgcatcctttgagcaggaaagccgcgacagttactgttcatccccaataaaagacctatttatcatttatatggggtctggtgaactcattatgactccccaccttcacccttcaccctgatttccttcggaatgatgatggggagtctcctgcctcagatgctcggcagtggggcttgtggctattaactctaaggctgacatacaccaggatgagtgagccaaggaggtgggaagttagcgggatctgaggtcctgattaggtctgaggatggccagcataggcacagcagagacctgggtgctgggactcctggatgagtggctgcacaaatgcaatagctcctgtaggtgcgagaaatgacaggtaggtgatggagaagaaaggtccctgatgatgccgaggtcaggagctgagaggccagagtattagctgtgggaacttcctgttgaactagatatgcatgaggaccgtctgggatgaatggagggatgtgacaggtgtcaagatgatttagtccaaggtcttcactcaaaaatcaagttgttaagaatttcaaaaatgggagaggaatcagccctggggcagcagtggaaacctgcacacatgcaggtttcctccaggtggaggatgggggagaaaattcccattcaataaaagggctggccttggaagaggcaactcttagggaatgggcacaggttgcagaggaagagaagagaaacttgggagaggggtgcagagaactggggaaatatggctgcccaggggtcttgggggttgctctgttcactgacagggaaaagcaccatggaaccactgtcagaactgtcattcaaaaaacaggacaatgagcctaagaggtgggagtcttgtctggatctgcctacaagacaaccaactctccacaggtcacagcctgtttctctggcatcaatgactatatgcacgctggtaatagatggcgtgatcctgatggtgaattgttaaaagcaatcccacagtggcaaagtaggaggttactgctttctatgggactaacagatccggaagactacatacaaccttgcatggcaagaggacaggaagtagactcggaactttggatagagatcactaaagaaaaacaactctgtgttgataccctcagccccattggagtgccctctccaatccaaaatatcccctggtcctcattagatacgtcatgttctgggctcctcataccaagccaccgtgttgtgttcctatcacacttcttttgtctttcccaggctatgttgtgtaagcagtagagtctgtagtttgaagtgtagttaacaacacaaacaaaacctaagaatgactgtgaaaagatgagcctcacaactccactgagaaatctgcaaacgttcaaactcttggtgccttttgcttgaaggaagaagtatccagaaaggcttaagagtctcaggcaccaggtggaacaagcaggagacaaactgatgccaataccaattctgatgctgaaggaaacagtacatggcagatgttcaaaaaccattagacacaaatgaaatgtggtctgtgttctacactgttaaatcactcttgctctgtagccacatgcagcatcccacagctctgtggcctgacatctcaacaaaatgagaggtacccacattgggacatggactctaatgttgcagaattgttcataaagccattcttctgtgacaacaaagccaccttaaatcacaggacagagtcagcgattggctgacagggattagccatagagttcttagatgaatgaggaggtctgctagagaggacaggaagagagaagagggattttccagggggaatttctggggctgatggtttgggaaaaccatggagagaggtcaaatttaccaggtctttatctcaatttgtgactcctgggtttttattagactggaacaatttatatattcattatgcctggcatccaacacctggcattattaagccatgccaaggcggtgagcccaccatgttgccaccaccaccaccatagcagcctgcttagttccctccccacaatccctctgcacctttttctcccatctgggggatttttgcattgcagtctttctacatcagttgtcagctgctgtccacaccaggccccaaaacaccacctaaatgagcctcccaccaccgccccatgccttcacttcccaccatgtggttctcccccaatcccctccctgggccatcaacccaggccagtttggctgcctggagacccactcagggcttgggcttttactgctgctgccatggccacatgcagctgaggaacccggctgaggtcactgccagtgacctctaccacagctagctgttgtctacaccctcagccccacatttgcacaagcaggtgtcttcagcccagcacagcaacagccagctgagtatactgctggtcagccaccctacccgacactcccagcaggcagcttggttttctcccaccttgcatcttgccttttctctgtagcagcaagctgggcagtcctatcccatgctgtatccccgctgtgcagatttctcctactgatttcctatttccttgcttgagctcctcagacagctcaccccactccccacacaacactaagcagccacagtggtccccagtgcacctgccctccttcagacacagtcgagcatggtcactgcagttaattatccccatacatccccacctatgatgtcagcatcgtcagagctgatacgacacttgggaatttttaaatgggggattgggtttttaaaaagagacaagatggaatcttccccatgtgaagaatctgaaacgtcacaatgcagggagttaggaccctatttagggctactatggatggctggcaaatgaaaaattaaatgaggggaaaacaacttaggtgggattgacataatgtcattcatagttattgtcagtttggtaattcatattttgtcctcaaaaagtggtttgaagactgtgcaaatatgacaatttgacttactattcattgataagaatcaagctttagaaagacttattactgataagacatgtctcagacttactaatgaaaagaagaaaaatactcagacacagaggaatttagagcagaacctaccacaccattacattatgaaactgaagaggaatggcccaaggttatcagaaaatcaaccttaatttatccagttagcataggagaatgaccaccagatggtagctgccatcaaggccatgcagaagttacctgggatcctggagaaatgttatatttaaggaatgaagagatttaaggaatgcattaagattcatggtatgcattcaccctttgcaaagcagatgttaaattcatgggccactaggaacagtatcattccacaagactggagacatttagctacagcaatattggaagctggtcctcagttacaatgggaaacatggtagagaaaggaagccagggccacagaacaggggaatacagctagagggtttgcaatttcccaagagcagcttctcgttgagggagaaaacagtctagatttgatgatgacactttggtgttgtgtcacacagcagctttgaatgcttgggacagggttgaaggatcaggaaaggggactgagtcatttactaaaattacacaaggcctaaaagaaaccaccactgggtttttgtttgtttgtttttgttttgttttacaaagattgacctcagctgtaaatggaatgatatcagatccagaagttaggcaaacactaactgaatctttggcttttgagaatgctaattcagaatgcaagattatggtgatccagcctctaaaggtaagatcagcacacagagatgaatggatccaaagacagctgatgtggcatcataagctatgatgctgttttaataggagaagggatttctacaaattttaaggaaaatcaaaatatcagacattttaattatgatagacaaggtaatttgaaaaggaattataggaagatgctcctagaaacaatggggttttttaaagagataatccagacaccaggcccagccttgtgcaataagcagaaggtatggtaaagagcagcactggactaatggatgccgatcaacatgggacaggaaatgcatcaattctccatcagaaaatgccctgagtggcctccagcaggcaacatatcagataggggtcaatcattccctgtcaccattggagaaacacactcgcagagcaattaaaagactcaattcctgttatttaaaaccacactgtcaacgggaggaagaagggaactgggattggcatgtaaaacaatcttgtttctaattcaaataaaaaaatcttaaaaaacaaaaaacaaacaaacaaaaaaaaacactgccctggatatgtccaaagacaaaagaacctccacagatacaacaaaacgttcaggagagaccagaaacaagtattttggcaaactgctataaatgatcagagaccaaagctaaaaatacatgtaaagaacatcgaaattgggggttttgtagacacaggtgaagaagtaacaatgatttcaaaaaaaccttggcattgaaagattttagtttgctgagagaaaaagttttgaaagattttagttcacagagagaaaaaggttcccacaggccatggcccaggacaaggaagttggccccaaccccgggcacatcctatggtttagacgagggcaatcgccaagacaatcctctctgggtcacacctggctggccaaaagacaatcaaggacttttcagggtacgtattgtggtttttcctttgtagaaaagcaggtcacacctgggtgaccactctaacacgagatcatactttgtaatcaatcactttgtgccccttgcctgtatgctgatctgcggttctttcctatataaggagcttgcaccccatgctggggtgtgcagctttcccgatattgctgacacctgaatgcacattcgttcaataaaccctcttgcttttgcagctcttggtctggtttctgagtctcgggggctcctcgggaccctgtgccccttaggggcctgggggtctttcagcattcagattggcctttccaggaggtacatgttcaacctctagaattggaactgtatctctgttggtgtccagaaagatacacagtagatgacagctggtattcataaggtcgatcgccgagaaaaacaatttatctggtggaggataaactcataaacaaggtttatggatccattgtctatgaataacaggattgattctgcctgtaattctcttgggtcccactctgatcccccctaaaatagccatgggatttgtcccacaaccttggaagtatgttcctcatttttggggcaccattatttctctgcactgacagaaggatgacttctccccacactgtgtaattctggtaattaaaacaagcctttgtctcacaaaacagtgagaaacatagaaacctgttctgggcaattagctaggcagatagggagattagccagattgagagtctctgtgtacagattatgagttagacttttcacagataatgctcagggatcagggatgcaaatgtctgctttgttaaatcaaggtctttgagacacagagagacctggatcactttccagtttccatcctgcctggctgataacagagaccagaagctactccctactaagttccatagcaattaacactctgcacaaacttcttttttttttctttttttttttggagggggggttcaagacagggtttctctgtgtagctttggaacctatcctggcactcactctgtagaccaggctggcctcaaactcacagagatccaactgcctctgcctcccgagtgctgggattaaaggcgtacgccaccaacacccagcttttgttctgggtgtatcacaaacttctaaacttagtttgtgatacaaaattttaggctcagctaactaactgttcatgctttacagtcctaagatttgtatggaggacaaaaataaaaaccaattaatcaagtccagagaggaacaactttacatggagaaaagtttcacagatagccagggctgcagaagatggtctggtcccacagccttgattaaaaatttacaagcttccctccttgtgcttcgggactatatgcaggaagagaacatgtatctttaggcttgggatgcttttcagttccagccctgatagatagataggaaattccccccaaatccttacttccttgaaggcattcctattgctaccctgcaggcagccctgggagctgggcttcctggactgctgcgtatctcaggaaaaaaaaaagtgctagatacattgaatgcatagggccaggacagacaggaaaatccaaaccatatatggccaacatagcaatgaatttatggggctgtgatttgttgcggcaatggaaaacacagattaacactccccccccccatctcagaaacaaaccacaaaataaagactgcttctgagagaaatattaaaaggtattaagggtggtcagagactgttgaggttgtacatgagcaaggcagaacagatggtgatctttcaaaggtaccaacagccctacctttaaaatggttacctgacaaacctgtctgggtggaacagtcaggtttgacatcataaaattacagagattagaacagctggtatagaatcagttaaatgctcaacatattgagaaatattgagaattacagagaaatttggagaatggggaatgttaacagatttaagagccataaataaggccaggtagtggtggcacacacctttaatcccagcatttgggaggcagaggcaggcgaatctatgtgagtttgagaccagcctggtctacaagagctagttccaggataggctccaaagccacagagaaaccctgactcgaaaggaggtggaggaggaggaggaggaaagaaggaaagaaagaaagaaagaaagaaagaaagaaagaaagaaagaaaggaaaagccataaataaggtaatttagccaatgggctttttacagcccaggattcctttaccttctctattacctaaagattggtctacttttgtgattgactttttccttaccatacctttacaagaacaggctagagaaaaatttgtcttcacagtgcctacttacagtaatccccagcctgttaaaaggtatcagtggaaagttcttccacaaaggatgttaaacagcaccaccttgtgtccatattttgtacaacagtcactggaaataatttgtaaactgtttcctcaatctataatttaccatcatgtggatgatatctacctagttgattcagacatggataccttagggggaaaatgtttgaagaagcaaggaaaattctgccttgatggaggatacaaattgctccagaaaaaatacaaagagtttctattaattaattaggttgttggataggtttacaaaaaattcaaccccagaaagtacaaatcatcaattacacattcttaatgatttacaaaaattgctgggaaatattaactagctacagcccacaattggattaacaactcaaaacccaagtaatttatttgaatctttacaagatgatagagacttcaatagttcaagaaaattaccagataaggcttagaaagaattggctgtggcagaaaagaaactatgggatgcacatgtggtttgcttgaatccagtttgactgtatccttccacacattttcctacaggaattcttatgcagagagaaggtaatattttagaatgggtattttaccacacaaacagagtaaataaataaataaataaataaataaataaataaataaagatctatgtggaaagggtttctgcactgattctgaaaggaaaattgagatgtatgtcatgaattaacagaaactgaaacaacagaaattgtagtgctttttcctaatgctgacatttcctcattatggatggaaaatgaacactggcaaagagcctgcagtaatttctttggagagattagtaacaaatatccccaaaataaaagaattaattggattcttcctcaattgtgcaaggaacaccaatttctggaaaggcaggttataagtcatgaaatctaagtaaagtgcctcaaggcccttatgatttagttcataaatcagaattacatgctattgttgtggtattattagtttttccagaacctcttaatgtagttgctgactgtcaatttgcataaagagttgttttacatattgaagccactgaaattattccatataattcagaataaactttcctatttattcaattgcaataaataatcaaaaatataaattatgccttgtatataatacatatcagataccatatgggtctaccaggccctcttgcatgaggtaatgatgaaaattatcagctactggtaggaagtgtgctagaatcctcagaatttcatgacaaacaccatgtcaatagtaagagtttgaagaaagaattttctatcacttggcaacaagccaaggaaatgtcctacttgttctttatacaaccaaatcccattacttgcaggaagaaacacaaagggtattcaaagaaattaaatttgacagacagatgtatttcattttgcagagtttaaaaagttaaaagtatgtgcatcacaccatagatacatacacagtattttcagtgggcaactgctttgagttctgaagaggctgatttgataatcacacatttgttagaagttatggccattatgggaatacctgtataaattaagactgacaatgttccagcatatgtctctagtaaaatgaaataattttctgcatattacaacataaaacatattacaggtataccacactttaaaagacatgcttaataaacagaaaggggtaataaagactcccagagttagattgcacaatactctgtgaactttaaatttttttagggtaaaagaaaggaacaatagttgcagagagacactggatagaagaaaactactgaactaaatcagcctgtatactttaaagatgtattgacctcagaatcaaaaccaggatatgtgttacgttggggaacaggttttggctttgtttccataggagaggaagagctgtagataccatcaaaactgataaagactagatgcaaacaggagagccctcttgattatgagaggtaacagttcatcaaacatcatggccattaaacctgtcaaaaggagaaactctaaagttaaagttgtggtagggttttgtttttgtctttgcaggagaataaaggtatccaactaaggaatctagagaccacaggacagataagacatctgaagatgaaggatgaatcaatcatgcagaaaaaaaaatgcctcaagaaaaagagtaaattggcctaatgagatagcacaattacaataggataaaatttcatataaaccttcccaaaggtttgtctctactgctctctactgacatatatgcaaatggtctcttcctagtcccaagccaattaaaaatgaaagctggctttggagttggagcgtggctctctccttctctaaacccaagcatgcttgttaaagtaaaatccaaaatctgtctcatgtcagaagagtcacctgatatgggacaggagaaaaacccaaattagggactattctattgcaactaatctcataattctttagttttgttttgactttttaaaacttttcttaaggtataaatattatctcaaaatttataagattaatatatatttaatatatatacatatttaaactttcttttgtgatattattgatcatatagaatactaactagttctagaaataggcttcatctagcttcctgtataggatttcaggcttgagctagtgaactctgaagtctctaaaaggatgttgggtctccacaatgctgagtccacctggactgtggtaataccactaagctgaaaaacaccacacaaagattagctttgtactataaactgctcagggcagcttcaaatcagttaactaagatgtattgtggagagactggtgttttgtgggtttggaggctaatcactttatctagggccagttttagccttccataacagccattccttatgccactcttgatttgaactaacaccttatgataatcaataaaaacacgggcagaaaaatgagtcttcggctccagcttgaaaagattcaatcaaatgtaaagcactgtttgtttcactgacatcatttaatccctggctccattatgtaacatgttagacaggggcaagagataccgggatttgcattcacacttcccctcccacctcttttcttagtcataaaacaaagttcaggactccgtggcctctgggagctattgcagagtgctgagtgacttcagacagcctgttacctagcccacagctcctctagatatgacattggtaacggctggagaacaaggtgacagccaggttttgttgccatccacttggcacctgcaacaggtaaatctgatggaaaacatgggatgcctggtgcactctgcagaatctctgttccttctccaaaagacagcaacaccagacctcctgcctcacgtcctgctgttagggttccaacactgtctggggtcagcagtcagctgctacagtagctgacctcactcagtgtctttgttctacagcctcaagccctctgattttggtagggggctttctctgggctcaaagcctccaggctgagtcttctctgttcacgaactgagtctctagcacattctctccaggcctctcctcaaggctgggagccggtgctggaatggaagcccctcctcctcctcaccgctgctcatcacatccttcctgcctttgttccagtccctcccactgctcctgggcacagcgtccatccgtctgacaccctccgtcttttcttgcttcacaggccacacagtaggtgcacactacaacagcacactgctgtgggtgaccccgcttgcacccctggccttctgtgctgaagcctgggcagctggtctgactcagcgggtgtgtgaagcccacaaaacctgccccttccaggaacacaaagataagcaaagcaggatttcaagtgatgcttcgagcattcgcttctcagctagggctggtgctggctgacagctattgatggcaaggcccttgctaagcaatggctgtgtgcatggccaagtgctaaacaccggaagcttagcagtgaagatcagtagcctgctctcaaacagggtgtgaatctgggtggagatgagcggggtggtgggggtgggggtgcagaactttgtggatctcagctctgcaggggtgatgtgggggcttcagctcatatgtcaagtctggcccactctcaacaggtccctagtttctttaaaatggcagcacacacgctaaagggaacaccctcaaggaatcttagagcaaggttcaaaatcgggcaaataatgacaccataaatgccacagtggttataaaacaaagcaaagctgtgtgtggtggcagcactttaatgccagcacttggaaggcagaggcagaagcaggcatatatatccctgtgaattcaaggccagcctagtctacatatggagttccagcacagccagggctacatagtgagcccctgaatcaaatcaactaatttttcttcttcttcttctttttcttcctcctcctcctcctcctcctcctccttcttttcaaaaagaacaaactgaagctaaagtcgtcatggggcatgttctggagaagagtttatgtcagacttaggtggaaatgactactgtgataattcaacaataccttaattttattatcttgtcctttttcttcagttaactttttcgcagttttggctttgcctttgccttctgaagttacccagtttagcttgttaatgagagccccatctcagcagcctcacagagacaatggacagtggtcggtctgagcccagagaagatgcccattgtgaccttccacctgtaatctctgtgtattttatttattatttttacgagttttgtctgcacatatgcctacaggccagaagagggcatcagatcccattatagatggttgtgacccacatgggattgctgggaattgaactcaggacctctggaagaacagctggtgctcttaaccactgagccagctctccagccagctgtaatctctaatgactcagttgtatgaaaagactcaagaccaggaaggatgcagctatctcggattttgaagcaagcaacaccaaggtgtgaagagcatggagtcttttccgtatagagcacagcaattcggccaaactcggcgagaccagcgacagaaaagaaaacatttataaaagctaccagtgtttttagcccattcaacaatcgctttgcccagatgagaaaataaaatgcaaactcctgaggtggagtactgtgcccattctgtttctaaagtcaatctccaaagacggcttcgcgctttcatacttgtagacatctgacaccaagttaaacaacagcacacagacagtgcacacgtgtgtatctacacacacacacacacacacacacacacacacacacacacacacacgtttatgaatggtaggtcttcaggtttgccgagttactgctgctctagtttaaaatactagaatccttgcaaaacaactttctattcatctctgaaagacacttactaagaacagaagtgcactgaagagcagctgtactacagccgtgtttattcacctttgcaaaatagggatgacgtttttaagtcatgggctcattcccttgcttcccttccaaaatgtattttatctgcctgctgctacaaagcaggccaaggacatgcacagaagtggctgagtgcaagtgcatcctgtttttggtttttgtttttttgtttgtttgtttgtttgtttttgagacagggtatccttgtgtagccctggctgtcctggaactcactctgtagaccaggctggcctcaaactcagagatccacctgcctctgcctctgcctcctgagtgctgggatcgaaggcgtgcgccaccaccacctggcaaacacattcttaggagcagagtttgttgtaaattcatttgcatggaggattatggtgacgactgccaggctcggcgtctggggtaggaactaaggtgcttagtattattctggcatctttttggtgcttctcacaatcaaaaatggaagattagttatgattttttcctgatgaagaaaagaatcaattattattacctcaagtgacagcaaattttagagggggaggggcatctttaatataatttcttacagaattttcttacagaaaataaattctgacagaattttctcctaaatcactctgagataaaaagctgtcaaatccagaaacttctgcctgctatcccagtccaatgtgtaaatgctgtctgccccagctgggcctctgtaaagatcacagctatctgctagttgttaggctgtttgtccaatgccatgctgccacgagaggctgtggacaatggcctcacacaacacactgtttacatctgtctaatgctctggctgaaaacaactcagcccacgacatgaggagtcgagggaagtctgagaataattgaatgtttgtaaaaattcaatcttcaaaacccctcagctctgtcttcatcttgcctccattcaacttgggctgaaatcgtcaaggatttcttcagcaagctgctgaagaaatgcatgacactcccacacttgggtgagttcttatcaagattaaagaacctcttgtctcatttctctgcatatctgagaaatcaaaccatgagactgcagactacagcacattccaaagtggcatgctagccatagcgtccttctcggtgttggtttttaaaaggcaatggtaactaactcttatgaaaagcttaccgtctatcagcccttctcttaatgctttgtgtgtgctattttatttaatactccacctgggttcacaggtagcattaccatctccatgaactgggcatctcatctcctgactggacactgcggacagctactctttatacaaccaaatcccattacttgcaggaagaaacacaaagggtattcaaagaaattaaatttgacagacagatgtagatttgaacctacaaacccttcaacacacaaaataaaggtgtgcacacccccagctacacatgtgtgtgtgtgcacacgcacatttgaggtgggctacataactgccaagcccaaacatgcctatggcttgtgatctctctagttaaagaacctggaagcagggcactttacatataaaattaagttaaaaatcttagcatggggcagggatcatagcagatttttcaagtggttccaatgtaatcacaggtcttccaagaacacaggagtcttgtgtggaaggagtggcacttgagagaggggagagaacaagaagggagagtggctggctttgaagacacaagaacggcatgtggtggtttggatgacaaaggtctctatgagctactatctgaaagctgaggtagtgccattgttggaggtgtggccttgttggagcaggtgtgtcacaggagggtgggctttggagtttcaaatgctcaagcaaggcccagtgtctctctctcttcctgcttcatgaggatccagatgtagaactctgctccttctccagcaccatgtctgtctgcacgctgccatgctaccctctgtggtgaaaatgggctgaatccccggactgtaattacagccagccccagttaaatgcttccctttgtaagagttgctgtggtcatggtgtctcttcacagcaaaagaaaccctaactaagatggggcccatgagacaaggcatgcaaaggcctctagaagacacacaggactaggaaatgaatacagccaacagcctccagagggcatgtacccctgccttgtcctgatgttaacctttcaccccacatgtgtgtgatggtgaatttggacatttttagacactgcggtgtcagtgaaccgggaagtaagacaattatgaaggacctgcctgttgcccaaccactgaaccagttttcccctgcaacccctcctgagtggtggaggagtctctctggtcagcatgttccccagcactacctcacacaggcttagtcgctctgctcccatccaccagcaaagatcactaagcatcaggtatttaagaagccagtggactccggggcaacctgtgctgtctggagacgcttgaatctcccacactgtcccctacaactccctggggcaatgtgtcagcaacttcaaacacagaagaagttggcttaaagcaaagagtcttacactcatatttctgtcttactttgtccttaggagatgtgggaatcagcaggataagtaagagctcggctgctcaataatccttctgacaatgtttccttgtatacttgcgcgcgcacacgcgcacacacacacacgcacacacacgcacacacacacacacacacacctctaatattttcttagaggtttatctgactctacttgtctggggtgctgtgttggctaacccaggctgtcaacttgacacaccagggaagaaccctaagttgaagaattccctccaccagattggcccatgggctcttgtgggtggggcgttttcttgattgctaattgatgtggaagggccccgcccactgtagctgacaccatcgaaaggcaagcagaccaggatatataagagaggtagctagctgtgcaagccggagagagcaaggcagtaagcagacttcctccatggtctctacatcagtttctggcttctgccttggtgctcctccatgacgggctgtaaaccctttcttcactcaggttgtttttcggtcagtgcttcatcacagcgccaaataaggaaggtggaactctctctctctctctctctctctctctctctctctctctccctctctccctccctgtaatgtttgcatggttgttttgtctatatgtgtctctgtgaccatgtgtgtgcctggtgccctcagaggccagaaaagagcattggatctcctggagttacagatagtcatgagcagtcatgtgtgtgctgggagagcagtcagggctcttaaccacagagcatctctccagccactacattgctttatttttctaatgtgtgctatagacataagtatgtgcatgcatgtgtggtgtcgaaggcggggcttaaaagagtccatgcatgtttgcccgcgtgtgaactactggggttttctagacaaaagaaaaggaaggagggagtagggaggctgacgtagtagcgtgaggaggatggggtagggagaacaggcgattaatttcagagccagcagcttggaagacactaaaacactctcacctgctgagaccagggtccccatgtttctccttccttcttttagaacattcggtattgatctgctctgtcaaactggaaggcttgtcgagaaaactatgttgacctaattgttctgcttggtgacctagttcatccgtgaagtcggctaagtgtcagcactgcactgagggccacaggagaacgactgcagatcctgaaaacgcccataacttatactcaaatgtgtaaggtctccttcaatcttacgtgaaaaaaaaattgctaaaattacactggtcacatttatcttaattatttgttgtccaaatatagttttaaatagtgcgactaaagcagaaagcattttgattagtaaatactcaattctatcaggatgtggggggggtgtgcgcgcgcgcgtgtgcgtgtgcgtgcaactgtaggtgttgcaccaccagttccagccatgtgttttgagcagggtctctcacctgtctagaactaacccaggaggccaggttgtctggccagggatccctatgcttccccagctctggaattacaaatgtttgccaccatgcccagcttttcacattggttctgggagctgaactcaggtgccaatacttgggtggcaagaactatagcaacagagccatgctaccaggttgatgcagggtttggaagcaaagccctccctgctgacaaccaatgttgcactccatttcatttttaaaagacatgctaagaaaacaagatccaatcaccctagactttcagggattagaaagcacgtgtctctactaacaaaaaccaaacctttacagttttaaaataccagaggattagcaatttttttggaaatactccacaaatacaacaaggtacttttatagaaaattggtttggtgcttaacataaaagtaggtagctacccttcaaaaagaagagaaaaacttttcaagatttctattttatatttaagcctatcactgtgggtattagaacacggctggctaccatttaatgagcaccagaactgtcaattttaataactgcatgacaatctgtaagttggtatgtctctgaatatcaactatgcacctgttaatacagctaaaaatagagaccagctattccccgtatttagagcaatagtgttatcttacaatacttgacacaatactatcaaaaatgacataagcataattctgacttaaaaacacgagccaacgtgcacagacactctccaccagctgttgcaccttaagcaaaatctaaacactgcattccaatcactcatcatctcacaaggtcatttggagatctgggtgtggagcttggtggtcagctgagcacccgagcaccacacgcagaggacctgggtttaattcccaggaccacaaagaaagtctttaagccaaacagtctgccagaacccaaagactatgacacgaacatccaagacagactgcagagcactggctaagacgcacatttgatccactgtgatctaagtgtccctcagttcaacacaggacatgaataacgtggctaacatgaataacacccacttatcatacagccagtaagaagcacttgtacaacggcctattgaaatccagacttaatcctttcacggtatttcaaatgcaaaatggagaagaaaggaaacaagtctacttccgagtactgaaagttaagggatacctcttccacgaagctgtctttcttctccagcatctcccgtaaggtctggaggattttaatgcacagtttttcttctttctccattagtttctttgtgtgattaatcagcctgaaagcaaaacatgaaaccttaaaagggacaccaatttctcatccaaacgtacacggtatgctgcgtgggagtgggggacagtgctgaaggcacaaggtaaatcagacacgtaatgccaaaggtctctaaagcttgtagacctcgctgcggtgtttatgtatctcagtgctgcccggcctcagcgagctctttggggggctatgacactctgggaaacagggaaacaccaatgttcccctttgctagtttaaaaagatttaaagcatactttacgtcatcatgtcatttattattttctattcattgtatcacattaattggaatatcatggatgtaggtgataccacagtttagtgggctttcccccattctctcggtaacgccatgtatgatacggtattgcttggtagatgtgagcggctgctgcgattagaagggacaagtgtagcatcaagacagcttgaccattgctgtaactcagacacaggaacggctccttccccgactgtgttgaagcacgcagtgtggctctcgaagactttcagtaccgtgggtggagccatcctgagagtcagtatcaagtggaacgtttatgattaggatatgtaactcagttcccatagactgggttgttaagaaactgaccctcccctgaccctgtgagacacgtcttcctagaggaacagcgtgatgcagaccaaagggaattatggtttcccgtgacacggcaagagcagcatgggtttataagtctccatttagagtgagtgccacgggatgtcactgagaagccatttcctctggctgatgaccagctaatgtcctcagccatcagggtggaggacctcctcactgctcatcctctccacaagccacaatcgggctacataactgtttgctgaggagaaaggagcctctcacagataacacaatttgcttccagttacacagtcctaatgaggaaagcaggaaatagatttcctagcccaatcccctgtaagtgctgccattcaccaaacaatctctggggcttcaggacacagtcctgcacacaacaggctgaacatagccatctgacatgacgagagctactaaaatgtaaacagaggtactggcaaaaaaaaaaaaaaaaaaaaaaaaaaaaaaaaaaaaaaaaaataaaacactgattggctgattggccaggcaggaagtataggggggactaggagatgaagagaattctgggaaacgtaggcagatggagtcgccatgtgagccctggaagagaggatgtaccaggctttctcgggtaagccaagaccatggggaaatacacggatgaatagaaatgggttaataattgaggcagagctagccaataagaatctctagtcactggccaaaattttataattaatatagcatctgtgtgttatttgggagctaaagcagttgtgggagaaggccggacaaaaatctcttgtaacacttgagttagaagatgttggacgggggaagggcaagaaatcaactctgaccaggaggcaatgtagacaaaccacgcaggtgggaggctggaagccatgtcaaaaaaatggtaaataaataaagaaggggtggagcttggactaaagagccttgagtgtgggtctgacatgggggataccagagtgtgtgcacactgtcccagaaattgtcctcactgtgagaaaggtactttgttttttttttttttttattttttcctaagccgtgtctttatattagcctctgccgacacagacttgatttccatccgtgggtctccattccaacgtctaaaaaacacagattctctttcacaagagcagatgaggatttaagtggacctaaaccagctgcctggcaggtgactggaccgattctctcatcccacagcatgtgactcagcagagtccaagtccttccctgaggctgtccccacccactcctgtgagcccatccggtctctggaggaaggagggaaactgattccactttgctgtggcttcattggcgtgccgggcacagcagtgccagggtgtggcgtggctagtaacagaactgagttctaggtttctagctatgcttgcaaatgacactcttggctcttcagagagatgggcagggtggggttagcagggacaatagtcaagctaagactctggccatgcactctgcctggttcagagggaaccagaactgatacactgcagcttctttagtcagttcccgccctcaccctcaccgtcaccctcacagtctagacctctgctatccagcaggactctagtgtagaactggtagatattagccacgtagagccatggagtgttagagctgtaactgagggggtggggtggtatctcattttaacccatctaaattttaattaatgtgactttgtgtgggtcatctgtccagggagttttctggcaaggatcagaaggtgggtgttctggactgctgcagccctctctcttccaccagaaaggtccctggtctggctccacttactttgacataaaggcgccacatcttatcctggcatcgctcccctccgggaacagcagctccggactgtagagcacgtcgactagcacggagaactcggcctgcatcatggggctgaactgctgctccagggatgcgacgacatcctgagacaaggcacagaggacccacatgagtgcctctcaagatggggctcgcgtaaggacattaaccagaaaggagacgcggccgttctgtgccagatgaaccctggcttcccacaacaccaaatgtttgctgtttacactcaacacaatctggtttcattcattcatattctctctgtgtgtctctctctgtctgtgtctctctgtctctgtgtatgtatatgtgtgtgtgttaaagattttttaaactatgtacatacgaggggaagggtatatagacatgagtgtgggtacccagaagagggtgtcagacgccctgaagctgaattctcgggcagttgtgagtggcctgggatccaaactcacattctctggggagcagtgtaagctcttaacccctgggctgtctccagccttacacattcttttaaatcaattcacaaggtaatggattggtaggtaacagtcaggcttctgagagtacatgagtaagagggagaaacagtgaaaccacttcacacactgtgtaaggagacaacttggagtggaccaggggtgcatatgagcaaccgctaaacatttcctatgtgtccctggtcacccagagctaagcatcttgtccagtagaaacactcactgatatgttactcaaagatatgagcttactgtgcatggtttaaggacattcaatactatttcaaattatatttattgataggtctgattggccacatgtctaacagtttcttttcatcccatccttgctaaaaaggaatctgggtgctatttccgaatcaggcgaaaatactctcacggagatgagccccctcactcagcatcaaggctgagggcttataatggccagggtcactctactttgtctgaggagaacattgcacagccctgaccagggagacatgttaagtcctaagtagaaagccaagatctattcagctctacaaaccttgcctagagatctagccaatgggtagacacgatgccaggttcctaagagacccaacatgcttcgttttccaggcctccaatcatcctcctgatgacagttaaaaggacaaagattctgtaaaggggcatgttcgtcatacaaaggggtgacgcttatcagagatggccaagctctggtgaaaccagtctgatttattatctattaacttccgccattggacaagcgacactctgacttgaggtgaagtcctccttccctctgagaatcagaattgccccacatgacatcatgacaccagtaccatctaggtttgctgcgggatttaaagcaagttctaaggacaatccttgatgcacactgcccccttcatttcagatggcagccccattattacagagcatgcatgagtcatgaatatcaccttcctattacatgggtggcctcttttccaccccaatctaactgctctacatgggacacacctttccatggccaccttcccctggattctgtgacaccatacttaattttccgctggagtcctgacccttcactaagccctgttggatcatggtccttttcctgctccagctacgtctcctgctgagactgctcatccagctctgtgggctctccctctttgtgcacgctagaacacccagggttgatatttccacacctctccagactcacatacccagctatctggccggcagccctacttcggcatcagcagaggcatctcaaacttagaatcccccaacagacctccaattctaagtccccacaagcttcctctctcccactgtctcctgccttagcccaggataaactcacatctaactaggggtgatccttgacccctctttccatggccccacaattcacccacccatctaccagaaaacacgtcccgaaaactatctgcttctctccaacgcagtttctgccttatttgtttaagattttgtttttaattgtgtctgtctgtctgtctgtctgtctctgtatgtgggcacatctgtgtgcaggtgcccatggaggccagaggtgctgtctcccatggagctgaagttgcaattggtgggagccacccaaggttaagtgctgagtcggactctggtcctcagcaggagaggagcacagtccccctctgcaggaatccccattcctatcacacttacagtggattccaactatcatgccagggtgtacaacaaatgccatgagctgaatggcttacagatggcagtttggttttcacaacttgggagttaggaatccaagaataagaaattagcagtttttatgcctatttcttggttcatgcagggtccatgtcacagtgtccccatgtggtagaaaggacaaacacaccactttcgggctacagtataagggaactaaccacattcatggggcccacctgcaagaactaattacccccaaatctaacctcagaatacagtcacatgtgacttaacctggagacaagacctactaacatagcatgagggcaaaatgagttcacatgagccaccagggtggtggtcacacaagggacagaaatggggacacaggtgtacatctgcacagaggaaagacccaggagaagcaggccatccacagtcgggaatggcagtttcagaggaaaccaaaccacactgataccaagatcggagactcccacctccagagacataagagaatacatttctgccatttgaagaatcctgcctatggtgttttgttgtggctgtcccagaaaatgaaagccacatgtcattggctcactgatcctaaacatacaggccagactacggatgaagacttgcaaaagggccacacaaggacctggtgaagagaaggacgggctgattttggcccaagggatataagggaacacacctgaagataaactgggtcaacactattaaaacctaatttatcacatgtgtcttttacagtaggttatttttactaactttattactgacattataattgtcttgcgatcaatggccactactcactcagaaaccaccagaacatgttgttatataactcattaagaagtaagtcaggacaatctgtccataaactgctaacgaggaggtggtggcagagagctacagaagaaagctttgccccaggaagaactggatattttcaaccatattgtatcacatgacacatttcaatgatacagaagctagaaaagagtaatgtctcttaatgtcctcattgtacctgtaacttctcgataatgtttctgtaatcccatgctggccctccaagagcttccttgaaccgaggtccagatcgagctgagagcctccagcccatggccgccctctgcaccgtacttgaatggttcttcatgaagagtgtgttaacctggccatccaaatccactgggattgcaataccacgatttttggctgaaatgaaaagaatagaaaaaaatatgggaagaatttccctctcaatttggttaaagcttttaaacattagccaaacacactaacaaacatggaagaaaattttcttttttaagaaagaaagaacaaatgcaagaaaggcctaactctttaaactttgccacaccatcgtctcccatactttcaggttaaaagctgctgaagctatttcagttcttcaggccaattagcaatgtgtgatcactgcaccttcaaaatcccttttgatttcttggtgattaatgtgtgagatggactcatttcaacatcgatataaaaaagcacctcaacaagcacacagatctttaccttcctagatgccaaagaaaataaaaactcagacagaaaacacacagccaaatccttccaagctgttaacttcattaaagggtgtacctgtatgtttacatgtgtatgtgtgtgtgcccacaaaactacatatgatcaaacacctgacagcagaaatagtgaaaaagttaaaaggtatctttaaaaaaccttcctgggaaggtggtacatggagcctgtcttttttccttaagacccacggacatatgcatcataacagatttatgtagccataatattgagcaatgactatgctccttgtcaagaggaaaatggaagtgttgcagcattcctaccagagtaaagcagtaactacaccattggagaaaaactgacccatgaacgattggacttggtacaggtctacccagtggccttggctacgctgggaactacactggtatcatctgagctactcaagaagcaacctgaatcatgggagaagaaggtcctcctccctctgactagcaaactcaaaagtctgatgcagctgttttcacccagaggaaaaagttggagaagcataaaaactcctctcaagaaagaaggttctgtgactgtagagtgtcaacagtgaagacttgcagagaaggattctgactgtagagtgtcaatggtgaagacttgcagagaagcagaacagagcttgacatgactgcaaagaccataagatgaagagtacgtggagaggcacatgggggtaggcccagcacaggaggaaatgcatggagattccagccagcaagaaaatccccctaacactcactgctgttccctgtctgtctcacaaatgcacacacatgtgcacacacatgtacatgtacacacaatacacagatgcgtgcacacaaagggaaggttcctatgtcatctgcccagcccttctcatagaattccaggtcaacctttcttacttctgcaaggcttacaggccaggaatagaccttccaaactgccagccccctgtgtcagtcattacccatgaccacacaaagacccagggatgacaaataaaaccattagcaccaagaacaatgacctcaactgaaaacaaatgttccacggacaaataagcaatatttaattctaattattgtccatacaaactttgagtagacaccacacctaaaaacgcttaaagagagggaaaaacgatcttggaaattaaatcatgactctaaaaataaacctttcaaagattaaatgaaaaggatgagaacaaaagtggtgagctggaaaaaggaagccaatgaatcatctagaacacaaaacataaaagaataaatggggaaataaagaggttgtgaaatagggagggccaatacaggaagatacagacctgacgaatgaaagttataaaaggcagtaaatgacacattggttataaaaaattaagaaaataatgagggtctggagggatggctcagtgattaagagccctggctgctcttgctggctggggtttggttcccagcacccacattgcagtttacaactgcctgtaactccagttcctgtggatctgatgccctcttatggccactcaaggcactgcatgcctgggatgcacatacagagaagcagatacacatctgtacacataacaaatcaaaataaacatttttaaagagaaatttcttgtgtctggagcagggcgtcaagtctctgaataaaggacacagtggttgtgaatgagattaaataagcacagagctttacattctggtgaaactgtggaatgttgtcaagctgaactacattttccaaagcaaaccttgatgtctgagttgtcagcacctggaaatgtggcctgatttggttacacgtgtcatcaagatggaggtcatcctgaattaggctctgctctagtccacattgactgttccatatcagagaataaaggggggcacagagggagaaacaccatgtaaaggtggaagagagacagattacgagctacaagccaatggtgccaacagctgtcagcaaatagcatagctaacagaaaggtcagagccagtcagttcctggagctgccaccaacacctgactgtgtagagagcttggtgccaccaacacctgactgtgagactatgaccctccagaagtgtaacccacatgtctctatggagcaactgagaatggcaacttgtgatggaacaaatgaattcaaagccaggtgagcacaaaaagcctaagagtgctaagagagaagagagatgcctgcaaagatcaagctggaagctgaattcctgtctgcagggctggatgctggaagggtggagtggaccacctgcccgtgtaaagatggagtgaccgcctgcccgtggaagaatggaatggaccgcctgccgacggacaaaaggttttgacagcagtaacctgtacaaaatttaactgaaactcaaatgccatcccccaataagaacattccagaacagatgcctgagaaacttttctctgaaactcctgtgcacagattatataaaacaaaagagagaaaagaatccaagacagtgtcaaatgaatagcagaaactatggcaactcagtctgagcttgagtaggagaacagggctaggaacaaacaaaagatgatttctcatgatgtgtacagcctagagcctccttcatcgaaaaaagtttagtcccatagacctcatttttgttgcaaatagttacacatttacacatcacaatttataaggtccaatgcagaagaattaatcatattccaaaatggaacacaaatcacagacatggaagccagtactacatccaacaagaagcagggagaaaaggagtgtagaggcaggatggggcttccttatgacgtcatggagctgttcagtcaagaaacacacacccacagaccctgtcagagttggtgacaggcaccagaagatgtgttctcaatctaaagataggaagaaagaacgtgaaagagaaggagggacagacagaggaaagggggaggggagaggaaagggggagaggaggagggacagacagaggaaagggggaggggaggaggaaaagaagatggaaggtgaagaaagataagggaaggggaaggaaagaggggagaatagggagacagaggctatagacagaaggggagcaagacagagaaaggggagggggagagaagtgagaggagagggaggaggggcgggatagaagagaggacccagtgaggaaagaggggtgaggaagagatggggaagggtagcctggaaaagagagagagagacaaaaccagactttcctgcacacagtgaggaaaatactagaccagactgttctgctgatgaaaattccccaccagaaagcacaactgaacacctctttaaaacaagtgatttctgctgccaacacagagcctggaaccaactgaaatacaagtcccagctgaaggcttcagaacgcaggcagctgggaacagccccctgacctagagggggctgcccagatcctaaaacagactcctgctgcccctgaccaatttccctttgaagcaagcagtgtctgtgcacatcccttatgcacccacgccgcaccgaggcgccctgaaggacaggcagcctccacactgctgagcaacgcatggttttatagactcttaatcttcctccacggccaaactgagacttctgttctttaccggctgtctcccacatgagcagcatttgctttgaacgtcctgaacacaggacggtgctgcttcagggtcactgcccaaccagtcctagagctcttcactgtcctcacaacatactacaaacagttgtcacctctgctcaagccacacacttatagtcccggcatgagccggatgcttcaggtggcagccacagtcaaaggacagtttgagaacacagcaggtagggctggagaagtggccgggtggtcacgtgtacatatttccagaggatctgagttcacttctcagagccgtgttgtcttcttctggcctctgtggtctgcacacatgtgcacagacccacacgcaagacacacatagatacacacgatttaaaacaacaataataaaatggtttttaaatagtgtgacatgcagggaaacgctggaggaataatttctgatgacgagcatgggaatttattcagtgatgagccctagtctcctgtgtgagtggttgcacacggcaatgtatgtccacccgtgatccacctatgagctgctgttccactatggtggcacacggagagatagcagaacaaactccaccatcctaaagtgtcaggtttttctgctccccaatctatacaactattgttgacctggtgtcctatcttggcatgcactgcagagtatgaattccaggtaaaataggaaatttcccaggctgagatgtaaactgtagcctatggttacatcatgactttgaagccataaaagaagattaactctgcgtctgagcagaatgcatttgagttaaaataaggtaagtgttcacacaacaatgaacaaacattgtaagggttgggaacacatctctgtggtaggacacgtgcccagcatgcacgaagctcttggttcacttcccagtacctcatgacaacaacaaattaaactaaaaataaacaaactctacaaacatggccttctgaaataggttctctgctctgtcaaaatgatagaggtattaatttgaaatcaaacagacaatgctgagttaagatgtccataggttgtttaaagggcaccaggggtgggggtagggggtccgaaaggaatgatgagcttggggaaagcatttgttttatcttgtttacacgagtgttaactatgaaagcatcattttcaggtcaaaaccgtgatccaaactgagttaaatgccatcaagctagaaacattctgggacctgtggtgtatacacagcaggctaaatccccacagttaacagcatcaaacagctagtggacctgctatgcccagacactcttcatgcctgcggcgtgtaatcagggtcacatgaaagttcttacaaacaagtgtccctcctctgcctctgagttagaactactgccttgttaaggacatgtcaccagaggacaggcgcccgagtccctaaggaacacgtgggagagaagaggtggctgcccatgcactttgctttgggggacctctgtctggagaaaaacgacttctaaaaaaacccaagcgacctttactaacaggtatttttattgcatggctaacctcctaattagacttataaatcctaaaactttcctggacatggcaagtcttttcaggggctctaagatgtaataaaaaaactatttctatttatacctcattaaatattgtgtgttgtgtgaatatttttaattagctggagtaactgatggtgtctgccagaccaaaccctctgaaaacacacataactccatgataggtgccacggaagaaaatgcttggatatgcacactgacaggcatgaggagaggtgagcagaaagagttagcattaattaggaaaattcggctggctgtcagcccagcagaaccagaacagctggagctgccggatgacgatgtgggcagaagcctcacctgctcttcagcaaacccaagtcccgctgataaatctgcatgcgtgcgtgcgtgcgtgcgtgcgtgcgtgcctgcgtgtttgtgtgtgtgtgtgtgtgtgtgtgtgtgtgtgtgtgtgtgtgtgtgcgcactcgagcgcgcacgtgcgtgcacagggttttcacgaaaaaggaatgtaatggttatagtaaattacaggactcaggcaattaacaggtaattatcaataaacaatttaaccacaaaagcttggattcccacctcccacttgtcaacaataaaagcttagtagtcctgcatgccactggaaagagagtctacagggagctgcagatgcagaggccagaagacaactttgcctctatttcctcggactccagctcatttttgtatgtagggtctctcactagcctggaatttggcaagtaggccaggctggctggccagtaagccccaggggcacactgatctctgcctcccgggaagtaggtttacaggcacgtgccagtgtcaacttttttttttttaatacgacattagaggttgaactcaggacctcttgcatgtgtttcacttactgagctatttccccaggccactggagtttttaaatagggacaaggttgagtatagacataagcttcctgtgtggaactcagctctactactcggatgccccattagtcctcgacttgaacaaagctatacgtcttacgttccctcaagaaggacctggctagtcatctggaaagacaaagatgagtgcacaccacgaaagctgtaagtacgtgtgttgtaggtatctcaaagcgtgtctctctccctccctccctccatctcccccccttccttcattttcctctctgtgagacaggaggaactcacaataagatgtccccagtctcctgagtgcagaggttaaagcatgggccaccatgctcacttccagggagcacaaggcttttcatagtaacgcccaaaaggtgcagacgatcagaatatgagaattctctgagaattaaggcacaactcagactgacagaagctattctgaaaatgaaattaaacctcaaaagaagtgggttgggacaatagcttagccaggaaagcataatgtgtgacaagcatgaatgtctgagtactgtagcccagaacaagtcaagtatggtggtgtacacgcataaccccaccacgggggacagagacaggaggacccctgggcttactggtcagcccgcctaacctacttggcaagttccagactggtggagaacctctctcaaagacaagttaccctctgacctccacacacctgctcacacatgtgcaaacactcacacagaactaaaaagccccagaagaattataaattcctcatgctagaagaaaaaaaattccaatgaaaattaaagaaaactggttaccaaacaaagagctcatttcctaatatgtaatggttggactcaaatcacaggatggaactggtcacagaaaaggaaataccaatggctcaattgtatggaatggttttcttccccacgaacagaagagaaaaaacacattaaaactctgacaatagttttactaagagtgacaaaatccaaacacgatgttaaggagaaaggcattctctggctttgctgctggttaaggacaccgccagggtagccattttcataacaaagaagggccactcaccggcattaactttattcctccatgttggagatgactgcaaacatcagatgtttgcaaataggatgaggttgggttagcatcacacaaaaggacatgtctctgcgtcgtgcactttaatgttgcaaatgtcacagactctccacctgcgtgttctgagtgccatgaaaggctctagaattttctaacagatagggcccccagccttacacttttttctgctttctttacgtggtctgtctacctctaacaccctagaaactcagacctaggaaatgtgttcagtagaggggatttacttcagctacaataataccttccagataacaaggaatcattaaacaatcagttacattaatatgtgaaaaatgtttataaaatagttgctatgttataacttattgcaaattaactgtttcgtaacacagtggagttcacggaggtgattttgttttgattcagcatttggtttcctgggcctctcttctgcattgttcaggacagaaacctgctcacaggaggcaagcactccacccctgagctaacatcaaactccttaaactcccactacaatgcccccaggggattaaaatagacatttatttaattcggactttctaaagggttaatggtttttacattgctttctttttaaggatggctggcttgaagtttgttcactaggcaaaaccatttgtaaaaggcatttcatgcgatttccacgtggaaagtcaatagtgtggccaaccaactacccaatgttaatctctgcaggtcacacgccaattatgagacacatgggcagaattctttcccaagtgaaatgatacagaagtcattcatagacgcgtttgctggaagccttcctgccatgtgtttttcaggagtaaatcgaggaacagcatctaaccaagtgcatctagagatcccaggccttgacattcctccacatattcagcaagggcttaccgctcccagggaaggaagggatgacttaatgagtgcccctgctttcttcttgcagctcttacactgagtgcataggactggaagatgatgaagtgtttttgataataggtttagctaatagcactagagagcacttgagaaacaggtgctccacacacgtaaactataatggatatctgcatttacgaggaatgtgcttaccgattcccaaatgctttataaacatatcatctcccccaatcttgtcatatttcacagatatattattctctattctcctaaatattgtgcattcttaaatgtttgagttgtgccagatttcagtgttgctatgcattttgaaaggaagcagaaatagaaatgactgtgtatgtggcagcaaagcttcacatgggtaccacgggggctgaacttcacgggagtcactcttgtagactgcctgatgtctcaggagacctgacctaaccagaggggtgttcactgagctcaggaacaggtcagttcccaagagagatgagagactcccagcaaccagctgtgacacactgtggaactgtgacacactgtgggtgtccctccccgctttcccgttgtacagaaacagctggcccattctgtgccctgcctccaccttccccagacccttgctctccaaagtcccaaccttcacgcaagtcataggaatagtcattctgttgatgaagagatgccagatcctagaatggcatacaggttaatttgacctttgtctcaaacttgttgtcatgttgcgttttgatacgagcctaggtgacgtcaccatagtccatagaccatcataagtcaacacatgcctattgtgacggttaacgtctcattgttaacaggacttagaaacactagaaaacacatttgggtgtgtttccagagatgtttaagaaagaacagacccacgctgcacagggtggcacagcctgtcaactgggatccccaaatgaataaacaggaagtgggctgggcaccaacatcctctcctctctctctctctctctctctctctctctctctctctctgcctcctggctgtgcgtgcaaggtgaccagtggccacagctagagacacacttatcaccaggccattcccactacaatgggccgtacacgtaaaacaccaggcaaagacacaccgtgccatttctgtctgaagttgttcttatcaagcattctatcacagtgatgagaaagtaacaaatatatttattatcctgcttatcagaagtaggtttgcaggccccgatgacaaattattatatatattattataaagtccctgtttacagagtctccattccaaatgaggaaaacagcaaaaaagtgagaaacaagagatttcaaacagtgacgagaagcaggaaggaaagcgtgagaggtgaagatggtgtgtgcacatgattgtactatatgactgaacataaactctgaagacatgatagcatggctgatgtgacatgggacacagtgatgtgtgaagagctacgatataaaaatatgaagtgatctgatatatggagatgtaatacgatctgagatatgctatgattgaaaggcacactgtgatatggtaatatgattgtgatgtacagggcgatagggtagcatgaaattatatgatacacgcgtgtatgaaaatacatgatcgacaagacgatgaaaaatgctggcatgaagacatcatgacataactggatgatatgatgggatggtatgacatagtgataagctactatgacacgatggtatataacatgatgtgacatgatgctgtaggacatgaagatttgacttacgatgctgatgtaatatgatatggtgatgtatgatactgaggtgatatatatgacggtatgtgatacatgatatcacatgatatgatgacaatatggaatggtatagttgtataatgccatgatatgatataatctataattaaatgacatatataataacattatatattaaatgatggtacaatacgaagatatgataatatattattgactgatatgctacaatgcaatggtgtgatgtgatacaatgatacaaaatgaaattatatgacataatatatgatatatgatgatatatgacatgatggtatatatgatatatgatgatatatgacatgacggtatatatgatatatgatgacatatgacatgacggtatatatgatatatgatgacatatgacatgacggtatatatgatatatgatgacatatgacatgacggtatatatgatatatgatgacatatgacatgacggtatatatgatatatgatgacatatgacatgacggtatatatgatatatgatgacatatgacatgacggtatatatgatatatgatgacatatgacatgacggtatatatgatatatgatgacatatgacatgacggtatatatgatatatgatgacatatgacatgacggtatatatgatatatgatgacatatgacatgacggtatatatgatatatgatgacatatgacatgacggtatatatgatatatgatgacatatgacatgacggtatatatgatatatgatgacatatgacatgacggtatatatgatatatgatgacatatgacatgacggtatatatgatatatgatgacatatgacatgacggtatatatgatatatgatgacatatgacatgacggtatatatgatatatgatgacatatgacatgacggtatatatgatatatgatgacatatgacatgacggtatatatgatatatgatgacatatgacatgacggtatatatgatatatgatgacatatgacatgacggtatatatgatatatgatgacatatgacatgacggtatatatgatatatgatgatatatgacatgacggtatacataatacaatatgatgaggtgatgtatgagatggcaatacaatatgtaacacatagcaatgcaatgtgatattatacaacaatatgaaatagtacaatatatgaaatcatgagatataattgaattatatataatgatacaatataacatgatgtgaaaccatgaagacattatatattattgaacggtatgctacaatatgatggggtgatatgacacgatgctataaatgaaatgatatgtgataatgctataatatgccatatgatgatatgacattatatgtggtgtgatggtgtgataatatgaagatggtatggtgtatgaccgtgtgtgacatcagcttcctatggatgtcttttttaggatttattttatttttaacaactgtgtgtgtgtgtgtgtgtgtgtgtgtgtgtgtgtgtgtgtgtgtgtgagtttgtacgtgttactgcagtgcccatgggggccagaagaggacgtgtgatctcctgaagctggggttataaactgttgaaagtgaccagatatgggtggtgggagcagtgcccaggtcctctgcaaaacacgctcttaactcctgagccatatttatgcgtgtggtgacctaagctacaatcaaataaagatcacaaggggagtatgaacagtgaggagagcccatcgtggagatgaaggaaagaaatggcttttgtgaagaaattttaacagaaatattttttgttatttgagatggggtttcgtgtagcccataatatatagtgtaggctcgacttaaactcctgatcctcctgtctccctcacaaatgatgggatcacaggtatgtcctaccacagacaggggttgtagagtgtaagacagaggggtcaacagaagaggaaggtgaaggtcggcctcgagagataaaacagacgcggtgccaaagcttgactctgcttcgcttcctcagctgacgatttggatagaattgttttaagattttttatcacacgtgatctttgaatacacaaaaacaaaaaggagccaagtttttctgaaaaaccactcagctttggctactgcaaaatgaaatcttaaaaataagccgggtgttggtggcacacgcctttaatcccagcactcgggaggcagaggcaggtggatctctgtgagttcaagaccagcttggtctgtaagagcgagttccaggacaacctccaaagccacagagaaaccctgtctcaaaaaaacaataaataaataaatatgcattaggctggtgtggtttgggtgaccatttgagctctgctatccttccatgaaggaacggatctgactacaaaccgaacccctccaggtttgatttaggtggtgagcacacatgaagttctccagctctcactcactcacccttcattagctggcttgtctgcaacaggggctctctctgtctccttgaatttgccatccccctgcatcaccctcccacggggctaggattacagtaccctgctccatgcctgacttggtctgcagtttctcaatgctgtgtgcagcactccctccctctgagggcttggtagggtatcagctcccactgcatctgctgaatgctaaaagaggaaacagaagagagaggaagagagagaaggcagagaaatctagaaatataatctctatttgcttttcctctgatgatgcattttactgattgatataattgatataattcctaatttgggaaaaaagtttactgttttattataacttggaaagcaatgtattattaaagattcagaaattatgtcaaagcatgaacaaataaaaaggctcactgatcattctagcacaaggagttgtattttacataaatacctctgaacatagtgctatgtgtatcttttaaaataaagattagagtatcattatggcttttacacattgtgtgccgagtctctccctccctgtgtgttccttcccttgcagagtctcttggttctgaagacctcagggggagcacagtgagtactgtatggaaagtggccacgatccagagcaccggagcccagaaaggagctccaagtctggacaggagggctgatgcacaggacagtcagagcttgagagtgaggaggtcatgggggccaggttcagccaggctcaggggtacaggtgaaggtcctcacacaacagagtgacgcaggatagagccagaggatcagatcaaaacaaaaccataaacacggtatagaaaacatcacttgctataccagtaacaacgctaaatgcttcagcattgacttaagaaataggagaggaataaaagaccctggagcttgtacacaaatggaggaagaaaatctcaggacaccaggagggaagggaggaaaggaagagagcttcgatgctctgcaatccaaggcagaacctcagagggatgcccaggcccaaggggcatgtgtgccaaagaaacagcacagtagagattttatttataattacttattccatgtatttataagtagaattcttatttaaaatcaattccctaggcaaactacattactattaaatgcagtagtcaccaactgatactcctagattatatctgatttttcatttctgtaaaattgctgccaccattaagtttttttttccaccattaagttttgttactataaaatctcttaggccagattgcagactaggtgaagactaaaaatattttaatgctcataattagctgaatcattgactgtccagcacatactattaaatcatatactaaactcccgaccaagatcattgtttcctgaatcctgaaatataaataaccaaagaacctatcaaaggttaaggtgtaaaagcccttgtctttggtcatggtaaatgctcagtaaacattaacagtggccaagaccatggccatgaccatgacaatgaaaacatgggatcaccagcaatcgccagatgcctttctagtttcctttttatcactattattttctacccatccaagcctatatttcttctctttcctccacttcatccataattaatctacacggctaggaagatggctcagtgcttatggtgtaagcttgagaacctgaatttgagtctccattatccacatacagccaggtgcagtggttcgcatctgtaattccgtactgctgcagtgaggtggatgccagcacccctgcagtgaggtggatgccagcacccctgcagtgaggtggatgccgcatgcaggggaaagcaacaaagaaaccttgtcctaaattaggttgaaggcaaggaatagctttgaggctgacctctgacctcaacatgtgagccatacctgcatgtgcctgcacatgcgcacacacacacacacacacacacacacacacacacacacacacacacctattatgcacaaaattatataataatacaaaactacgtaaggcatgactttgcacagggggagaatctatgagagtttttaggctcacttccccttagtttaaatcccttgtctccattcatgtataatgtcgaagccttcagtgtataacaggcctttgaatgattcagatttcacacaaattacaatgctaaacaaaaactcaaaaacgcctgttgccacaaaaagttattaacaacatcaggctcttactaataacttggcttattatttattattaattatttgttattaaataaatttaattggttccacaattaaaagtaagataaccagttaaaccactcttacaaaatcctactaagccatatttgaagtagaacactactttgaaatttggaaacaggaatatacttttctcccaaaactgccatgttgagaaccagttgctgaacgtcggcctccaacttaaacaacaaacaacaaattgcctggctttacttcttcgtgaggtctagattgggaagctgcttgaacggctctcagccccaaccccagttactccaggaaatgtgtatctgagtcagcgcagaccccactcacccacttcagccagcgccctgatgcaggactccaccgaggccctctgggctgggttgggccaggtacagttgtagattctgaatgcagactgcagcagctggatgaagaccggctggtgtgtctgaaacagaaggcactggtcactctgtgtcactgtgccgccatccctaagtcacaccatgcctgaggagggagcagagctacaccttatagacaggaccccaaaaaataaagtaccaacagtgttgtgtgcttcaatgccacccataaacacctgactccacaaactgtcttgtgtgttacagcatgagaggaaacacgccaagcactacagaaaattggtcacttgtgttttcactatatttgtgtgtgtgtgtgtgtgtgtgtgtgtgtgtgtgtgtgtgagagagagagagagagagagagtgtgtgtatatgtgtgtgtgtgtaggctagaggctggcctcagctatcttcctctgtcactctccaccttatattggtgagcagggtttctcactgagcctgaaccctgtttggctagaccttcaggccactgagcttcacgtccacctgtcccttcaggggtccactaccacattcagtggagggaaagccaaggtcacatcttcaagatgttatccctcacaccaacagaccccaaaagagacattaaaccttagacattcggaaattcatcaaataaaaccgtgtgttgccaacttacaattcttaatgaaatgtaggtgttatgtaaagaaaaggttatttagagactaatgaccaaaagctgcacatgttcaccacacaaattttctgatactgtcgattgtgggttggcaggatctgcaggtaggaactcacggacaccgggctgagcatttgtgttctccacacaaacacaactaaatgatacttcatgtgaccctgcggagctacgctgagaatcacttttcttagccattaattttccttttgaaacacaaattttagcaagacaccccacggatacactgtaatgtgtttggctgtctccttatctgtggacatttaacgtataaaagtgcaaatacttttaagtatctataaagacttggaaaccataatatgccaacctttaggataaattactaacatgcagcagctggcccaggtgcccacccatcggaacaatcagccattatttcaacagttggcctctgcatacagttgtgaaatatcttgtagcgtatagaaagaggaaatgacctagttttaagaggtctctcaatgttggagaagagatcagctagtgggagagacggtggaaggacatggggctgtgatctttcaatctgattaaatgacgcgtaaactggattctttgctcaagcgcaaatttcaaagtgactcggaacaggcaaaatggaaaaagctaagacacataaaacacgtgaaaacagccgctaaaataaagtttggtcagggcagaagggcacaatgtggagaaatgcaagagacagcgattatcccgagtggcagaaaggacatccgagccaggtcacagcttcccggcgcggcgcgtgcggctacctggaggctggcactgttatccgaaaagggcgagttgaagaagccgctgacgatgttcatgaccgactctgtcacacacctctccaggaagacgtctgcgtgtttcctgtccgtggtggtattacagacctggagaggaagcaaagcaaagcacgcctctgcattataagttggtagcggaaccttctaagagtttcccagagttctgggcttgcagagctccttcagatggaaggatttctgtccaaacccactgtctgtggcagcttcccctccaagcctcgatatcatcccagccttcactcctccaggccgtgttaacttgctgttttctttatttttgcacgccaacctctcccttggtccacaaactagattttgatgaaaactttccactccctgagaggaagcagaagagttaagagccatcctgagtacaaagggatggatgataagaatttgtggtgagcctgggtctacacacattttgccttgtagtacctgggccccgtgaagaggcgttgagattcacatgtggtatgtcctctacgggccgatgggttcaaacacgtggtgctgttttgaacaacgtggaggcatgcccaacatttccatgtgttgccaggacaccgtcatctataaagtttaccctacacatccatgctatccacttaaagcttatgaattttgtgttcacagccacaggtcagctgcagctgtgaagcagagacttcctggagcaggtgactcattcactgacatctgggcactgaggttaaaagccccacccactttctgtcttttctctgcttcctgattggtcaaggtgtgtcaagcccaggctgcacaggtctgcccatctgctgtcacctgctgtcatgctgtcccctctatagattgcaccctcaaactgagctgaagtaagccccgcccccaagtgtcttctcaggcgtttgatcacagaaataggaaaagcaactaattcagggtagaaatggagaaataaatctaactccttcccacacttttttaaccacggcctccgcagagcaagttgagggcaagactggtactggagctggggggcagacagaccctgccgcccttgctctgattgttacatctgactaaatcgggccctttcgccaaactatttccaaatgtcagactgacaaattgcgaaagctaagagttatgattgaaaacacaggaaatatggacgcaaaacgacgaggtggggggagcagcgggtgtgagaaaagactggaaaccgaggcagacaaaggaaacaaatacagacaaagggtgagaagccagggatggcgcccatgttttcctgatgtccttgggcaacacaaatttttctgtgatttttgacttttcagtaaggtgcttcatcaaaagaacaagtggatgtggtttaatctgatgccactctacaacttttcacacaaattcataaaagggaaaacttctcttctcaaaccatgcattccggtccttctggcttggagaaccgggctgttaagtgtggaaggaaggaaggaagggtttgtttatgtcctaactccctttccatctcttcctccataaatgacacacactgacataatgttcacagaacaaaaaagggtttccatgtaactaacattgtcagaccattggggagaactgtatgatttagttaaaggaaataaattatgtctaattatggaattttgacattgtcccagcaagcaacagctactgcatgaagaagatgttcacagcagtccaacccctatccacaggggctatagcccgtgactgcagaacaagtaccaaatcctataaatcatatatataaatatgtatatatatatatatagctgaaagatatatatatatatatatatatgacaaaatttaattcacaaatgtggcccagaaatagattaataacataaattttaaaattatattacaatatgagtgaatgtaagtgaatgttttcttctctctcttctatctttcttctctctctctctctctctctctctctctctctctctctcattccattcatcttttcacttacaagaagcaccacacagatctttggcacacatgagcttccatcaccaccactctatttgggtctctgactgagtaaatcgaggatcacctggacacagccactgcagtgactgtggagaggtgacacagagctgtgacgtcactaacatttctggaatctccatctcttatttttgagcttctgacaagtgacgacatgacaagaaactctgtatgagagatgaccactgaggaagtctctgagataagtgagtcccatatatgactcttacttccgtctgcttaactttaggtttggctgtatttgtgccttacactggggattaaaatcaaacatggtcccagaactcctatcaagctgatttgtccaggacaagcatcacttaggattttacttctttctgcctcttccaaacactgaatattccttatggctaaaactgcccttttgttgagcaggtggcagaccagcgctcgcgctccaccatcagcctgcaggacctttgcccacgcagtgggggatgggatctcacactggacttactgtacatcgtgctgcactgcttggaactagacactggcaaaacaccagtgagtagagtaacggaagttacctagatgaggctgtactcaaaacctgggtaatgaaaagcctgtttcccaaaccacggggacctattcctatccaagcttgaatgaaagcatcctcactttacatcctacactggtcctactgagagtagtcagcaaatggaggaagactcttttattgttacaaccttgaaaaacttaccaggaaacaaaataaaacagaaaaaaaaaaaaactaatagtgtgttctttatccagtcttaaaatttactgttattgcctctttaataagaccaaaggttggaagtggctcaaaatgacatcacaacaaatgacctttttatgtatgagaggtgacagcagatgggcagacctgtgcagcctgggcttgacacaccttgaccaatcaggaagcagagaaaagacagaaagtgggtagggcttttaacctcagtgctcaaatctcagtgaatgagtcacctgctccaggaagtctctgcttcacagccatatctgacctagcctcccgagtgctcacctagcctcccgagtgctcacctagcccttctcacaccttttgacccacccacacctctagaatgagccttgtgtttctcactggaattaactactatacctgcaggttataattatttctgtcaatttaataatacctaaaattactttatttcatatatcttgcactgttccttggtttgctttccatctctgtgataaagaccacgaccaaaagcaacttggggaggacagggcttatttcacattgtagatcacagtccattactaacagaggtcagggtggaactcaaagcagggacctggaggcaggaactgaagcagaggccatggagggatgtgctgctgcttactggccttctctccatggcttgctcagcctgctttcttatacagctcaggactaccaggccacaggtgacaccaatcacagtgagctgggcgctcctccatcaaccactaatcagagaatgcctcagagacacgcctacaggctgctctcctggaggcatttgctcaattaagagtccctagatatatagatatgtctaggtttgtgtcaactaacacacattgtttacaggactggacatttttcatgtagccatcccagtcatgtgttctgttatgcataagcaactcaaacccaccaaaccccaaccctgccgtactgatcagcacagctaagcctagatacccgggccctgcagtacagatcaacaaagcttttaccacacccagacatccaggcactaggaggccactgtactcacaatccacattcccccagctattgctcaatctggtgtcaggtcctgaccacaaacatatggtgccaattttgtgagcatgaagaatataaaagttacagagctgaggggccttccacccagatttcaaagaaaagcctgggaaggcaggctacactgggaataaagggagggtctctacaggcgggtcctgaaatggcaatgtgtggagctgaggatgaaacctaagcctctctagacacccaagaacattagcgataccaggagcatctgttgagcaggtcacaggcacatgggctaaaatggcaaagcaatatgggtggggcctccccaccctgggaatccacagcacactaccgcttgccctgaaccagatacacagctacagaattcaatgcttgccctgctgtgtctcagtcttgctttggtaggctccttccttgctgctcctatcccaaccttatggaatggaagtatatgctctatttcactgtggaagtatgcaacattgattccacacaggctcacagctaagagtccttccttgggcctcagagaaaactctgagtttggactctggagtgacattggaactgttaatgccatggaaactctcagggatggattgagggtatcttgtgttgtgaggtgggcatgaaaggcgtgttaaactttgaatataaaatatccatctaaaaaaaaatccatccaaagtctatttgtagttggcagtagcaagcaggacccaacaggaggacataggtcacctggggttattttttgtcctctcttttttctttccctgcttccatgacttatctgtcataaggtggacagctgcttcctccacaagccctcccaactgtaatggatgaacctccaaagctgtgagctaaaataaatcctcttctaagtgctttatgccagatattgcccatggagacaaaaaacaaaaataactaaaccagtatctgacagtagaggaaggacaggcatgcagattctgggccaagcctctcagaaggcagagatgctggaatgaaagtgcccagagaagcagaacagagaccactgtcaacaggacagagagccagctgcaaggagagcaggaggctaggaagacatgaggaaggaaggcacagaaaaggtggaaagtctcggacaatctcagggaagcagggacctgatccaaccctgacacacacacacacacacacacacacacacacacacacacactcctcctcctcctcttctccctccagatgtggacagatatgacataagagttcagaactggccaaattaatggcattttagaacccacagccttggtgaaggatcagattcagggggtacaaagtacgatttgcaaatgatgccaggatgtctgtctggatgcaaagtgggagcgctggaactgcccacaacttgagaaggggcacacagataaatggaaacgtcaggtaaacatctagactcaagactctacatcagagaaggacttgggcttcagtcaacctgggatcaatatttgagagttgctgatcccaggaagcaagtgcctacagacagtgaagggaccaggtctagggtttgagtctgccatacctcaatatctggaagtgggaagataccgagagatcagtcaagtggcaggggagtggccaataaggtgaaagacacatcgacagacagacagacagacagactggctgactccgggaacacagataaaggacttaaggagctcgatcagtaaagtgcttaccttacaggcttgccttactagttcaagcctcagaatacatcttaaaaatgagaaaaaatcagcttggtatggtggcacacacatgaaaccagtgctggaggcagaaacagggaggtgcttgttcactggctggtgacagactcagtgagaaaccctgtccctaaaactaagatggatagaacctctgaagaatgataccccaggttgacctctaccctccacacagccattacacacacccctgcacacatgaacagatacacactcgggggagggggttagaactgatggactagaatggatactgccgaccacatgaagcactaagcattcagggaaggacgagaaacaacataaaactgggtctgcaaagttaccactgagcgaaaggtgccacagagggggcaaaatctacagaagacacgtctccagtccctgccacgatagcttcttgggccacataaaaagaacactttcaagtgaatcttattaatgtccattcaactttttacaaaattgccggacattggttggtgacccacacctttaatcccaacacttggaaggcagaggcaggcagatctctgtgagttcgaggccagcctggtctacagagcgagtgccaggataggctccaaagctacacagagaaaccctgtctcgaaaaaccaaaaacaaacaaacaaaaaaatcaacaaaatcatagcacatctgcttagtcctgtctaacaaagaccacgcagaagcagttttatggcagacacacattctccccatctccaaacttctgcttggcaggaaagggagcgaatggcccaagcaatctactgaaaacacggtatcctggtctgtcttgttaatcgatgactgatatgacactcagtggacacacatcctatattatttcttggtctaattttgttctgtcaggacattactcagagtacagctggtggccgtaaggtctccaaagggatagccaaggcggaaacatcttcaaaaaattacacctacagtctgagactaacaccaatcatcacccaccccttctaggtggcctcctgataatggcccgagtcccctgactgcaacaacaagcagttaccaagacgaagaaaaccatttctgccccacacgcacaggtttcagctgcattagaacatagatcaaagtgggccgccattaacagtctgaaaggcagcaacaacttcttctgggtctaatgacttggtcactgccccggtgtgctgttttacagctcatgggccccgtctctgtcgggacatcagaaagatgaccacatgagacaatataacacagcgagcttattaaaagctatttttcaggaaagattttctgtgtgtctttcaaaaatgatttttacatttattaaacagctttgccggagtctccttctaccacatgtgttcccaggctcaaacttggcagcaagctcctttacccgataaagccctttacccactggaccactcctgtgggtgcttgccccttatgagggataaaggccatgaagaggaaaatggaagacacaaacagtagtgactccagacggctttctgagaaccccaagacctggtagtgatgactacagaaaagtgtgggaaggaagcagaagccgcgtggctgctagctttgagacttcatttgtctttttagataaactcttctccgagtttctaccgaaatacaattgtgcaggctcaggcaggctacggagaatccaaagatacggaaacagaacatcggacacagcccaaaagagaaccagtatagggcatgggcaaaacactggcagacacgaaggctaactttgagaagctgctggagctgggggttgggatggaagccttccttcccaggctataacaagcaggggggtcagctgaaaattatgcatctggactccaggagcaaaattatgaggccacctagaagttttctaagtttcacagctttatagtttcaaagtaggcctggcaaggaggactggtgactcgtggtatatgttacacctttgcttgactggactgccccatgttgctgctcaggtaaaatcagggtaaaagctataataaagaaaacttggagtcagtgtgagaatctttacattttaagttgtgtagaaataaaaaccaaagcatgctaaacataggaatggcatcattttagaaatagatgctgaaaactaagactggacaccagccatgagctctcctctttcacccctgccatgttgggtgccctcaacccagcttccagcacaactcttcaccagctccttctctctgatggcaatcaatggctccggggttttaggagtttgctgttcacacctgagtctgatgcttttccttgacagcagtttgtatcaagtgatgtctgcacacggcttcacacagacctgaatccatgcatgcctggcttcttgcacacctggtgtggtggtttgaatgaggcctccattggtcatagggaatggcactgttaggaggtgtggccttgatggtgtaggtgcagccttgttggaggaagtgtgtcactgaggggtgggctttgaggtttcagatgctcaaccaggcccagtgtcactttctcttcctgctgcctactgatctggatgaagaactcgtggctccttctccagcaccatgtctgcctaagtgatccatgctctctgccacgatgataatggactgactttctgaactgtaagctgcccccaattaaatgttttcctgtataagagttgctgtggcctcctccctccacctcatatatgatttttagacatagagctaaggatcaccagcctacaatccacactgccagaggagctaggaaacaaggaggaccccacgagaagattgcatagtcccttgaggaaggggagggggacaagaacccttaagcaaattgggagcacaggaggggggagagaaaggaggtgggaaagggagaaggggtgggggaggagaacaagaggactgagatgggggaggaatagaggagggcaagaagggagatgccttgatagagggagacagtacaggtttgaagagaggtctggcacaggggaaatgttaggggatccacagggatgaccccaactaagaatttaggcagtggtgaagaggctgcctttgatgcccttcccctatgatgaaattgatgtctaccttggttaacattcctagaacattcatccaatagttgatcgaaacagaaacaggcacccacagctaagcactgaaccatactcctggaatccagttgcagagaaggaggagggatgagcaaaggagccaagacagggctggagaaacccacagaaacagttgacctgacctagtgagagcatgcagaccctagtcgtaaagccggggaaacagcattggaccaaaccaagccctctgaatgtgggtgccagctaggaggccaagacagtctatgggacctccaacagtggagccagtgtttatccctagagcacaaatgggcgttggcagcccattccctatggagggatactattgcagcccagatacaggaaggagggtctaggccctcccctgaatcatatgacagacttgaaggtcccctgtggaggacctcactatctctggggaggaggtggggggtgggttgggtgttggtggggaacattggatgggagggcgagggaatggggggatggatatgtaaatatgagtgcctctaaaataacaaaaagaaaaaaatcaatgaaacaaagagatggttctttgaaaaaaatcaacaagagagacaaacttctatccaacctaaccaaaaggcacagaaagaagatgcaaattaacaaaatcagaaatgaaaagggggacataacaacagacactgaggaaatacagagaatcaccagataatactttgaaaacctgtactccacaaaattggaaaatttaaaggaaatagacaattttctggatagatatcacttaccataattaaatcaagaacagataagcaatttaaatagacctacacaagcatgagagatacatnnnnnnnnnnnnnnnnnnnnnnnnnnnnnnnnnnnnnnnnnnnnnnnnnnnnnnnnnnnnnnnnnnnnnnnnnnnnnnnnnnnnnnnnnnnnnnnnnnnnnnnnnnnnnnnnnnnnnnnnnnnnnnnnnnnnnnnnnnnnnnnnnnnnnnnnnnnnnnnnnnnnnnnnnnnnnnnnnnnnnnnnnnnnnnnnnnnnnnnnnnnnnnnnnnnnnnnnnnnnnnnnnnnnnnnnnnnnnnnnnnnnnnnnnnnnnnnnnnnnnnnnnnnnnnnnnnnnnnnnnnnnnnnnnnnnnnnnnnnnnnnnnnnnnnnnnnnnnnnnnnnnnnnnnnnnnnnnnnnnnnnnnnnnnnnnnnnnnnnnnnnnnnnnnnnnnnnnnnnnnnnnnnnnnnnnnnnnnnnnnnnnnnnnnnnnnnnnnnnnnnnnnnnnnnnnnnnnnnnnnnnnnnnnnnnnnnnnnnnnnnnnnnnnnnnnnnnnnnnnnnnnnnnnnnnnnnnnnnnnnnnnnnnnnnnnnnnnnnnnnnnnnnnnnnnnnnnnnnnnnnnnnnnnnnnnnnnnnnnnnnnnnnnnnnnnnnnnnnnnnnnnnnnnnnnnnnnnnnnnnnnnnnnnnnnnnnnnnnnnnnnnnnnnnnnnnnnnnnnnnnnnnnnnnnnnnnnnnnnnnnnnnnnnnnnnnnnnnnnnnnnnnnnnnnnnnnnnnnnnnnnnnnnnnnnnnnnnnnnnnnnnnnnnnnnnnnnnnnnnnnnnnnnnnnnnnnnnnnnnnnnnnnnnnnnnnnnnnnnnnnnnnnnnnnnnnnnnnnnnnnnnnnnnnnnnnnnnnnnnnnnnnnnnnnnnnnnnnnnnnnnnnnnnnnnnnnnnnnnnnnnnnnnnnnnnnnnnnnnnnnnnnnnnnnnnnnnnnnnnnnnnnnnnnnnnnnnnnnnnnnnnnnnnnnnnnnnnnnnnnnnnnnnnnnnnnnnnnnnnnnnnnnnnnnnnnnnnnnnnnnnnnggagccagtgtttatccctagagcacaaatgggcgttggcagcccattccctatggagggatactattgcagcccagatacaggaaggagggtctaggccctcccctgaatcatatgacagacttgaaggtcccctgtggaggacctcactatctctggggaggaggtggggggtgggttgggtgttggtggggaacattggatgggagggcgagggaatggggggatggatatgtaaatatgagtgcctctaaaataacaataataatatttaaaaaaaaaaaagagttgctgaggcatgtcatctcttcgcagcaatagaaactctgagatacctgatttcatgcaatttcagcttccagcttaattcacgtccgatctcatgtgtagctggcttcattcacattctactaccctgcatgcctggcttcatacatgcttggcttcatgcatgccttgatacatgcatacctggcttcatgcatttttcagcttccagcttaattcatgcccagcttcatgcatagtatctgtcaggtctggctatatgcatgcctggcttcatgcatgtttagcatcatgcaagcccaagtaatgtttgtctggttgcatgaacacaaggtctggctctcgcctgtatgaacagtctgtttttgcctctctcaatgtcattatgtcatcaatatcacttaggactcggagaagctcctgaaactgcccaaaaggcttctcacagccttgtgataatcctggtaatgacataatgccaccaaggcctttgcaaagagcaggatgcgctaagaacttattgtgtgttacctcaccggctcttcccagggcccctgggaaaatgtatttattgtaaggcaaccagggttacagtgcctttcccagtatatgtaaggcagtcagggaaagacagagtttggatctgaaccccagtctgactgattcctttgacatcccttccagatcccactgcagtggctcttgggtcaccccaggaccaaccgtggtgccacataagacttgtttcaaacgtcttgtctcccaagtgccgagtctgagaccctggggagcggggctcagccatctgtatggaaagctgcgcagaaggccacctgggttgttttgttactagaatgtggaaacttcctgaagagagaggaagggaccctgtgccctgggtttcctcttctggaaaatgccaggtggtttcatgtctaccctggaaaagctctgctttgaaggacaaaaaaagaagctgaggtgaacaaaggcctcagcagtcaacctgagcagacaggcaggaattccaggaagcctcccagagtggagccttcatgtaataagcaatacttcataatcagccacttaagcaaactcaggaaaacaaaaggtgcacagtctctgaattcctaagtggaaagattgcgtgggtgcaggagtagctgggtcaggcagccaccactagctctctttagttttaagaaaattagctccatgttagcgtgacagctgacaacttctgagagtgtgaccttgctctctctctctccagcttatctcagtcagaggcaccagggaactccgaagattcatgcccatccacctggaaggtctttaacatcctcctgcaccagtgcagtccctgaatttacccttcgcttcaaggactcctcgggagctgaccacagctggtgagagctgcactttcctcatgtcagtggcaacagcaacggtaatggtgtgagctaagtgtggaagacctagctgtgatttagcccagaaaggaaggacgaagtgacttcttgctggtcacacaaagatgatgtaaaacgggaagggactaactacgcctgtacttgaacctagtgaagatcactctaccacaccaaaagcaaaacgaacacatttcctctggaaacgcttgactaactaggaagaacacatgatccaccttttcgtccagggttgttcttggctgcccgggtttacggtgggagcgctagcgtatggatttcatctcccctcctccagaaagagtgcaagggaggccaccaactaccagatacggtagcaatcgtacttgtaagattctgggaatccccagcctctaacaagtttaggcctgcataagctactagggctgcagggggcaggacggcctaagggactgcgcaggtcaccttaatttgtaccaggtctaaggagctgtggatattctgcctttcctagaaaaatccttattcaaatttcacatcttgtcgctcttaaaactcaaatgagagagcctggtatggtggctcacacctgtattcccaatacttatggggctgaggcaggatgatagctgtgagtttgaggcttgcctggagttactccaggcccacctgcactatggaatgaagccttgtttgaaaaaatatatatataaagcccctggtgctaataatgatttgttatgcaaaagagacagcacaaaagagtaaacagcatcccttccttgttacttacacattttcccagagaaaacactcaaggcagacgtatctataaaatgatacctattgccacatgccacctcccaatttaaaaaaaaaaaggaaacagactcaaagtaaaggcagaatgtgatctggggaacattcatgaaaagtccagatgaccaaattatcagagccagggaagactgtaacagggatcatgagaagtctgctcacggtcctccctggaccacttgaggcctcctccatctgtggctttaattgccttctcggcaaaaggttaactagaaaatggcctctgccaaatgtctcctccaacattgtagcaaggctcctacaattccctttagtaacagacaaatgctgtcatttataaatgtaaactgtcacctgtcacggcccacgccaagttaggtgttctgtttacagtaacaacgtcgctcacgatctcctggagctcattcacaacttcatggataaaacagactagatcgaaatgtagttggtttaactgcaaatttttcatctagacatttactgcttaatcaaaatcagtaccaatcaataccgatgatcttaccccacgaagagcgtttaacttacccttgccatatccaccaagaagttttcaaataacttccaaatgtggttacttgtatagatttctttcatctccacttccgtgtcaacataacagtgattgacgaagttcacgtatgcaatcttcacctgtgtgagtttcaaacgcaaaagcaagttcaatttttcacccaccgccttccattctacaacatgaaatgccgtcttgcgggctcctgtagcagatcacggtttgttttggacatgtgcaggctccctgctctcttccctttaacagctattccaccctggtccagggaagcctgtggtccatcattccattcccccacacccagagactgctgtgaaaacaagagcttaactcagagcaaacctagcgtccttgagacactaggaagagctcaagtgtctccgagagaaggctgtacatagaaacaaatcatgtcagtcattccatgggattccgggactctgagacagagccatgaggaagaaggacgagctttcctgcctaccgggcttcctgcggctccactggcgtctagaaaacaatcctcaatggcgtgtgccgtgttgagactggccatgggctaggatgagctgagacaccatcatctccaaagcagctgtacttactcattgtccaccaggcatgaagcccttgggccatccccatgtctcctctaattgaacaaaatctctctcaatcctattaagcagatgcagtgactgttttactttaaaactgtggatgctggaagtgttggtgactgcgggagtcaacaacacagttaaagaacattggataaaaaccctgactcactgttgaagttgctggagacacatttgctggcatctgctctgactgaggtacccaaatgataattgtgaaccatacatggccattaccctcctagagccgaccctcttggaggaaggcatgaggtttaatgaaagtcaactggccagttctccattggagatgtgggtggccgtatctgcatagccagaggactcttctctgaagaagtaaagcatgaaatgaacacaggaaaggcgggaccccaagcaggaactgaacacggggtctggcatggaaagaccaggacctcggataaagactgagcccacggtcctctcctccactccacccttctctgctgtgccatctcagccccaccaaagcaggaaggaccctgggactgagatgctaacggttccacataaatactccttcaggttcttgactgtgttgtcatggctcaaggtgaccggaatagggactgagacctcccctgaccccttttgattttatgtcctttagtgtatagcacatatttatgaacttgtcgtgacataccataacagcggaaaagaaagaaatcattacactgtgtgttcctggaagcctcactgacaatccgggtttcctcagccgataatcactctctgccaggtatttttccccagttgtcaaagctgaggtagaagagaggctgagagagggtgtggcatgctctcgagaagactcatactctgtgcagccaggtaaagccatggatctatggtgggtccctgcagcaccggcctaggctctctcaccaatgactgactcaccaatgagctaccgggttcacactcaaaactacaagtgaacctttccctgaaaacccactaccttacgagacatttgtagttgttagtcaaggggcctgtcttccttctgtgcaaacaaagctcaaagtctttgtgctcttttccactttgaaaattacatgaccaataatccctctactaaatatgtggtgtcatcataactattaccatgggagacgcccaacacccaggtgagctttaaagacaggagcattctacacgtgataagcgtttgtcgggctgacctcagggatacagtcgtcatgggtcaccaccctcacgatgtcgtccagaggcaagagagaattgcacttgatttcggtgtagacgttcttcccctccgtacaggctgccagcaactccacaagggtgatgtggtaggctagggggccgctctcatccccgcgggctctctctgagcacatcatgttgaggaggatgggaaatgatgctctgtcgttgtaaaatatcagcacatcttcacccccgttgatcaactgaagtgaagaaaagaggccgcatagcagatttcgacatttctaagagtttcgacctacctgacgacacacagatctgtttacaaacagaaacaagcacgcggacacacacacacacacacacacacacacacactgcaaaagcagagcttcctcgggtaggaggagagaaaggtcaaatgccaagtgactggtgactgatgctgccaaaactgggccggggatatgagaccagcagatgggataagaaccaaacagcactgagccagtcctgggggtgcagacctgtaaccccagcactagggaagcgaacgtctgagttcctgagtctgttttctataaagtagtaaagtgaaggactggaaagacagagaagcccctgctcctgcagaggaccagaggatctgacgccctcttctggcctcttcaggcagtgcactcacgtgcacaaacccacagactgacacacttctatacacattaaaaatgaaatgaatcatagaaaagcattcgcattagtaagtaagcaaacttacacattgcttcaagtacttacaactgtatgaatacctggaaatgtcctcattttatgggagggcatcggagagtagaacagctgagatgacaagcggggtacacttggacatgaatgttgagtggtacacttgggacatgaatgaatgctcctcatattttgttgtatgcttttagcgctcaagatggcagcaaattttatttaccatgctattatctattactgacaccaattttctaagcctgataggaaatatttggtcaggttatggatgatatgtaaatttcaatttagttactatatttaaattggtaacatttaaatcaatgagccaattaactgattggctgactttgacagtcctgttgcaaaggaatttatgtatccaaatatgcttatgcataatattacaacgatttccttatacacagaagcatttcctttgataggtgccaaaggaagggcctacgtatttgcttcacagtgcgcttttcattgtttatttacaggtcatttgtaaaagtttatcgtcttaggctgcattgcattttaagatttctgggtgacatatgaaatcaacacagagacatcagacatctctcacttctaactgaaaggcatgtggcgatggaaatttccccagaccaacgcgatccccccgggtaacagcttccttgcagctgtgggtggagctgctctgatgcacaggccaccagcctgcatctagtcaccagttctccaaagggccacctttgtgtccctagtgagcagctaacccacatcaacctttccaaagcagttagctcactttcctaagttcttacctcattcaaaatacccagttcctactgctctaatagagccctgtcaatcacttattaactcatgcgctgttcctcaaaactattacaaacagtggcagagagtacctgtcctatcattcagaaagaggaatttttaaatagaaaaatggtgttaattccaaataaccttgtgatctcctaagatttcacccattgtaggagctggagaggtggctcaatggttaagagcacttgtggctcttgcagaaaacccaggctcaagtcccagcacccatatcaagcaggttataaataggtgttgctccatctccaggggatctaactccctctactggtctccacaggcacatacatacacatggtgcacaaacagacatgcacacaggcacacagagacatgaacacatgcttacatgcacacagagacatgcacacagagacatgcagacacgcttacatgcacgcatgcatacatgcacacatgcttacatgcacacattagtgacatgcacacatgcacacagagacatgcacacatgcttacatgattacattcacacagaggcatgcacacagagacatgcacacatgcttacatgcacacagaggcatgcacacaagacatgcacacatcctcacatgcacacattagagacatgcacaacacacacatgcttacatgcacacagaggcatgcacacatgcttacatgcacatagaggcatgcacacaaaggcatgcacacatgctcacatgcacacattagagacatgcacacatacacacatacagacacatatgcatacacacacaatttttaacagagtaataaagtgtataaaaatcaggaaccatgaatttgttgcctccaagaaatacacctcttgataaaacacaactactaaactcgggtgaagaatggaaaatacttctctagcaaatcaacctaggagacaaacacgtgctgatgttcccacatccgacaaaacagacttatgataaaattaatgggaaagaataaagaaggtcattttatactcattaagtgagcaatcaattatcattatgttataattataaacacatattctctgaatatatgtgcatctaattgtatgaaacaaactcaattatcccaacacaagaatattgtgtgagatcaacacttcaccctcactaactgataggtcatttaaacaaaaataaaaagagtaatttaacagctgaattcaatgataccattgatcaaagggacttaacagatatccgatgaaacttaatagatattgtatgacatactattaaatgatgaatttgtcattgatgcaactaataaaataattcccagaaacaaaagaaaataaaagataatatctcaaaatatatgggatacaagaaaacttaaataggaaattaatagctatgattgcctacatgtgtaggcatacacacacacacacacacacacacacacacacacacacacacacgcacacacaatttttcaattttaaaaatgacccattatgtaacggatccaattccgttacagatcaaaaagaaaaactcttaataagaccgtgaggtcagatggccctgagtcactgcactgcaccagtgtaaacctgtgggtgcctcagcagtcacagtaaacccagatggctccggaggtctttcccgctacaagctggcgacgcgggtccaggcacaaacctacctcggtcattaccatgtcctggcatttcttcacgtatttgccatctgctttcacgatcgtctgcaggaaccgcaggtactccacgtggcggccgtgcgtctcaatacagtgcacaaagtgctggacgaccctctcgctgatctcgttgcacaggtgatagttgttcatgaagatgtgtcgcatggtttctgcttccaggagctgagcagagagggcgcacctgcgtgactgggcggggccagggttctacaccacagggcctatgttccctgactgccatgggcctggtgtcctaagtgaagccaccatgagtggccagtgcctgtcctgggtgagacaccatgagtcatgaaccactgaaggacagacagacatctgcctcacaatgggactcagctggagagaggaaattagcaagtgcactgtcagcgacttgggggcagcttattcgttattccaacttggctctaaagatctgctagttttttatccttttgtgagagtatggtataagcatgtgtgttgtgtgcacacgtatatgtgctcacaggtacacgtgctgtacatgtatggacatgcacatgcagagaccacagcaggatcggcgcactcctctgtcactgtccttcttattcccttgaggcagagtctctcactgaacctgagacctatcccaattacactgaccggccagcaggctcctccagttctcctgtctctgccgtccacaccgatattacgggcacacgaggccgtgtctggcttctatgtgggcactggggatctgaacccaggtcctcacgtttccacagaaatgctcttcttcagccccaagatctgcccccaggctttcagccagtcatagtcaacgcaaccttggaatattcagcatctagctcctgtgagtttgttttcggttcgggttttgtggtgctaggtcctgaacacgccagacaaactgtcgattactgagctacaaccccagcttccatatttagcttcatcatggtatcatgaaaaaagcactaagctttctaaaatccttattctaacattgaatcgcatgtcgtaaatgaaaccaccgtttgcagatgaaatttgtctaaattttctaattaagagtttcttctacggaaacactcaagtttatggagtgaatctccagggaagaacgatgtgcaaaggtcaacaaagtttttcacagagcagtaaatgctgtacgcgctctgccgtaagtgttaggggccgccacggtacttactccaggagtcaggaacaggttgagatgtttgtgaaggagaacttgattctgtgggttcccccggcagaagttctgcaggaaggcgtgggctaattccatcacctcgttcatcttctcatcgttctgcaggcgaaagggcagcacgtgacaccgagaacggaggacaggcttacacaaaaccacctccctccaccaagcatgccgcctccgtggctctgtcccttcctttctagaccgttctctccttctctattcttcctgcctgtctgctccattcctcccaccctctccatctttcctccagactttccaattacccacccatgcccatgctaacaaaaaatgtgaattaaaggctggatgaaggacggggtattctcaatggaacctcaggaaagaatagttagttattacaaagggagagggaggtccttacagtggacaaaccagcagacgcatccatcactcatgtgggaacaaatcagagcctcatgtgcctgctaggaagctcgacacagaaactagaatccttccatgttcccactgaagatacctgagcaaaggaggaagtgagggacgctctccagaataactgtcagtctacaagagagatcaggactgagagagagcagacagaacaaccaagcccagagttagcgtgctcctaaagcagatgcttttctcaaccggacatggctggaactatggaagaaacctgcgcgctgtgttggattaggtgatggtgtatcgtgcttcttcctaatttacaaggtggaagcaggtttcacaaaagcacacccttgtgtgtgggaaacacaggaaagaatccaaggacactgggcaatgggtaggggttgtcctcttaaacaattaaggagagaaaaattctttaaacttggtgatacattttcagtaacacagatctgaaggaaggcgggacagggcaaaccttttcgtaggggatctgcagaaggtccagcaccaccgcgtgagcccccatgttcttcagcaatcgctggtgttggttgcgacacttcttgttctgcacgcagagcttactcagcctgatcaagatctttaacgagatgaagtgctgcattagacacagccatgtaacatgcacctgaacaaaaacaacccctgtgtgcacacgcagagagaccgcacccaggctgctgacctccttgacgatccggtagttgttgcctttgttgctgtcaatttgcggcgtcttcacgccatcctgcaccggactcaagaggttggattcctgaagagaacatatgtgttatatgtttgtaataacttaccactcttacaataaaaataaaatttgtagtgattttattttattttattttttggcgaaccaatgagtttattagggttccttacagaagcatggctgacataaaggcaactagacttctagaaagtccaaccctcagcgtggcttagtgatggccaagtggttttatttaaaattgttgtttgagcttttattggtgcatcaaaattttctcagcttgagggaaacatgcacactaccataacctcataaaaaccaagttacacgataaatagatgagtagcattgctgagcattaattagtgaaaattaaaaataaagggctgttggacatattgctagtttacaaatctatgtgtgctgcagacataccatgggtttatattttcaggaggggaaacagttaaaatcaagggcacaccagtcataattctatcaccaaagacaagatgtaaggaaatgatgaacaaaggagcaagcacatcacggcattgagatacatgtcagggaataaaaggccaacttaaccccaggatgctgtgcccggttaccatgacatccgtaagagtcaaacttggagcagatcaagtgtgtgcaggaaaatgaagaaagaaaaaatagaaattaaattaaaaaataatatttcaaattactgcactcgtaagacttatggacaattctgagacaccgaaaataagtaatttcaataaccactatctgctacatcacattcagaaagaaatccaggacacgtacacactttaaatatcagctattggaattgccatataaaaagtacctattagcaatgttttcccataaaacgtttgtaagtctcactatgtgcctacactagcctactgtgagctcctctgagagaaataaaagatcctgcagccacctcaggaaccctgaaatgagaaatcagaggtgtgaaccgagtaagacttgcaatccaaggagaggaaaagagcagcctcagcctcaggcagcgtgactagaggagcccaagtttaagctgaggtcttcaagatgaacactagctagctgagtatgaggggtgcctcataggcggtggggcagagtttccagagaaatcaaaggtaccacggggagagcatctggaatatgcacggaaagtggtaagaactgtttacagcctgcacagaaccgcacctgggatcaatgtcaagttcaagttgcatcaaaaacactctaacctcctgcatgttggtagtgtggggctcccttgtttagtgggggctgccatctaagctcaggaaaaagcaacagaggtgcatgaggaaaattgacattgtgttttgtttgtcccaagctcaggagcaattaaaaaattaactcaacctgaggagttaaagcaaatgctttccctgttagtcaaaggaagccggcgaagggctctgagccacagaaaggtgcggtccatctgaagctggcacctctcatcagcttggcgtttcttcttcaggtaattcctggtaaatactgtccctgctctcctggtctgaaactcgcctgccattgccaagcatgaaaacccctgtaaacaccaccccagtatcatcactacccagaaggctctcttgtgtctgtgcctccgagaactggcctttggagtcatgggtttcgggaacaccatctccccaaatcctctccctacttcatgccccctttgtttccgagacatgagcaggctcaaccctctgcgacctctcaccgtataaaaaagtgtgggcaggttgaggtcattgagagttactgcttgccccagcagacttgagtcacagacacttctcccactggagaggcaactgtgccccacatttaacctccctctccctctccagcatccgtctccgactcagaacaactggggtcaccaatgatgggagagacggacactggaagcctttagggtttagaaaggcggatgggagctggtctgtcagctgtcaccatggctcgagggggagctgagggcagcacagcctccaccccaggtacagaagggggacaagtgagacactgtcggccagacaagagtctaagaagagactagtgctaaccctgccttgttggggaggttggtgcagcccacaggtaaccagctccgtaggatactcagctagactccagccggagaatttccagttcctatcaaaaaggattcaccggtgagaagcaaaggtttcaaattctagaattgtaaccaaatgtttttttttgtttgtttgttttttctaaactgggcctcctataatctcagcgcactagaaacaggggaatctgagtgcaaaatcacgagattgaggcaagcctgggctacttggtaccctatctcaaaaaacaaaaacaaaacaaaacactagactccctcttcgaatcacagaagtggggcccgtattttcataaggccatttcaccaggaagaacagctctgatgaaccaatatcaagatcttaacctgagagcaagtctcaaggctagcagagctcctcacgcggagtctgccaacattaaagaaaacagcaaaaacaagcagcaaagcctggcagacaacgacctcaggagaaagccatcttgcttttaaaatagcagccttgggctggggatacagcccattggcagagcccttgcctggaatgtacatggtcctgggtttgaatcctagcaccattaaaaggaaagtaacactggccacggcattacgataattatgctctttggttcaacccaagggaagagacaaaaaaatgctcagctctctgaagaaattatgaagaataattactttaatttaaagatgccaggagtcaacaaaaggcgggaacactggagaattcaataaacaatcctttttaatttctgaaaataagtcagtgtaagcaagctgaacaaaaacatcaacccacagaatatctggataattccaaggcagggataaagattcagaaatatgcaaacttatgcagtgtgtaagggcagtttgtattattattattattattattattattattattaacaggctttaaaaagatgtttcaaggttttacatccctaggatcagaaattgatggtgttcattatatcctacacaacattaaacccaggtcagtgatcaaatccacaaagccctgaacttattctaatgacaaaatactggaaaactacagtgtaggagaattagttacgtaaaaccccagagctgagtaggcctgggcaggttggggggcggcgccatgcttacagcacaaatccaaatgacattttgacaactgtcacaaaggactaatatggtaccgtcaactacacgacctaaacttatttcttctaggtgagcattcaaagctagctgatctcacagggatatatgcaatcacacactacatattcagactataagccaggagctcagaaacagagcaggaacagtcttcccggaagagagagtgctgctcaaaacagttcatcacagttctttttctcttttccttaaaaaagagtgtgtgtgtgtgtgcgcgtgcgtgcgtgcgtgcgtgcgtgcgtgcgtgcgtgcgtgcgtgcgtgcgtgcgtgatttattttttttatttttatttttttgcttctggcttttaaaaacagaactttccagatcctaacacgtagagccatgaggcacccacagctgagaactaagaccatctattggaaaccttctcctcgttccatcccaccactttcaggagctgaccctccacagattggcccagcaggcgacgcctcctgctcaccgccgtgtccaaagcctcctcttgaaggagccacacaatgaggaacaccactgaccagccagtcttatccctaattctgacggcaaatgtccatttcccgccccacactcctacaggccatatgggggaacagtaatggcccatctttcaggttttgtcagtcaatccaatttcagtttagttgacactcagaatgaatgtcccctcaccaccacccctgcacacacatttcagataagtgaaagataactcctgtgggccatgagacactttgtctccatcgttaagggcaatgccagctacctaggcccatgtctggcagattacagaatgagtaaaatctgcagataaatacacctggccttgcaagtaacatcactgtggcccattgtggaatcttgaggaattcctgcttccctcaaagatgtgtaaggctacttgagggcttggtccaggatccacaatagactcatgaggctgtgtgccgcacagcgggcagatagcttgcttctgggttctaaacccagatccaaattccttccccacatttccttgtctctccatccctctgacgaagtaacaaaaggtgtgccctggacaccttccttttccttgggcttcaggaaatacaaggaatatgtttgattgatagtcttctgtttgttttacacaggatttcgtgtatcccaggttggcccaaacctcctaattagacaaagatgaccgtgaactgatctccttgactcacctcaagtggtgggagtgccccacagccagtttaagcagctgcacactgcaccaggtcaccgcatttcctgtatcagactaaagagccaccctgtttccaggaaacggcagctggattcgtcaaccttctagaccagtggttctcaaccttcctaaagctgcgaccctttaatacagttcttcgtgtgatggtgacaccaaaccataaaatattttgttgccacttattaactacagttttgctactgttgtgaattgtagtgtaaatatctgtgtttttccagtggttttaggcgacccctgtgaaagggtcatttggccccaaaggggttgcagcccacaggctgagaatcactgctctagattccttggaatcttgggaaaatcaacataagagggaccttaaatacctggtaaacaagcagagaagtcggatttactgtctgttcctcccttactgacaagtcctgtttgtgtctctctttgtttgagcccagacctttgtctctagccctgcaaactcaagctgaaaattctgtccttacacggttctgagatttcgcccaagacaaaacacacaagacaactgctgggtttgtagactcttattgcttctgggcttccacgctggatgaaagccatcaactagaacatacatcaatcacctgcaggaagtttgtcataaaccttttgccataagggacatttatcaataccctgttaactcaaattaaaaaccgtatacacatgcaagcatgtgcgagagcacacacacacacacacacacacacacacacacacacacacacacacacatttctaagagggcaaatacatctccacagaaaacaaatgataagaagtaataatatgaagtcgtgtggctttggctttcttcaaggctgttctagggcctcctgtgtcattattaaagctgaatgctgtgtagacatccctcatgtgatgttttgaacgaaaatggcccccaaagggattggcactagtaggaggtgtggccttgttggaggaagtatgtcactgttggggcagactttaaggcctcttttgctcaaacttccctcagtgtgtctgtcagtcgacctcctgttgtctacaaaatgtagcactctcagctccagcaccatctctgcctgcacgccaccgtgttctccgtcatgatgataaaatggactgaacctctgaaactgtaagcgagcctccccagttaaatgttttctttataagagttgctgtggtcatgctgtctcttcatagaaataaacacctaactaagacatccagtaatttcactaatgtttcatctgctcatgtgaactacaaaatcaccttcaaagctcatgaggcaacagcacagacaactgaggggctgggtctctgagctcaagatagggagggtcgtaaccttaggagggatcctctcagtctctggagcttgtgtgctcaactgtcttaagattatcttctcccatttatagtcagttcaccctcagacagttcttcatagtctacacctcctacgtggttcccggatgggctccagaggttgacagttggcagggtagagattccaaattcatctaaacccaaactctggccaaagcagccagatcagctcagtgtcaactaaatggtcttagggtttcaaatcaatcagcagcttgtaaaaccatccagcggacacctcagataggcctaagtcgtgtctccagcctggggaggagctatgacatcatcaattacccagaaggtcattattagatagttatccaatgctagctccgagatctctgtactttacaagattagagcataaaagagggctttctaataaagaataatgacacatctgctcaaaaagttaaacaaaacaggcctcctgaaacaagacagtcccccaaggaaacctttctgttctagaaattttagaaacagcacaaagcccaccataatgcagatcaacacattggagcctgactccagtccgcttgtgcctcaaaagcacactgtactataccgtcagacctgcctctctcctacactgtaaaacatccacacgttaaagccttcacagagctgaaggataacactctgcggtggtcaggatgagcccaaagcatccctgactcacataagggtggctctgggaggaagagggactgtaagccaagcatgagcaagagaaggtgagcccttcctctagaggcaacacagatgtgctccgtgggtctggtttccaaggaactgctctccccatccccactggaactttttaaaggacacattgacaatggagtgcctccatgaaaatgcccagaccgcaccataaagatgtcaacagctgtccctgaagaagcttggaaaagagagggacagacacccaaacaatgccagcccctcttctagacaaccagactttcgcccttgaggatactgtccagttcattccattccctgaaccacacgcccaccaaaagaacaaaagattcagagcaaaggaacagacagagatgtacactgggtgagtattaaaaagacctaactaggaaacctgaaaaaaggaaatatttcccctagtcacaaaacaaaatgggtgcttaatatcagccctaaagtcattgagtgagtgagtaattctcttaccaaaaaactggaagccaggcacaacagcatgcctgtaatcccagcactgaggaggcagagacagcacacacacacacacacacacacacacacacacacacacannnnnnnnnnnnnnnnnnnnnnnnnnnnnnnnnnnnnntacacacacatacacactcatacacacactcacacacattctcatatacagactcacacacatatacacactcacacacatacacacacactctcatatacacactcacacacatatacacattcatacacatacacacactcacacacacactcacacacatacacacacatatacacacacttatacatattctcatatacagactcacacacacatacacacactcatacacatactcacacacacacacaatgttttaaagtaaaaggaaatgctggaaactacacaggagcatagaaagaaatagttaaaaaacagagaaacaaagtcatggtgggaataattaacaaggaaacaacccttatgggttttctctctggaacacggagacgcccaggtgacctgctacacagactaaataaagaagtgagagcaggaagggcaatcctgacttaacccacagagacactttcctgacttaatctcccttctaaatttagaaaacacatatttgaaggtgatgagttagtggtttgttgatgctgctacaggctgtcccccagcctgtaagcctttggatgccagcagagcccacgccccagaagacacatttgggagaggataagggcaatgctggggtactcgggaacatggctgacagacactaggtgtgggacctgtccccttctctgtgatcgttagagatcagttccagcaatggggtaatttgaagttcccaaggacacaaagataaggtatttcacagtttgcctacagagatgcttaccaattcttgtttgtttaaattctgttgaaatctctcactgaatggcagatgaagggccatttgtaattaagttcactttcatcactgctaagctttactttgatgagaggctgcactagcattttatcaggttgaaaaaaataacataagcatctttttagatttaatatattcaacataaatcacagagaaaaacatatatttgccaatattcgttttttttttaaatgaaatgttttcccccagcccttaaagaacctgtgctatcagattatgataagaaatctaaaccgtgggcttaaaagtaggagtgtaaatatttttaatagtatcacttataaaataaacaaataaaaaattgaaactttcggctattgaagacttttttattacataaacaaaccctagcagtcactctattgcctctaacacttaggcagctgagagcccgatggctctgatttgttcagaataccaaaggccttgtttacagcctctgtgacactcagagacacaaaggactgttatgcccaccgcctgctggagtgcatgctgactgctactggctattaccgcctgctagagtgcacgctgcctgctatgggctattcccactgacaccaggatggatttcatccgtatgttaccagcatccttggacgctggttcactcacaatgtagattattaatctgtgtaggaggttttttgttttgttttgttttgtttttgttttccaagacagggtttctctgtagctttggaggctgtcctggaactccctcttgtagaccaggctggtctcgaactcacacagatccgcctgcctctgcctactgaatgctgggattaaaggtgtgtgccgccaccatccggcctcatctgtgtaagagttagcactgtcgcttctcacatgctttctttcttctcctgaaattacttcattttacatgggtgcttcaggcttctgcgtccacccatttgcctatgtttccatcacctcttccccctgtgcattcatatactcacacctggtcatgtgcaaaaggctcctagtgcctctcgcattagtcctagtccttctggggtgtctggattcttctgaagccttctggaatctgctttctccttccttggaactctcccaattcccagccatttctaacatgaatcacttagtcctgttgtcattattcttgaatacaaagcaagcctgtgctatgtgtgtggactttctcacactgttttataggtgtccgtttctgcagagcaagggccatatctggagtatcagatggattccagacctcatattttaggaacggaaatgagaaattcctctgtgtgccagctaagggggttacatgtggataaagggacccatagcacactgggcagagagtctgagaggaagactctactccagggaaacacaaacactctactcaagggcaggggtggggctcagctgtggtccacatggcccatagccaacaccagaacctacagatgaaaacacagaagagctgaccattgctcacaactgtcagacagaatgtgagcagccccttccagacagcatccagataaaatacttaagatgcctctttttggtaggaagatagaaaccatgaaagtttataaaaatttaggagcggtaagaagtcctggagtcactgatgcccctcggggctgacgcccatgctggcaactgtcctagagtctaagtgttaatatggagggcaggacagggaggggggaggaggctggggcaagcctggctgccaagaaagatgaaaattctggccagaagccacagaaccacaaacatcaaagggaaccaccgcagtagtgagtcagcgaaacagccacagaaggacaaggggcacccacgcagcgtggcttttgctctggccacagtctcaggggtgcccccttaggctcctgtacagaaagaaaaacccactccaagatctgggactagaattcccattcataaagagacccccaaagtccgtatttaatgaggttacaaaacagaacttctgtagattacattcaggcctcagaggaattgcacttagaatgcacctttgtaataacaatagaacaaccctactaaaggccccaacttctgcgagaacatgccttcctacaaagaagctaggttctggatataaacgtaatttacaacatttccagtctctgggacaactcctgccccttccatcacctaagcaagagccattgccagagggctccaatctacaggctgtgaacggaccatccagaaggcaaaggccactgttagctctgcagcccaggacccaggctctgagaaagtgtcaactttctgggctctaaacccaagatgcctgacttgagacaggttagcagctgaggatgtctgtgggctcagactggcagcgccccctggcaacagtctggagaactacaattgcccgaggaaggaaagaactttcttctttctacttcaaatctacttctgtctactggatataaaaacacgcaagctcagaatctgcaagcaaggagctgtaatatctcacaaccaaaaaggcatccttagctggacatgtactcagaaacagtagaacacccacacgcgaagtatcacagagacaagcgtagtctgtctacatgggatgtgagaaaacgttacaaacacattaagtcaaagaagcctgttgtcatgtgacccaaccacactgcattctgcaaaacgtgaaacctcagagtctccggggcctccgagacgcgaggtggatgggtgaagtgcggggctgtccgggccgtggatctactctacgggtgctgttgtgggtgacagtattcattttctcagaactgtgtgtaggatgtgctgcagagacagtgagccctcaataaagcaaggcgggaagtgtacgagcgccccctgctagtcacgtgcaatttctctctaaaccaaaactgttctgaaaatgtgtctgtaaaggaaacgtaagaattcataatcagaaatgagcagaaatataatgaaataagtattcttagaaatttccaagtagggttggagagacggctcagcggttaagagctcttgtcacacttgcagaggacccaggttcagttcccagcacccacatggcagctcacaacgccctgtaacacaggtccaggggatctgatgccttcctctggtgccatagatgccaggcacgcatgtggtacatagacacacatgtaggcaaaagataactgtgcataaaaacaaatcttaaaaagtaaaatttttaaaaattagaaaagcacctcccaattacttcacagtatacagaatatcaagtaacaagaatcggaaaatgtaaaaagcaataacatctgatggaaaccaccaaacaaatgtgaaaaaggttaattttcagttatgaaaacgtacaatggctgaagttaaattttcatttggtatggtaaactttaaataagttgtgggtgaaaacacatatgcatgaattccaataaatgattcagtgtttactgcaagataacagacttgagaaagatgaaactaaaattaacagatacatatttatattgacatgttaccaacaggcacactaacaaggtttaacatatacttaactggagtttcaaaattaagatccaactgtttcaacacgcagcaaacctcttcacggccgccatgggggcagaggacaaggagttacacgagggggccggggtgttgtctggaatcatctccattgctctctgtctgaccttttcactgaggcagggtttgtcagtccaaaccacagcttgtctatgtgtccagcctggctagccagcttgctctagagactcgacatttctgtcttttgatgccggaattatgggccacctgccatgccctgcagcttttacataggttatagacatccaaacacctgcctctcacatttgggcagcaagtgcgctaaccacttagccacctccccagtccagcatcattgtcaggtacacatgaacaaacaggaactcgttacctgcctcaacagaactcagctttatctaaactggaagaaataagacgatgaatctaaaacaaacctctaagtccactggtggaatccaaagaccaacatagcgccgcttctgatagcgcatttccttcagacatcagcactgcaaagagcccagaagtccgccaccagctgattaaaaagccatgtgtgacaaggcaccaatgcagactatcgcatacagatgaactgttgctgcactcaacaaggattggagacagcagatccaaaacagcccgagctatctcccatgcatttcttgtgtttcagaaatgcaaccacataggagaagaccattaaacaaggaagctaaaaaactcgtgggagtagtctaaggcacaggggcttattaccagtagtgttctgtctcttaagatacgcaccgttccaagtctggctcttactggtgtgattaaacactgaccacatttaacttaaagggcaaaggatttattcagcatacactccaggtcatccctgagggaacttgaaacagaaaccatgaaagaacgccccttgttggctccctccacaggtatatgcttagctggcttcctaatataacccaggaccacctgccctgcccagaaatggtgttacccacagtgcactgtgctcttctacgtcaatgaataggcaagacaatttcccacaaacatgtccacaggtcagtctgatggaggcaatccctcagttaaggttccttcttcctggatgactctagcttgtgtcgagttgacaataaacactaattggcacagatgtcttagcccacaggtttaatggtaaaatgtgtccaggattcagagaaggtactagaaggactcctgggacaggctctctcgtccctaaacaggagactcagaaagaccctttcattctaggtggtggtcacggatttgacaccagaatgctgctgctaggatatggtcaggggcagcctcagaattaagcccactggtccatgatgacaagcctgaagcaataaattaaggttgcacaggcttgaaagatggctcgatggttaagaaaatttgctgctcttgcagaggacccaagttcagttcccagggtccacattgggcagttcatagttcataacagcctgtaactccagttctaagaggcctgtaaaagcacttatatatccatgacatacacacagaaagaaagaaagaaagaaagaaagaaagaaagaaagaaaggaaggaaggaaggaaggaaggaaggaaggaaggaaggaaggaaggaaggaagggtcttactgcttgctttttctggtatctaatgtcaacttactattcatattgtcagttgttcaagaccaatgaggcaatgttaactgactgtccactgaggccatgctaatgattgattgtccactgaagtcatgctaactggtggtgttttttcaggtgagggtcccaattcccagatgacccacgattgtattcaagtgacaggaaaaaacccctaaccagcacacacacacacacacacacacacacacacacacacacacacacacacacaccatcatcatcatcatcatcaccaaggactggctcactgactccttacagtatactgcactgtccatgttgtagatgataaaaataaatcttggaaaatgtaagcaagttactctgagttgcacatatgctgagcagtagatcttggggtatctggttccaaccctctcacacccctactgatcgtctctgtattatcatctgtgctctgggtattaaatcaggctgtcttcactggaagacaaatgtcacacaatttcaattttatgtgtaacctagaaatgatgaacttatgggaacagagagcagaattgtgcctattaggcttcaatgtgggtcttttaacaatggggaaaggattggtttaaggatataaaactgcagtttgacaagaaaaaataaaaaaatcaggttgtcttccttcacttagctctgcctgcagccagtctctccagctcccctgcagtgaccattctaaatccaattcagcccaagccagtgagatgagctcacttgcaacctagaggccaggaggaaactacaaggcatctcccaggaattgtgggagccaaaaggaaaattccagcagacatggaatctcctaagagattcgtattcactgtcactccccatacattcacagagggagtctatggtggcagatgcagccacggacatggccacaaagcagcctttgcctcacaagtggcgtctccattcaacactgtgatcatttgaccttcaagtcaacagtccaatggcagcctccacactccagattttccaaatacttaattcctcatatttaaaccacctcctaatcaacatacctaaagtaatctccacttcccgaatcaataaatctggaactcagcaaataagtgtcagcttcattactcacttgtttgaatcccctagagaaccagttctctacgccacaagctacacagttttaccttgagaatatatacagtccatctatacaccctcttctttcttatgtgcatggaaagtgcctgagaagtgtccaagagaacagcgggctctccatgccacagtaaagggctcaccccacagtccttaatgatagacagcgaaggccaggaagtaacaacatctccccatcacacctcatctgaattctttttttaataatttttgttttttatgtgcattggtgttttgcctgcatgtatgtctgtgtgagggcatcagatcttggagttacagacagttgtgagtggccatgtcggtgctgggaattgaaccctggccctttggaagaacagccagtgctctgaattgctgagccacctctccagcccacctgaagacttctactgaaataactcaaagaggtatgtgtaagtcagatgaaaagcaacagtaaacttcccagaacacatacaaaatatgactttttcaaaacaaaggggttttgtaatttgtgaaagcatagcaactcgctaacattatgtcagaaagtgcaatcttacagaacctggatcttatcatccaaatgttggctgagtcaccgattcaaggcctgagagagccctgggcttctccaagccttagtttattaaacttaaaaaggcagccctacagccatccccaaagttttttgtgacatttaaaaggagattccacacacaaaagtatttgctcttcattgtgcacaagggaagaactaaagaaatgtcaacttattccttacttcagaaatgaattatggaagaatctgtgccccaccctgtagtgatctattattcatgatttattaaagcttgactgagaattcagaaaagcaaagtcagcctcaagctatagagatcaggcagcggtgacacacagctttaatactagtagccagaatctaggaggtggtggcacacacctttaatcctaggactcaggattaagaggtagacagatctctgtgagtacaaggccacccagatctacacaagagtgatccagtcctaaagagaaacagctcacacaaagacgatctcagcacctgggatcacatgcgtttaatcccagcactagggaggtatataaaccaggagcagggtctcagatcaggcattcacattggggataggaagcattgattctccagccacactgaagataggaaggctcagtaccaagagggacaagaagacattgaagtctcaggattctccagccacgctgaggaaaggcagcagtttgaggcttggtgaagagcttgtgcatgaatcagcccttttagcctgagcttgaggtgagagatagtggccggctgctttgcttttctgaccatcagcttgatgtttgaaccccagtatctgtcggtgggtcttttatttatcgtgtcaccaccccatggccctaactgatcataaaacaaatttgtatggactagaaaatctatattccactaacgctaaaatggtaaagtgaagaatgacagataagccaccatcctgagaccagaggtgggatgccaccacttcacctccacctcgtcgtaactcttcggcatttctaatgtttaatgttaatatttaatttatttatttaattaataaaatattaatttaattaataaaattaattaaattatttatttaattaatatttaattggcagcactttctgtgctgccaatctacaacccgaagcaatactcccagacctgtgctgagtgagcctctccacaccactgatgctcctgaggagtataagcttctttccagaaaccaccaattaggacttcggtggtaactggctttcataaaagcattaccagtaacacttttattttaaaaaaaaagtgggggctggacccccccccccccctcaaaaccaaggaaaaagaaaaggttgtccactctatccatatctcttcaatgtacttgaagttctagctagagcaataagacaacacccatacaacggctcataacgctctgtatcccccgttcggggggtatggtgccccctctggcctgtatgggtactacaggcgcggtgcacagacacacatttcaattaagcgctcaatcagaaataagtaattttcttcctgaaagtgaccttggaaacaaacctcatttgtctcttcgcctcctttggcctggccttcgccaatctctccattctcatagctgctgctcttctcaacccacaactcagatttttccaccgtcagcctgagctggtcgagatccgccttgatttgcttgtagttatccacatcctggttcgacaccagcagctgcacctgaggacacgagagtttcacccttagagcgctctcccagccttctgtgtccctggctcctgcacacccgaaatcccatcttcagccactctctagatgaaattcaacacttccgaacacttacgcatacttatgtgtattccgtctgaaaatcttcctgcaagtattcacgaactctaaccaatatgctcacacgcgaaaaggaattcttagatgtgtgctctcaaaaagcttccaaaatgctgacaagtaatttaacataaagttgtgggggttggagaaacggcccagggattaagagcacctcccgcatttacagaggacccaaactcagttcccagaacacacatggtgctcgcaacctcctgcaactccagttcccagagacccgacaccctctgctggccaccatgggtcctgaacacattaggtacatatgcttacatgagtgcaaatacccatataaataaatcaagagtaaacaaatcttcttttacaagataatctaactctaatttcattgttcaagttcatttttctgaggtttctctagacttgtatctgtttgaaaagtcaaagtataaaaacccatggaagaaaatattaatggttacaatacgtttgctagtataaacagcagtttcagagcttgagaccaccatacaatttatagtttatacacactacagggcacatacatgtaaaacatatgcatctaaatggctaccattaactccttcatatctgctagcatcttcaaaactgctaatacaggttcacactccactaaacacaaaacatcagtgagatagccatacttgcaagtaatcactgtgagattaatgtgcaatccaaacatcatggaagacaggccagatcccatcacagaagacagcccagatcccatcacagaagacagcccagatcccatcacagaagacagaccagatcccatcacagaagacaggccagatcccatcacagaagacagcccagatcccatcacagaagacagcccagatcccatcacggggacaggatggaccccatcacagggcacaggatggatcccatcagagaaaacagactagatcccatcacagaagatagactagatcccatcacaggggacaagatggatcccccattacagttcctttctttggatgttctccatttttaatcacaaaatatttattttgaagctatggcttgccaggtacatcattaaattctgtagtcaaaataaccacagcagcaacaaaatttctaataggttattgttccagcagcacttcctaaattctagagactgtcatttttataaagatactgactgaagatcacctgtgggagactcattctgaagcagctcctgtctaggcacacagacaggaccacatctatatttcagaacacaaagtaacaagccaggtattgcagtgcacgcctgcaattccagcactccaggggcagaggcagggggattgccaagagttcaaggtcaatccgagcaatgaactgaattctgagccagcctgtactacagagcaagagagggtccatggaacacagcctcatctgcagctaccatctgacgggctacaaacaccttcagaactccaggaattctcaggtgttccttttccagggccctccatctcgggtgttcgttttcttgggacagagctgagaactgaacccagagcccgagagagctcgtcaagcaggcacccagccccagctcacctgtttaaaggcctgcagcacttctgctctctggctgaagtgcttgaataagagctgcaaggcccccgagagcagcggggggtagtcatgcatgatcaggtggatgaggacccgcaagaacgtcctgcctccttcatcatcaagctgaactggagttttttccttcctgtaaaaccaaaagaaactctaaaataacacatcgcatgatatctatattaaattcactgaagttatacctgtgttttaaaacttaaaccctcattttcccaaaaaagaagagacgcagaggaagacattgttacttcttaatcttacacaattgatgagggaacaataacaaagaaggttcctcagccagtctcaagagttaatcaccagagcacaggaaaaacaagcactgggtgatccctacatcatttttgattcattgttacctagcatataaaataatgggtttcattatgacattttcataacagttcattactagttcaaattttcccactatccctctttgtcctccttgcccttccactcttctagaagagtcgccttctgcgaaagcttttatcaataatgtcgaccaacagcctggagcccaagagaccaccacacggcaagcggtgagggacagtgacaaacacacagccatctccacggggctctgtgtgcttggtggcacagtgagactggggacagggtcccctggggtgaaagatctctctggagcatgtgctgctgctgctgggctgtgctctgggatgtaacccttagatgactgtggttgggcaagcactacagagggcatgacgcaagcctacagagcctatcacacacctgtgtttaatgcatgtatgggttacatgggtgggggaagatggatatgaaagagacgaatggcagatgacagatacacagaacacaggcagcagatggatgcacatgtaaatggccgacacgcagaaccgatacgcggagagacaggtatacggcgcatggcagacccatcgatgcagacactcacagacaggtgattgatagacaagatacatggatatacatggatgataggcagatgtatacatgggttttaaatggcaggtatgttcagacatgtaagtaggtgattgatacatacatgacagacagattataatgtatggaatctaggatcccgatgaacaaagcaacacaaggttaaacaaagcacatgagaagtgatgcaattgggaggcaaggggcacgagatgctgctgatcacacgtgcacacacgcatgcacacgtacttacatgcacacatacacactcacacatacacacactcacacacacatgcacaggtacctacatgcacacacactcacacatacacacgtacctacatgcacacacactcacaatacacacactcacacacacacacacacacatacacacacacgcatgcacacatacttacatgcacacactcactcacaatacacactcacaacacatgcacacgtacttatatgcacacacacactcacacatacacacactcacacacacacacacacacacgtacttacatgcacacacactcacacatacacacaatcacacacacacacacgcatgcacacatacttacatgcacacacactcacaatacacacactcacacacacatacacatgtacttacatgcacacacacacatacacacactcacacacaaacgcatgcacacgtacttacatgcacacacactcacaatacacacacacacacgcatgcacacgtacttacatgcacacacacactcacacatatacacactcacacacacatgcatgcacacgtacttacatgcacacacacacactcacaatacacacactcacacacacacatgcatgcacacatacttacatgcacatacacacattcacacatgtgcacacattctcacacttgcacacatgcatgaatacactgtctcacacactcacacacacatgcacacatacttacatgcgcacaaacacacaggcacacacacacatgcacacacactcatacactgcatgcacatgtagttacacccatacatacactctcacacatgcacacacactctcacacatgaacattcacacatgaacacacactctcacatatgcacacacatgaacacatgaacacaaacactctcacacgtgcatgcacacatacttacatgcacacatatacacactctcacacatgcatacatgcatggatacactgtctcacacacacacacacatgcacacatacacacaggcacacactcacacatgcacacacacatacacacacactcacacactgcatgcacacgtagttacatgcatacatacactctcacacatgcacacacactctgacacatgcacacacgtgtgcctgcacatacagacacaccaaaataatggttaaaaatatattcaatgcataagccagcaacagtcactctcaagtactgcatgctgcgtgtgtggctgcacacgccacacactgacacagttggctgtctggtgctttcctcaagcccctccacagacactaacacactgcaatctaacaaccgatggctatgaagtcactcgtctctgggaatttttcagttcttgccatgttatagaacacaattctatcctcatcgatctatcacctggagccatctttggccaaagtgacattaagcagttcatgtctgtgtcttaagataaaatcataggctggatttatctttcttccctagaataataaaatacttcaataggaaatcataacagtagaaaaataaagctataccaaatgttcactaaacaataaatctgggcactctgtccttccctcctccctcctgccgcctccctcctcccctagacagattctcactacgtagcccaggctactatgaaaccgtggatcttacagttatgttaattattaatccttttccccctttcttaaactctgagccatctctccagccccctttttcccctctctaagaaaaaagaggcagtagggagttcggtgtggacagttctatctcctcaggttacctcaggtctgtaataaaaatgaatctcagtaattctagttgacatttactttctcattttgactgctattgtttcatttctgaaaaataaacttgacaacaatacatgccaggacgtggcaagcaaaggagagtggtcacatcagacaccttattttcttccatcgtggacacttctaaatggcaagaaatgcctggtttctcatgcataaagttaaggataacatcaaaagacgctactttcttgccacagagatctaagactctgggacgtaatgtgttacaagatacaacaagtttctgtcaagggagctagagggcatctgtgtgctgccatcatctaaggaaagaaaagctaagaattccgagatgttaaatacatggatctcttttctcccatcgtttaaggtgtctagagtaaattccaaccttcatttctggcagaaattatgttagcagcaactggggtatctaaccaggcacaaaaagatgaatgataacaaactagacaaaattctaggtatctcgcatgtaagataaaaagattcattacagtaccttccagcaaacatcgtttctgcccgggctgcaatctcatcaatgtcaggaacaatagctgtgaagacacacagggagagtcttcatcttgttttaattcatgttattttaacactttttgtgacaccgaacattaatagctcagaaagttacaatacagttccactcaatcagtgtgatggcgctttgtcaacttgacataatgtagaatcacaatgaggaattgtctatattgggttagcctgtagacacgtgggcggggctgtcttgattactaatgttcattgatgtgggaagatccagcccaccatgggtggcaccattccctaggtaggaggtcctgaactatacagaagtcaagctgagcacaaataagcaagcatgtgtgcaatgacttctctctcctgtggacatgatatgactgagtgtggacatgatatgatgacccgttctctcaagggcatgttctgtgacttccccgtcacgatagaccataacctgaagatatagactgaaacaaacccctttctcccctaaactactttttaccagagtattttatcacaacaacaaaaacaaaactagaacaaacttgaacatcttaattgcagtttctgcgtgtgtgtgtgtgtgtgtgtgtgtgtgtgtgtgtgtgtgtgtgtgtgtgtgtattcagatgctatatattgaatccaggctacaaatgtgctatctcactcttcaatcctttaatataagctgtgcttatattacttacactatatattactgccgtcagatgcgttaacagatcaacaggcatcttagcaaaggcgctcttatttctaagtgtgtatgtttgtatttgataagtcaaatatacatgtgtccctccataaaaacacacaatattgcactgctaatggcacagaagaacaattctttctcctttacttttatttcatgtgtatggatgctgttcctgcatgtttgtctctgcaccacctgtgtgcagtgtccacagaggccagaaaaggatctcagatgccctgggactagagttacatacagttgtgagacaccatgaggatgtcaggaacctaatgagggttcaagatcagccagtgctcttgacagctggtccatctctccagacccaagggaaaagcattttttaaggaattaaaatccatgtaaagagccactctgttcctccttcaatgtgacctttctacatttgaaattccttcttccctaccaactggggagaggaagggccaggcaggtcataaccaaccagggagcagacagtgcatgaactgggcaatgctgaagcattggcagcagtggcttccagaaacagtagtaagaagctcctctgggaaagagcacctgtgtcccatccagccttcagtgccattctctgtatgtgacacccagcagcgtcagtgacctctggagcatcagaaccacctgcacctagaggagcagccatcagtgactcagccctgcctgctcctggaggagcaatcaacagagtggcatcccacaactacaccaactggagaaagagggatgccctgaagcacaggctgtacctgggctgatcagaagaagagatggatagacaagaagataagaacacattcaacaacatgaagagtcatgtggcgcctccagaaactagggactctacaacagcaagacccgaacatcccaacacagtggaagcagaagaaaatagccttaaaacgactttatgacgataatagaagcccctaaagaggaaatgaaaaactcccttaaagaaatggagggaaagacaaacaaaaaacaagaaatcaacatatccctaaaagaaaaccaagaaaaggcaatcaaacaggcaaaggcaacaaacagttcaagacttaaaaaatgaaatagaggcaataaagaaaacacaaactgaggaaatcctggaaatggaaaatctgggtaaatgaacaggaaccacagatgcaggtgtaaacaacagaatacaggagatgaaaaagataatctcaggcactgaagatacaacagaggtaatagattcatcagacaaagaaaatgttaaatccaacaaattcctaacacaaaatattcaggaaatctgggacaccatgagaacactggatctaagtataataggaatagtagaaggagaggaattctagctcaaagacacagaaaacatattcaacaaaatcatggaagaaaacgtttccaatctaaagaagagcatacctatgaaagtacaagaagattacagaacaccaaatacgctggaccaaaaaagaaaaaaatttctctcgccaaataataataaaacactaaacatacagaataaagaaagaatattaagagccacaatggaaaaaggctaagtaacatataaaggcaaacctatcagaatcacacctgacttctcaatggaaacaatgaaagccagaaggtcctgtacagatgttatgcagacactaagggacactaagggaccatggatgccaacccagactattatacccagcaaaactttccatcaccatagatggagaaaacaaaatattccatggcaaaacaatatttaaacaatacctatcaataaactagaaggaaaactccaacccaaggaaattagttacacccacaaaaaacacaggcaaaagataatcccataacagcaaattgcaaagcatggaaatgtatacacaacaacaaaataactggaactagcaaacactggtcattaatagcccttaatatcaatagtctcaattcacctataaaaagacacaggctaacagaatggatacaaaagcagaatccagccttctgctgcatacaagaaacacacctcaactacaaacacaggcattaccttaaagtaaaggattgggagccaggcattagtggtgcacacctttaatcccagcactcaggaagcagagacaggcggatctctgtgagtttgagaccagcccggtctacagagcgagttccaggacaggctccaaaacaataccgagaaatcctgtctggaaaaaaaaaggattgggaaaagattttttccaatcaaatggacctaagaaacaagctggtatagctatcctaatatctaacaaaatagacttcaaactaaaagtaaccaaaagagatgaagaagaacatttcatatttgtcacaagaaaaatccatcaagatgaagtctcaattctgagcatatgtgctccaaatacaagggcacccacatttgtaaaagaaacattactaaagcttaaatcacacgtgaagcccgaaacactaacagtgggagacttcaacatcccaatttcactaatggacaggtctgccagacagaaacctaacagagaaatagatgaattaacagatgttttgactcaaatgggcttaacagaaatatagaatattcctcccaaacacaaaagaatataccttcttctcatcatctcatggaactttctctaaaattgaccacatactcaccaacaaaataaatctcaacagatatttaaaaattggaataaccccctgtatcttatcagatcatcatggtttaaagttagaattcaatagtaacactaactgcagaaaacccacaaactcatggaaattgaacaatactcaaatgaatcaccaatgggtcaaggaagaaatttaattaaaaaaaaaaagaaattaaaggcttcccaaaattcaatgaaaatgactgcacaacatacccaaacttatgagtcaatgaaagcagtgctaagagaaaagttcatagcactaaatgcctacataaagaatctagaaaaattccacaccagtgaactaacagaacaagtgaaagcgctagaataaaaagaagcaaactcacccaggaggagtagatggctggaaataatcaaaatgagggctgaaatcaataaaatagaagcaaagagaacaatacaaagaatcaatgaaacaaagagttagttctttgaaaaagtcaacaagataaacaaaccaaaagtcagacagagaatacccaaattaacaaaatcagaaatgaaaaggggacataacaacagacactgaggaaatccagagaatcatcaggtcatacttcaaaactccactaaattggaaaatttcaaggaaatggacaatttcctggatgagtaccatatatcaaaattaaatcaaaaccgataaacaaattaaatagacctataacccctaaaataatagaaagagtcatcaaaagtctctccaccagaaataaaacaggaccacatggtttcagtgcagaattctgcctgaatttcacagaagagctaataacgatactcttcaaattgttccacacaatagaaacagaagaaagattaacaaactctttttataagaccacagttatgctgataccacacaaagatacaactaagaaagagaactacagaccaatctccctcatgaatactaatgcaaaaatactcaataaaatactgccaaatcaaatccaagaacacatgaaaaaatcatccaccatgatcaagtaggcttcatcccagaaatacaggaatgtttcaacgtatgaaaatccatcaatctaattcaccacataaataaactgaaagaaaaaaaaaacatgataattgtattagatgctgaaaaggcctttgacaaaatccaacacctcttcatgataaaggttttggagagatcagggataaaaggaacattcctaaacacagtaaagcaatatacagcaagccaatacctaacatcaaattaaatggagaaaaattcaaagggaatacaaattggaaagggagaagtcaaactttcactgtatgctgatgataggatagtatacatgagagagtcaaaaattctaccagaaactcctacagctgataaacacattcagttatgtggcaggatacaacattaactcaaaaaaatcagtagccctcctatatacaaatgataaagggccaagaaagaaatcagggaaacatcacccttcacaatagccacaaataacataaaataccttgggtaactctaatcaaacaagtgaaagacctgtatgacgggaactttaaatctgtggaaaaagaaatttaagaagatatcagaaaatggaaagatctcccatgctcttggataggtaagattaacatagtaaaaatgacaatcttagcaaaagcaacctatagattcaatgcaatccccatcaaaatccaagcataattcttcacaaacttcagaagaatgatactcaacttcatatgaaaaaacaaaaaacaaggatagccaaaacaatcctgtataataaaggaaattctggaggcatcaccatccctgacttcaaactctacttcaaactctactatagagccacagtaacaaaaaaagcttggtattggcacaaaaacagacaggtagaccaatggaatcgaatcaaagaccctgatatcaatccatataaccatgaacacctgattttttttacaaaaaaaaaaggctaaaattataaaatggaaaaaacaaggcatctttaacaaatggtgctggcgtaagtggatgttgacgtgtagaagaatgcaagtaggtctgtatctaccccacgcacaaaactcaagtccaaatgggtcaaatatatcagcataaaaccaaccacactgaacctcaaagaagagagagtgggaagtagccttgaacacaggagaccacttcctaaatagcacaccagtagcacagacactgagatcaacaattaataaatgggacctcctgaaaccgagaagcttctgcaaagcaaaggacacagtcaacaagacaaaatgacttcctacagaatgggaaaagatcttgaccaaacccacatctgacagagggcttatctccaaaacatataaagaactcaagaaactagacatcaaactacaaaataatctaatgaaaatatggggtacagatattgagagctctcgagagaacaatctcaaacagcagaaagacacttaaggaagtgctcaacatccttagccatcagagaagtgcaagtcaaaccatctctgaggtaccatcttgctcctgccagaatggctacgatcaaaaacactgatgacagctcatgctggagcggatgtggagtaaggggaacactcctccattgctggctgaagtgcaaatttttacagccccttggaaatcagtactgtggtttctcggaaaaatgggaatctgtttaccacaatacccagcaataccacttttggacatataccaaaggatgcattctcacgataaaagaacattttctcaattatgttcatagcagcattattcataatagccagaacctaaaaacaacctagattcccctcaaccaatgaatggataaagaaaaggtggtatatttacacatggagtactgctcagcaataaaaagcaatgacatcttgaaatgtgcagacaaatggataaaactagaaaaaaaaaatcctgggtgtggtatcccaaacacagaaagacaaatataatatgtactcactcataagtgggtattagacataaagcaaaggacaaccagcctacagtccataactccagagaacctaggtaacaaagacagacagacatggatctgcctaggaagggcaaacaagacaagatctcctgagtacattgggagcatgggggcagagggagggtagaagggaagaagagaggagaaagggagaggagctcaataaaaacaagctcaaaataaaagaaattccttctctttttcttgtagaatggggtggggtcatttgccatgtgacccaatcacaagtcctcaccatgccctgccaccaccatattgaagatacctttactaagacaacatgttcaaatgatagattatgtatttctcatatctagagcatgaaaagagatcaagatacaaatagagggggaaatcctatgagagagaaagagaaagagacagagagagacagagacagagagagagacagagagacaaagagagagagagactccaccagaggattttctggcgtgcctttaacctttgcttgggtactttactgacactcagagcttgtatttccagaagtctggcttctgggagccagtaactgttatgtttctgtcaatgcagccgccagcatgactttctggttctgcctgatcattcctggaaacagccctttggggttctgcacttctgggaaactgctgtgttgcaggggtgccaggagtggctcctcgcctaggcggaagggtggctgctggtctgcagggaaggctgcccgcagagcagaggtgggtagcgaggcaactggtctggtccccattctcactaaactagcaggcaatggcctgttcttgtctgaccagctgatggctggagaaggacgtggttcctaacactgtccaggagtttcctatctgcactgctgtctcagaagagttttgctaactggctgtctgtatcctaagatgtggtttatagaccaccaagacgcacctggcccaaccaggaaaaaggtgagctaacatttcttagtcttcacaaagtcctttctatagcctcaaatttcacagccatttctgtgctctttgggttatgctccaagtctcagagacattcgaatgtctaaatgtgagatgggattcctgagggaaagacacagagcctggcaccaccacaggcgagccttcgggagcccttcccctttgttctccggctaaccatggcttccccgcaaaccctgccctgccagctgcacttcacgctgctctttgatccaggcatgaacactgttctcaggttttcaccaaaagaacaaaatgtgcaaaagactctgactctgacgctgaagaggcctcaggggcccggggctttgatgactgtggtagccctcactgtggacctgcctgaatttagaatcaccatggaaacccaccctggctgtgtctgtgagggtatccgggaaggtttcatggaggtgggaagggccccctgaatgtgggtggcaccaccacaggagttcctgtgctaaaaaggggaaagtgaaccgagctccagcattcagctttccctgcttcctgactgtggagacaatgtgaccagtcacctcgcaccccgccccttgctgccccttccagactgaattgcttgtcacccttcctccctcctgttgcttccatcacagcaacactaaaaaatgtactgatcttcccaagtcactcccctgactgacttttatcatctgttaaattcgtaataacagcacctttacctatcacagtggaggcagtatgggacaggcatgtaccagacacagtgccaaaacagcaagttcctctttgtactgctctgtctcagtttcacctgggagagattgtcatcttctgacatagaaatacttttgttctaagacaggtatgaaaggtgcctggggtctttaaagcaaagagcaaaatcaaggatcacaaagaagcttatggcaatccattgttttgtaagctgattaaatacacacacacacacacacacacacacacacacacacacgtatgtgtatatatctatatatgtattcacacacgcgtgtgtgtatatacatatacgcacacatgtgcgtatacgcatatgtatatgcacatacatatgcaaacacattacacaccacacatgcatgaaaatgcacatgtgtatagacatatatatatacacgcacatgcacacatatgtggacacatatgcaaatatacatgtatgtatatacataccacacacatacatatatacatacagacaacacacatggacacatacacacatatgtgtgtatatacacacatgcacacatggaatctgaatgcaagcccccacatgggtagatggtgctacttctagcaaacatgggttattttaaattaaaacccagtgcaaggcacagaatgcctccctgtgagttattgacccatcagagaggcccaggggggcacccagaacaacacagattattgtttgctcctgattgcccctcaaaagtaaatgacaagagtcaattgctgaagacaccactgactttggactcaagacaaagagcagtcaaccccatcagagcccaggggagaaaatacttcaaccctcacctggctgtgtgccggaccctgtgtatgtcaatactgacacgctgccaagacgtgctcaccggtgcaatagcggcatgatggctataggagtgaccagccaccttttgattgggcctgaagcctgcacagcagcagggattaatgcctacacaatagctcatgatatctatgtttatatcattgcatagacctgtactgctctcagctctggtcagagaagcttcttgttgcgtgggaaaaggttaatgcagagaaccagtcaaaatacacagtctaaatcacaccgagtgctcagctggaatgggtcatctccagcctcctgccatcaccatccaaggcacagggaactttgtagatgtgtcggaaagaacgcaagagtccataaagggagaggagtgctttgagatgcccgtgttagaaatagtgtggctggcacactcaccaactcacagaagccttggacacctctacaagaccaggccggccaaaactctagcgtggatattggcaactgaaggctgctgagcaagagagagtcactcttctttggggacatggctattggtaggttgaccataccctagtgaatagtcacacacccatgttcatacgggcagcaccgagtggattcaagggttgccaataacaataaaacaaggaaatgaactggggagggaggtgaggtgtgtgtggggtgcaggggttggagggagatagtgatggatggatatgatcaaaatacattgtataaatacaagaaatttccaagaaataaaaagtatcatttagccggcattggtgacgcacaccttaaatcccagcactcgggaggcagaggcaggaggatctctgtgactttgaagccagtctggtctattgactgagttccagaacagactccaaaacaatacagagaaaccctgtctcagaaaaaaaaaagtaacatttaagataaattttaaaaagaacataaaatgcaagagcaaatcctatcacaaagttacctgatggtagcaacgagtccggggatccactggcagaggtgtcaccattgtcattgttctccccaaattccttcttgtatatggacagcatgtatgagatccggtaatccagcctgacgctcaggatgaactggaagaagcaacatggcaagcttagttccatgagccggtgctgagagacgccacactgctaagatggcgcagccagcagcacagcgcttaaacacgagacgcaggctggggaaacagctcagagggcaaagcccttgccaagaaagcctgggaacctgggttgcatcctcagaactcatgtgaaggtgtgaggaaggaaactccatcaagttgtcctctgacctccacaacaaacactgcgatatgggtgcccccatgtggacataatgaatttttaatgcaagccgtggcacacaccaacaaccatgctgtcaattgtccaaatgaaccaatcaaagaccttgtttgtaaactataaactctcggttgtttacctgttttggtcagttttaaaatgaaggaaaggattatgttttcattggtcagtactaatgaaagcccacagtaattaattaatttgtgattgtttttttttttctttttggttgtttatttggttgtttggttggtttgttggttgggtggttggttttgagacagggtctcctgtaccccaggttggcctcaaattccctatgtagcagaggatacccttgaactcctgttccccagagcttggatcacaggtgtgtgccaccacaccggtctacatcgagttttagaaacaaggaaatctggcaccccacactgttctctgaacacttcagggaggggcgtcttgtgtgtctgaagaggtaatgctggtatgaccccagacacactggcaataacctttgtggagagggagatgcaggaacggcttttgtgcccagaaagcctgcagctttaactgcagtggagttgctccagccccggggacatctgcccagaagcaaggacagccaggatggctggaatgctggtgcctgggtttctccatggtgtctgtgtctcctctgttatcatcacctcagtggctgagatgtggacagcgatgaagtagcccttaaggcctgagctctgcagggagccttggggaacccaaacattgaaaaccccttcctgaaaggagcaagtaactgcactgggaaaacgggggacacctgtgttaggaggtgacctgcaaggctgagccgtgggatcagagaagacatccggacggatgtgctcagatctcagctggcctgagatgggctggatttctgagcatagctattaccagtgtcctgtagtctcaaagggcctcctccttctgggaacgttagatgatgtggtagcccaggctttagaaaagctggcttctgtgttctcagcagccttctgctcgtttccacaaccctcccttcctccccaggcctcaccccctctctcagtgctcacactactttggcccatggccaccatgtcacacacaattttctgttgcaatttcatgtttcttcagcgtccactgcaccttgagtctcttctccacccatgagagcgagctctcaagacactgaaagtgtccgtatgacgcttcttatgattccatggccagggtttggatagatgccccctctctctatttccccctccctctcccttatctttatctcttcatacctccccttcctttccccctctctctccctccatctccacccatcctcgcccaacacacacttggaaggtgctgcatcaggatggaagaaagcctatgtcagctcctcttacttcagtttatccacatttgatagccagggaggaaggaagacggtgttgtataaagggtgcccacaggactggggagacgctgctcttgcgagagactcaagtttgattcccagcacccatgtcagatggcacacagccacctgtaactccagctccaagggatccgatactctgtggtttccgcgggcacctgcattcctgtgcacacaccacacacacgtacacacacatacacacagaagttaaaaatcctttttaacatagtactttaaggtggccagggtgtaaatgtggctcttgaggagtataaagtccagaagtaaagataaaccccacagtgactcttagtaacctgctgtgaatacaacacacgctcaatgaagagactccggtgaataggacagagtcagggctaggcaacaggtactcaatacacagtttttaaagctcaagtgtccaaagggcgggggagagaattcaatacgaaacactaatgaagcattcacgtctgttggagatgaaaactcacagaactgaatttcacaacctttgctcctctaatgtgtctcattatgaagatgcagatagtgtaaaattaaaaaaaaaaaaaaagcagatgacaacaaggcagagaaaggccaggcatggtggctcacacctataatcccagcatcctcagcacctgggggactgaggcaggaggattcccatgagttcaagatcggcctacattacacagtgagctctggcccggtcagggatacagaacgaaccttgtcttaaaaaataaaaataaatttaagaacttgtaaaggcagagagaataagtaaggtcagagggcaagaacaaaataacgctcactgaaaaccatgttcttcggtgaggtaaagaggggagcccccccccccaggaggaggggctggcagagggccagcagcagccagggcctgcggccaccaaggacttgatgaacggccgttctgaggaggcagcagattgacagcaccacaccttgaaacgggagaccctgggtggacagtcagnnnnnnnnnnnnnnnnnnccagccagactcagccacacagcacacttcccgctgtcactgcgaaaggcaccattgccaaaaccgcggttgaaaacggggccgcacgaatcactggtcatccctcatgccatggacggggtcgtgaggctgacctggggccccttcagtactttctcagcttcaggataaaacattacatatgaagttccaaggccatgaacacagggtggggaagcctgccaacatttcttgggacttggcctttggaaaccctggaggaactgggaaatgttttatgattataaatctaattacttagaatgaggaatgcacggagcctgccaggactgctgacccacttctggtagctctcagtctacgttagatgatgatgaaagatgtggggaaactcggttcacatcctcaaggcggtccggaaagctacaggctccattctctgactctggtataaacactacaacaaaggtaccatacgcctgcttcccaggcttacctcccctcccctcaaaaatgctagaaatcatatagggatctgctgcatgaaataactgagctcattaaattgataaaggtaggtattaaactttgctaatgtgaaaaaaatccttagcctcttagaaacacaaagggaggtaattgtgtaaagtaataaaaccaacaattaacaagtctggtaaataatgtcttgggggtgaagcagggtcttccactgtcaggctggccttgaactcacagaaatcttcctgcctcagcctcctgagagctagatttataggcgtatcctaacatgtctgacataaaactcttgtgtttcccataacaacaggaaatctaaaacatggaattcacaaacaagttccaagcaactgaaagcaggaaaatgattggaatcccatcattaaacatgcctgctttaaaaaatctctcttaaatgaagaaaatatccaaccggggtcaacactagctgatattaaacacacaggaaagcaatttaccaagctcaaagcactccacagctgctagacatcagctattctatcccagagtatttcaagggacagaaaccactggacgagtgtgcaaagaagcgatggtgtgcgatgcattgccagctctgcccttcacttaaaagtaataagaagatggggcaatagcttttcagaataaaatgagaccaataacatttcagactcacgtgacaccgacagcgtttcaatacatttacacagtgaaaccagatgcagtgcctaacatctggaatctcagcactcaggaagctgaggcaggaggattgccacaaggtccacatgagcctgtgccacacacacacacacacacacacacacacacacacacacacacacactcacaccacactcacaccacacttacaacaacaacaacaacacttaagagaaaccaatggggcccagcatcaccgccggagtccagctgcaggacgcacctgtagaatctcaatgaccttcagcttggtgtccatcaccgtcacgtcctcctggtcaccggggcttgcctgcttgctgaggtgggcgctgggctgcgcttcgggcacactcactgggaagatggagcctctgctaagcaccatttgggtcatcatctctcctaccccgtggatggtcctcatgacattgttgcctggcaaaagaagaggactgagttaacacgcgtaaaacctgggtggcctcggcatcgacacggcttgttaatttcatcatgaggacttggctgtgttcctcacacccccacatgtaactcgctgcaccttggggatctttgggttttcattggctattacaaaagctaggacgtagctgtgcaaagggcagtaggtgtcaccatgttgtagaatggcttaacaaaccagaaaaagaaaatggttttatctctaagatacagcgattagcagtgggggagcaaagactgtgaccaagtccctatatgcaaattaataaggttctcttatccctttcttataaaatgtttcagccctaaagtttaaaatctagaggaccaggaagagaggatggtgcctgttgccctccctgagaggctggggcagggggatggctagagtgaagaagctctaggccagcctgggcaacatgacaagagcctgcttcaaaagaaaagaggacttaaaacccaaagagcacaagctttcttcggaagctcagagaaacctaaattcaccatgtggtttctccgactgtcactggctctcatcattgctttcagaagtgacttaattaagtaacagagaaacaaggctctgccctgcacagcctgttgctctgtaaacaccttgctgagcgtggcccacaaggattgtttcaatggttttagttgatttttgttttgtttcttaagagaaacttagaaatcatcttaattggttcgaaacactaaagcagacctcttcacttatgcccctgaaggtcagcctgagaacccttatgacatcagggatggcagacccagccacaggctattttctaaacaggcctcccatgaaggtccgaagcatgtttgcacatgtgtgggccacccatactgtcacttccttatgtggcttccctacatctcaaaccaccttttttttttttttttttttttttttttaggccaataaatacctttgaaccacatccttagtgagaaggattggagtctggctgcccagggaataaagtgtctgttgcaaaactcatggttttagtaattaccaatacagcggggtggtggaaaggccctggctgggtaccaagagcgcacaaactgtcagatgccctattccatactcagaccaagggctgtggggctctcataacataaagagagcttggacatgggatcaaagcttctcatggggtgggggggctgtattctccaataagcttgcattcacttatctcctctgactagaaatccaattattcagaacctaggaagcattaccttatctgaggccattatagagacagatgacaagcacaaatgtgttcactgaggaacggctgcctgtcatcccgtgagtttgactcggtatccattttctccatacacactacacaacacatcttgcgcccacacctccacagtcagccagccaccggaacgccctgtcactcttaagacttgggtcccaccatgtttcctacatcccagctcctacaacaagcaactggactcaaaagaataagtatcaacccttctttgcaaacagtggtcttgggtgtttgtgaaattctgcctgaaggaaaggcctcggcatctggcaaagaacattccagaaatctggagggtgtgagccaagaagaaggggaataatgtggcacacgcctttaatcccagcactcgggaggcagaggcaggcgggtctctgtgagttcgagaccagcctggtctacaagagctagttccaggacaggttccaaagctacacagggaaaccctgtctcgagaaaacaagaaaagaaaatgaaaggcagggcaacagaaccctgaaggataaaagaaatgtaaactgtgggaatgctcacaggattaaggcacaaataataaattttaaaagaatttaaaagatgtctaaaggaatgtgtatgggctggacggcagtgcgccatggtagctatacacaagtacaccgttaaaagacggagccgctttgaatccaccgcctgctccaactgcatggctgcctgagtcaataaagggaaatgttccaggaacacgatttagagtgcatggagcactggccatttctcggatgggcatatttcaggcagaaatgatcttgagtttcattttgaagtcctggaaatctttgttatatggtgactgggataacaaaaagggggttagaaaattacataacaggaatttccaaggctggacagaggtggctgcaactcaaggacgtgagagccctctgctttctagcagaataattgcaaggcggaggcaaccgttgtccaggactctcaaacaacccaaccattgttcccaaatcactgcacagcccccatcttggccaggtgttgcaggtgtgctggtggtcacaggcagtgatggttttaagtcactgtacctttaccccactgtggagtatgtttatgggctagcctccgagggacgccttctcacactaatgaggaacaggcccctttgttaaccttaaccctggctcacacagcagtctgaggcacccaccgtgtctggatcttacttagatgtgcatggaaaataaccatttaatcaaatgattgttgggaagaaggttagcccagacaattctttccccaaatatagatcctgtcaccaacaaattaaaatccagatgccaaaaagcatcctaatgtctaacacatgtagtcgggaagataggagggtgcattcccaccctcccacatgcctgtggcatgtggaccacagaattctcctggcttttccatgtatggccaactcagaggtctccaattcaaagatgctgcatttttcacttgtgatgagaaatgctaatgccgtggacttctacagcttaaaaaacatcaacccaacccgtgaaaaccacaggcacacagagtgcccatgtccactgtacagatcacaggcacacaagtgtgtccatgtccactgcacaagtcacaagcacacagtgtgtccatgtccacttcacaagtcacaggcacacagagtgcccatgtccactgtacagatcacaggcatacagtgtgtccatgaccactgcaccgatcacaggcacacaagtgtgtccatgtccactgcacaagtcacaagcacacagtgtgtccatgtccacttcacaagtcacaggcacacagtatgtccatgtccactgtacagatcacaggcatacagtgtgtccatgaccactgcaccgatcacaggcacacaagtgtgtccatgtccactgcacaagtcacaagcacacagtgtgtccatgtccacttcacaagtcacaggcacacagtatgtccatgtccactgtacagatcacaggcacacagtgtgtccatgtccacttgcacaagtcacaagcacacagtgtgtccatgtccacttcacaagtcacaggcacacagtatgtccatgtccactgtacagatcacaggcacacaagtgtgtccatgtccactgcacaagtcacaagcacacagtgtgtccatgtccacttcacaagtcacaggcacacagtatgtccatgtccactgtacagatcacaggcacacaagtgtgtccatgtccactgcacaagtcacaagcacacagtgtgtccatgtccacttcacaagtcacaggcacacagtatgtccatgtccactgtacagatcacaggcacacaagtgtgtccatgtccactgcacaagtcacaagcacacagtgtgtccatgtccacttcacaagtcacaggcacacagtatgtccatgtccactgtacagatcacaggcacacagtgtgtccatgtccactgtacagatcacaggcacacagtgtgtccatatccactgcacaaaccacagatgtgcaggaggtcccatatccattaccacaaggaaatttctaattctagactttgaagacaagtccaaggtgaccagtactcaacgctgaaaaaaaaattctcactacttgttagccataattagctaacattttcagcttttcagttaagcagttaacacatattctttttaattctctggaaaataaacaccctagaatttcaattttttaaagataattaactctacatcaggaatttgagctgatagtatgttgaaagattagagaaaatgggaatcatcatagttaggtttaaaataaaaacaatcaggtgtgctctctgtgagttcaagcctagcctcatctacatagcgattccaggacagccagggctatatggagaccctctcaccaaaaaaaaagggggggaaggaaagaaaaggaaggaaggaggtatgaaaggggagggagaaaagaaaaagagaaattgaaaaggagggaagtacttaaagagggaaccccaattccgtgagagaaccctgaaatcaaaggatccgttgggaagacgctcttgtttttgttgccccaatgagccgtgtctcatttgtgtaacactgaagccgcacaaactaaatttaagttttctgtctcataaatcactccacggggacagagttacaaatcacaattgggtctgacaattattcacaggtggatttagaggaagctcgagacttagcagaactgaaatttacccacagctaatttgtgtcttgttttaagtcctctctgcctgttatctagagtcaccaaagagggagtctcaattgaaagaggagttgccctggtcacaatggcctgtggcatttatctctaccgttgatggatgtgggagggtccagcccactgtgagtgacaccattcctagggcagtgggcctgggctatataagaaaactatcccagcatgcccgaaagcagtctcctccatggttctgcccccacttcccttagtaactactgtgacctggaagtatgagatgaaataaccgtaccccccaccccatccctgcccctccccgccccctgcttgcttgtgtcagagtgattgctacacagtcacagggaggaaatgaggatgtcaccacccatcgcctctggatatcacagacgacttgggaggaaattacttcccatcccctacactggagacctaaaaggattttgcaccacacgtggccaagctccgtctcatcactgtcaaacactgacatttcagtattattgcaaaactcaggattttaatctgcaaaactgatccttaattcttcccagccggccagatgagccacacatggagtcaattctgctctgtgattgggagcatcagatgggaggtatgcagggttctcacaaaagtgcaggcaggagtacaccacatgaagtccagacggggacattcccaccacccagagtgctccctcacgccctctagagtcaatcccccaccaaagtccaccactccaataccaaagcaaccgtcctgagcgctctcgtgtcattcatgtgcacataaggtaccttttttttccttgtttgacttttcaggtgtgaggagacatgtatttcatatatacatggaatcatgtgtgtgtgtgtgtgtgtgtgtgtgtgtgtgtgtgtgtggcgctgcttagacccactcctgtcgctccaacagctccagaggcatccagttctcctcacagcttcagagacagaagtaaactcctcccagcaaagctgaggaaatgcttcaccactgtgaactggccaacttagctgaggggccgggggctcaaatctgcatgtggtgttgtttgcttctgacacatctcacagaaacatagatgaaccttgagtaaatcttccaaaaatctattgactcaaaatgactgaaaaatattaaaaatttctgcaccgtgattatgagcaaaccccgcctgagggagctataaagagtagctttgtctcgttttgtgaactttgtgtacacctccccgtcaatcctcctaaaagtactgacagtggccatctaaatagactgttaaaatggtacagcaaaaaggaccaaaagcatgtcgtgtaagtggccaaatagaatcataggtacaaaataccaggtggtgttttgagctatttgtttatcatgttgttttccattctctgtatgtctagaaagctcataaagctgtgtgtgtgtgtgtgtgtgtgtgtgtgtgtgtgtgtgtgtgtgtgtgtgtgcattgtgtgtgtgtggtgtgcacatgggtgcctgtatgtgcctgtgcattcacatacatgtgtgtaagcgtgtgggtgagtgtgtgtgcatgggtgccagtgtgtgtgaaagtgtgtctgtccattcaggtgcacatatgtgtgcaagtctgtacatatttgtgtacttatagaaaccagaggtcaacctcaagtgtcattctcaggtactatccagctttttgttggtggttgtttggttggttggctagttagttggttagttggttggttggctggttagctggttagttggttggttggttagttggttggttgattggttggttgattaattgtttggttggttgtttggttagttgcttggttgtttagctggttgattggttagctatttggttggttggttggttggttggttggttggttggttggttggttggttagctgactggttagttaattggctggttggttgtttagttggttgcctggttatttggttgactggctggttacttggttagctggctggttagttggtttgagacagggtttctcactgaccttggagtttcaccaattaggctgggttagatggctagtgagccccagagactcagctacctcagcttcctcagagctgggataacactacacattgctatgtctgacctgacctttacacatggattctggggattctgatcttcatgcttccatgacaaagactttactaagttaccttctcatttaataattttcacaaatcatatttggaatgatattttaatatgcaaatgtatgtatatttagggacagcatacaatttatgtatagtcaagtgaactgttctaaataaatatttgtataaaacaaataagtatatgttagtacactagacctgatacaggtcagctttaaaatcagaaacagaaccaattctcatagcttttcatttcactattgttctctttgcttaataaacctgaatcttcaagaccaaagagtcattagaaatttttttaattaacaaataaagacatgtatttgtaagttagggtctctaaaaagttttgtctgtctgattcacacttctcacaaaaggcatgtcacatatgtttgttctagtggtgagcaagacaggaaagggcagcaaggcttatcgatgacagcatgatccttagcaactgtgctgtgggacaaacttcacagagggtaccggcacaaacctacatgatacagcctgatgtatacctgggctaaacagcatgcacagtcttacatgtgatcacatatatatttgccgaacacagcatgctatgcatgactgcattatctgaggtatagatgcagctcactggagatggcaggagactgtgtagtaatatttcagaaacagcaagaggtaaaactcatgagatgacggcatttgggcacagctgtaagtagctgcgtcatcattctctagaaatggcaagagctacagaaagggcagaaagtgaaatttaagaggatgcctttgattgatagcagagtaccagagtcaaagggactgtaagaaggggaggagcaccagttccaaaacattaaaacactgtggttcagaaacaacaccgttcctgagacaagacagacaaccactggaaacagaacaatgccttgtttgttttaaacttttgatacaataaaatcacctcaagttaaagcaaaaattctttgtagatgcaaactgtcctgtactgacttcttgggaaacttgagaaaagcagagaacggattccacagcaggtggtgcacagaccctaggttgaagatcctaggtctctattgctgaagacaccacacactttggacacaggatttggaagattcaggctgtatctaatacaaaggcctcctagagcctagctttcatagtactagaaggtgctgtacaaactgttaaaagagcaaagcaatcaatattcctactcagttgtgacacctgtaaatcataacagtgaccagcaaggcaaaatacccctgtggtggtctggataaaaatggccccgcaggttcatgtatttgaatgcttggtccccagttagcaaaactgtttggggaaggattaggaggtgtggccttgttggaggaggtgtgttactgggcgtaggctttgacttttcaaaagactgcaacctccctgttagctccctctgcctagtatttgtggatcagacataagctctgagctctcaggtactgctctaggcccacgcccacctgccggcccaattgcatgctccctgggcatgacagtcatgtattctaaccctctggaactgtaaaccccaaattaaatacttcctttttataagttgtggtggtcatgatgttttctcatgacaacagaaaagtaagacaatctctaaagatgcaataatggtatccttatcttggagttaaccaacagctgtctaattggactgctcgatgggagtgaaatcatgcccatctaccagaaacagagcccactacccaggtctagtgatatcatgcatctcagaggagaacctaccaccgccatttgactagaccagcatgatttctaactctttatacccacacataagtgtaggtctcaccccacatcaaagaaacctctcttcgcagcaagcagatactatcacagaaaaacacaaacggtcaaattgcaaaggtcaactgattgtggggtgccattcccagtgggtatatctgccacacaactcctgccctaaaggcttagggagaatcttggaagaggggagcaggaagattttaagggccagaggaccaggaagtctactgtgaaattgtgtagaaacgacaaggaagctacacccatgatacgtcaacaatatggcttcctaaacaagacctaaacaatgaaaacatcaataaacatgctaacacagaaggaaatcacacagggtccagctcctaaacaaagaactacaggcaactagtgaccactgagggaggcataacttagcttctcttgggaatgaagcctctaattggttatccaacaaccaagtggtcagccctgaaatcgtatatacccaggacagtctaaatagactgggcaggttgtatttgcaaatgcatgcatttgtgcatgtatataacaacaataataaaaggagccatcaatttgaggaggagagtagaggtgtgggggaaggactggaagaaggaaaggggagagtgaagcaaagtaattttaaatgtttaattaaaaataacatcaaagatcaaacaaaataagagaggaaacacgtaatgttaggagagataaactggggagataggtaaggagttggctggaatggaacgagggtggggttgacctaatcgcagcacatgtatgcgtgaatatgatttttttaaagaggaggaggaggagaatgaggggagggaagggtgggtgcagtgagacccacagttgtggagcagcctttatcattagcaccaggagaaagtcaagtctgggactggaaagaaagctcaatggttaaagtgctttctgcagaactatgaggatctgggatcaaatacttacaagtcaggtataattccacctcagagggcagagagaaccacagagaagctagctagtgagaacatccgtagccgtactgattagctctgggtttgactgagatacctgcctcaaggagtgtgatagaagagtaatggagggtggtccccagcgtcaaccttgggccgccacatgctgcacacccccagatgtgtgcacatgtgtgcgcacacatgtacgaacacacacatgtgctcacatacgtatgcacacacgtgtgcactcacatgtatgcacacacaccacgtacacaaacacgcacacatgcaaatacacaccatatgcatacactatgcatgcatgaaaaggaaaacaacaaaatctttggattgtacttcctttgctataaaaagaaaacaattgtataatttaataaatgtgccacttgcaaataattccccagacgtcccatgtgttgaccattaagttcttctgttttttgtcacttctatgtgtgacaaagaaaaaaaaagtgcctcctgaaacaattcttcaatccaaacgatgagttccaccgtcagcgcttttaaatcacagacagcgaatgacggtatgatgctaggcaaagggccaagagccaatgcccttgcttgaaaacagtatttctttccctgactgacagcccagccaataagctgtgttagatggatgagtgtgaggatccgaatgccccctttacagtaagagacagggcactgtggccagctcccagtctctaagagaattctttttctttactggcttggttgttgttttgttgttgttattgttgttgttgggggttttgtttatttgtttttttttagttctttgagaattttgtacagtattttttgataatattcttctctctcccacaaattcctccaggatctgccacacacacacacacacacacacacacacacacacacacacaccttcatgtcctttaatttttcctaactcattaagtacaatttgtacctctcccgtagacttgggtatgggaacatccaccagagcatgaataacttagcaaggaccacaccctcaaagaaacatgattgtccctctcccagcagctgtcagtgatcgatggcttctcagctcggagtgaaactttgtgcccaccttccctctgcatgctgggattttgtctggcttaagcgtcatgggtcttgggcatgctcacctgctctggggcctggaagcggaagcttagctcgctcagcacacttctcttaagtggctctggagggggcacagacatgggcccctctctctctctctctctctctctctctctctctctctctctccacatgacgctgctcagactcacgtagtccttgttctctctgcacacaaaactcaagggtctgtcccctttctccccacttccagacttactcgttctagaagctcccaagccaccacccgggaacttttaggtcccttcctctctatgtgttctcatctatgtgactctctcggtatttcgactttctggggcgattatcacacaacccccttttatttctttaaggaaggaaggatttttcctggctcacagtttgaagaggcacagcctgtcacggtggagaagtcatggaggtagaaacgtgatgcaccaacttctcacgtctccacagacaggaagtggagcctggccataaacgtcagtgctctctcctagtaacctgcttcctccaacaagattcttcttcagtgacacaacaactgtgaagccagtgttcaaacacctgagcctatgaggacagtcacagtgtgtgcatgcttcccccaaattgagacactccctcccagagagaggaggaaaactcataggacaaaggaagtaaatgaaacacacaagactcaggaagtttctgaaactttacataatccataaaccccctcactgaggttatagatgcaataagcaattgctgggtgggggagatggctccattctgcctggctgccaggaagttgtaagggagctccagggttgagcttacctgagctgcccatgctgggtaagtttttgagtcacacatattcctgttagtaacacagtaactcactggtcaccgagctagatttgaataggattatccctttgctctgtcatcagtgcctgctccagagtaaagagacacgtgtccatatccctagtaaaagctacacaaaattttccctagagatcctagtagttggagctctcagaataactgttcagaccatcactgtctgtttctgctgcagtaactaagtctttgctggactagggactcaagctgcactgaaggtgaaggacttaaatgttttgtgtgtgtgtgtgtgtgtgtgtgtgtctgtgtgtctgtgtgtctgtgtgtgtgtgagcacgtgtgagcgtgtgtgtgtgtgtgtgtgtgtgctatgttaaagagactgagattggggtaacagcaattcattccttcagcttttctgtaaaaccctcatttgaaattactgatcagacagacagtccctctttatgcctgaacttggaaatctggttttccttttccattatgtcctgggtactactgtggccattactgtgctctgtgcagaggccctgcccccagccagcagcttcagcactgtgtcactcaacatgactcctgggcagggtatcccagcttccctggtgtctcacaccttcttccacaatgaagccagaagctaatgaatgactgccacaaagacatatctgaccctcttatctccgtgtgagacaactcgtgctgacttgaggtctcagttcaactgtactgaacatctgctcatctgcccaatcctcctcctctgacatcctcacagggttatgcccagcacacacactccctcataactcctagaaacaactttccatccgaatgtaatcaccattacaaaaaaaatgtatggttattatatggacactacggaaagtccatatagatgcaatctgatggttcagatccccagaacccatggcaaagccaagcaggcacagtagctgtgcagccccagcactcctggaagcagagacaaggggctccctagggcaatacctagagaagcactctgagtttatcaggaaatgttgcctcaattaataaagtagacagctgtcaaaacggacactgactgaagtccgcttcagacctacacacacacacacacacacacacacacacacacacactacagtattattaaaggaaactgcttgaatgcccaccctgttatcatgtaacccatcaagagccagtgcctgtgtggattgcttctctgtatgtttgtttttttatctcacccctaattaataacaaaaacattatcacatttctcaaaagttcttacttccatcttgaaatttgcttaatcgttcaaaatacgatgacatgggggtctggacgatgtctaggatggccagcagggtccttgtcagccgcagcagctcactgaagctgtagaatccaaagtatatcagattccgagccaggtggaccaccttcacaggaagagcagaggacagaacagcattggaaaatggaataaacatttgcaatttttacatctaaagtggttctggtgtttctaagtccctaattctttaatacctaggatttaaaacccctgtaaaggctgctgttcagattctgactgatccaaatctagggtctattcataagaggccttaaggtgatttaaggagtttatgttacaatatctaccacttaattaatgtaagtcaggaagataccacttaatcagtggttaaattactttaataaatgtgagccataaaatggcccagagttttatgtccccaatcctggcctgtggcctccttggtactagagaaataattaagtgagatgcagcctccaagatacggctccaatgtcggctgtcctcccacgatgtgtcagattggcgtgtgcctcagcagaaatgctgcgccatatcaaggttagccaaggttagacactgcatttaagtattctctctccctttctcactctctctatttcccctcccttccctttctctcttcctctccctctccccctctctatttccctctcactctctcccctccttactctctctctctctcctctcgtttttcttgctctcactctgtgggaagccaggtacactcatggaacactcagcccacagaaaagccatgtggcaaacagctgaggtgtgtggacaagccagcacagaagcagagccaccagcatccacctgagcgaggcagaaatggcaagcatttccagtagtgactgaacagacaccgccataccatacccaggctagtgactggcagaactgaagtttactttgggctgccacactggggatgagatgtctcgtgacagtggacagctaacacaccaggtatggtgtgacagtgttctctctctggttttgctattacattgtcttcaaatttcaattcatgtcaatgaggctaactcatcattcctgtgaagatgggggaaggacatctaaatacaaagtatctaaaactgtcactgtttaccaagtacaacaaaatttacatatatgaaagaaaaataaaacaaggaaagctataataaattgataattgagatagaacattttaattatcaaggcatacaagaattaaaataaaatgagcttttatttgtaattctattgtccattagtataactggggcaaggcattactagtcactgagtacatatgtcacctaactcactaagaaaaggtggggtttttttcaaatttgtacaggggaaagggactcgttatgtgacttgaagcttttctcttatgattcaaagagtgtcacatcacttgattgtggtctaattaacatatgaactgcatttctacacatcatatatagtttcaaaagtaagttaatatagatgccaaatctatatttttgtcatcatcagacagatttgtatctgcctgaacctaacaattcaacggcctagatatcctaaatatcagagggaaggaaaatctatggtgttcaatgcatctcatttctgacaagaacacacaatcatgccaggagtgactatttctttaaaacacctcaagtggggctgggagacggctcagtgtctgagagcactggctgctcctccagaggacctgggtttggttctcagcacccacatggctctccatcatctggttccatgggatttgacgtccccttctgacctgtgggcaccaggcacaaagaaaatatttaaaatttttaaatacctcaaatgtcagtttatttttctctttgtctccaaaaggaaatggctgatttacaacttctttcaaatattcttcaacaaattccattgtgagggcaaatttcctcttcatgtcatttctggaggagtctgtggtagagtcatacctgggcagatgacacaagagtgagttaagctgatgagaaacaatgagaagtgtgcgtgttatctatctgactcccagggtgcactgccttgcacacagtggggcttttatctattctgactcccagaatgctttcccttgcacacagtagagatgttacctattctgacacccagagtgctttgccttacccacagtggggatgttatctattcatactcccacagtgctctgccttggacacatcagtcaacttcttggggtacacatcctgtctgtggcaggggccactgccaactgagatggaacaagtgcggtggagtctgccaggtgtcacacactcagctgtgagtgttaggacttttgtttactagcctccgggaacacgtttcctgctggggagctatcattttgccctcaggacagggcatcttactgacccttcccaggtgaacactgtgaacagaaatgggcaaatcccttcctgtgtttttcttttcaaagttaaagtcactttgacttggctttcatctgctgactttggaacactcatcctcactgtcaacttggcaggatctagaatcttctagaaaacacacctctgggcacatctgtgaggatatttccagaaccaattaactgaagagggaaggcccactttgagtgtggagagcaccgttccctgggattgaaaccattactagatagagaggaaaaaatcagaagtgagatctttctgcccctgagaaaagattcaaggtgacgctgcctcgaggccccgccatgacgactggtccctcaaactgtgcaccacaataaagctgtttcttgtcagctatgagaaaagtaataaatacaatgtactggacagttttatgtaaacttgacaccagctggagccactggagaggagggagcctcgactgaggaactgtctccctaagatccatctataggcaagactgtagggcattttcttaattagtgacagatgggggaggggcaggcccctgtgggtggagccatccctgtgagcccgggtcctgggttctttaaaaaatcaggctgaacaagccatggggagcaagccagtaagcagcaccctccatggcctctttatcagctcctgcctccaggttcctactctgcttgagttcctatcctgacttccttcaacggtgaagatgacgggaagcaaaaggcaaataaaccctttcctccccgggttactttggtcatggtgtttcatcacaactaactggggctggagagatggctcagtggttaagagcactgactactcttccagaggacctgggttcaattcccagcacccacatggtggctcacaaccgtctctacctccagttccaagggacccaacaccctcacagacatgtatgcagtcaaaacaccaatgcacataaaacaaataatttttaaaaaatagtttccaaacatactcatgaatcgtgatctttgtggggatttcggtccagagccgggcgtagcggacaggcaccacagactcctggggatcccggtcaacgtgcatgtggagcatgagtcgacagaaagaggctcggaggtcaaagggcaggctctcatcagacacacagcgaaggatcaggtctacggaaagctgtgttgaaatctggttgatggccagatactggcggtccaagcacatccttgcgaagaggtttagctggtacctaaaggatgaggcatgttacgttatccctcttgcctccgttaaggcccctccacaacaaagcacaacacagccagctgctgggtgtgcagatgtgtttgtaagtccttacgacactgagccaaactcttttggccatgagcagatgacagcacgggtctaacactgtccctgttactacaacccctctcatggctaggatttcagccctaacacccagtgcaccaggcctggaatggacagtaagtcacatgaagccacctctctccaccctcccctgcctctgttgaagtgggggtgtggtgcctccagaatcgtcagacttatgtgacaagcatttccactggctgagacctcttgccagccctctggctcagttattgatcccaacacactgacccctgggaaccacctctcctgcttttgctaatcaacacgggtctccttccagaactataggcacctgcacctgccaagtgccaaggagcacacgctcacaagatcccatcttgccatgtctgtgagggccacccctgtggccacgtctgtctcatcccagtgcctcctccccctcagtccacagtcaaggtcctattgcttctcaccagccccgacatcccataggtaacaggaagaaaggccttactgacaagtccccaactcatcagagagtgcaaacaggaaacatgtgttagctttcattctgagatctctaggtggccctgactgtctccattcctctctttctgagttttcaagtgctctcttcttcgtctctaattcctagaggtttgagagaaccttgtggtgaaagacctaactatgcacctgtgtcgctgaccacacccatttgggagtggtcacaggtatgtacaggaggggaggttttaggttggttttcctctctggctgctgacctggggacagaatagagcctgggaggatgcttggagccagaacctgtggcaggcccccgccnnnnnnnnnngcctctagtgttgtgttctctctctgaataagccttttttaacctgtactgggtctagcgaatcttgattcccaggcacgacaaactacgccagctcccttcagatatttgatggagagtgcgcgtgtccccagtacctgtaataggtcaaaacttctaggtcagctttggtgccttccttggcttcctgggctaggtgccggatggccttgccatgaggctccttgttgctgtcaatccagtagagccacacctcctcgtcctcaatgtcgtcgggaaggatggagctctccatggggttttccacttgcatggacactagcctggaagacaaagacacacaaagtctatgaggcagcacacacgtgtggtgagggatgtccaacagacacctccgtgggcagcttactttgtctggatgaggatgtctgcattgccggggctcagcatgaacttgcagatgagttcctgagtgacagggatggcggtgctgttggacacacagaggtcagacagatagtccagaaacctaggaggaggaaagtggacgtgaaaaaaaaaaagcatttcatttttatgtctcaacagattgtcttttagtgactctccaacaatttcatgtttgcaagcagagcatcttgagtgcctccactcatcaatttaagtttgtttgtttgtttgtttgtttttaatttttaaagagcgcccatgtcaggacatgggttctggcaagccatggtattcgtggaggtgagaggtcaactttcaggggtcagttctgtccttccgtcttgaggcaaggtctcctgcttctgctggactgtgttgacctggcccagatttcccgctgactgtcctgcctcctcctcccatcttgctgtgtgacagctgctagtgtgacagctgctatcacagagtgtgccaagtgtccctgtcctcttctaccagacatctggggacagaacgtgggccctcaggcttccctggcaaaggcttccacacacgaacaacagcatctcgccagcacgacaaagcatcctcatagaatcgtcgcaacaaaaatgtaatttggaattgaataaaagaagctaaatttaacattgtttcagtgccgtgttttcctgtgtgctgttcgtctcctgcaccattaaaagcagaatagacaattctttctgttacgtataagccttgttcagaatgggttacgtttgcttctgtgttttaggtgatgcacatccatcagcacaatgactcatcctccctgagtgtctccaaaaccaagtagcaactgacagggttggggagcacacttcagaatatatacagggttagggagcacccttcaagagaggatggttggtcaaaggggaggccgctgtccacctagtattttactgttagaggactagacagagaaagcacagtgggtgttcttggcttctgtgttcactgttgccatctaaggcagcatggagtgaaagagaatgtgtagcccctatgacccggcaccccctttctaattgcttgtctttcatttctccttctaagtgaaggtagaagctgggtaaccccaaatgtgtggtcacttttatcatcccaacactcgggaggctgaagcaggaggattgccttagagggaaagtcaaccccggctatacagtgagttctaggctagctaggcctacaattgtgagaggaaaaataaaggaaaataaaactgaacacccctaggttcagttcccagcaccaaaaaagaaatagataataagtcatttgcttgattttattaaaatctaggtagcagtcagaatgcactgtatattattaaatgaagtgccccatcaggagtgcccaacctttagacaccacaacacggtgccatggcccataaatgtgtcagtcatcattcatctctcctaggacacatgtggcccacatctgcaatctgggcacctgagtgagtctatgtgaacacattttgggcttctggcttcttcttgcattactggggattagtccttgagccccacattctcccactgggctaactcctcaactgtgacagggccctactagctgttcttaaactcactgtcataaccccatttctagccttggaatcctcctgtctcagcctcctgagaagctgggattacaggtgtgaaaatacatgaatgtattttggaaaaccgaatagaagtaaatgagtacatttaaatgccagtctagggctggggtgctgtacagcagccaatcacttttctagccagtgtgagccttaggttggctccccagcaccaaggagacacatcaacagtgtctctaaaggatgctgatcacctgcgaagcagaactgctttacacacaccgttatcatggaaataaacgcttcgtctgcccaccaagagtcagtgctacaatagatgctcaccttttttatcttaaagaaacaaaacaaaaaccccattcttccatcccccagagcacagacctgggctcccggttcctcctgagcaggttgacgaaggtctcaatttcttttgcagtaatgtgcttctccagtagttttcggttgttgtgtaacaaggctgtgatcgtatcttcggccagaatatcatagccaatctgggactgcataacgcagaagttcttagcgatgtattcctgtagggaggaggaggcatcagaacctgtggagcacactgcctgcaagcgcagctccctggggggcagcagccaggatcacctgagccaccggacaacccagccgaagcttgtcagaagaaaaacaagtaaataacgcctcagtaaagagaattcctggagggaagtaaaggtatccacagtcaggtaactcaaactgtgaccgagggctggggcagagctttgggagaggtcactcacctggcatgtgcaagggtcaaggttccatcctcaatacttcaaataactaactaattaattaattaattaaaagtcatgtcactaatcactattttctaaatgggtactgacacccttgtaagtgagaaaaggaaatctaactatagtttttaacgtcatggtaacttagaatttcaccagcctgcaaggagcctctctgactctcaccagaagttataactataaataataaacaataataataatttttaaaatgtatgtgactgccgtactcctgggacttgagatcggtgcagccattgtttgaatgccctacatgggctccagttgtcttgtttgtttgttttcctcagattgacactagaatgaccaacaagatcttctctgataagtgacagcaaaaacttgacatacttatcagtaaggagcaatcaaataggatcacatggtaactcgaattattaattagattcagccatgcaataactgtttcatgatggcgtcaaaagctctggggatcacgctatgagataaaagagagcaaatgagaagacagacatgctttcacacgtggatgagcgacatgaaaccaaggatggagacgagggaggcagaaaaaaaagcaatgtgtgagcaaggatgaaaaggaggtaaggacagcaaccttgggagcgccaggagaggcttgccaagcaacggagtggcacccacaaaggccctgtggtagagaaaactgtggacacaggcacacacatggtacacatacatacaggtaggcgaaacactcatatcaaaatgttattgtaaccgtgagagacagaacactatggggagtttcagttatgcactatttagtcttctccctgttcttttttttaatatttattatttgtgtgcatacgtgtgagtctgtgcaccacatgcatgcaatgcccaaagaagccagaagagggcgtcagatatcctggaactggagttacaggcagttgtgagcccctgtgtgggtgctgggaactgaacccaggccctgtagaagagcagtcagtgctctgactggctgagccgtcgtctctccagcctgttccctcacccttcattctcactcctatatcccaaaccacaatcactggttttctcattctgtgtatagatagacccttagcactaaggttttctatttcaatgaccaaaggttttctatttctcggggtttctccttgggaatgcacctctgtttctcagatgagaaaatccatcgattagaaagtggcttttgccttgagcaaaatttaccggaacatacctactccttgaaaatgatattggttacacaaatctaattataacgccagcatcatttttttgtggtctttcggaatgatgccttgctattgggtagtcaattaactaaagtaaaagtcctctgcagtgtgtcactttagagctttatattgatttacacgcgtttatggccatcggggtcgtactgtagtgtgaggcaagcttccaagatgctgataaataattacatgaaattagaggtgatattgggttctctaaataatagtaaacccaaacacaacgttaaatacctgggccagcactaaatcacacatgagctctttactggtgtctgaaatgcaggtggggacaataggaattctaaaatttgctttggttatctacattttaaaatattttcccacaagctacttacagcagttagggggaaagcttactgtggctcacagctcaagggatacagttcactgagggagggaagccagggcaagggagggaaggtggcctcattgcactcagttggggggggcggggctcggctcactttctcttttttattaccagcccatgagacaggtggtgccgcccactggcaagatcctgcatcttcaattgaagacctggacacaccctcccagacacgcctgaggtaactctcctcagtgacctcacacgggtcactcttgagagaagaccatcttacactgcttctggctcaatgccaagcatcctcagctcttttgagagtttcacacacgtatgaaggatattgtgaccatgtctgtgcttcatcggcctccctaatttgccgctcgcccctgcagacccctcttcttcctcccgattagccccgtcttgttgtgtgtgcaggccgtatgcagataacacagctactgtgtgcaggtgaacaccacatcgtgtcacgtcatgccatatccagaagacagcatttcacagggctcctaccctggcctccaactgttacaatcctcccatcatctcttctgaaatggtcccttggtctttggggatgataggggtacccccattggggtctgagaaaatgcaaacacacttaattcaacagaacagaaaaaagggggtccagacatagcttagagtcaatgagattctgcaggaacagtgagcaccaaggagaccttgctctttggtcagatcagtgacttagctctggggagggaaggggaggtatagatgacccacagtgacacactgcaaggaatctagagagtgtgtaaatatcaacccaggcaggtgtgtgtgtgtgtgtgtgtgtgtgtgtgtgtgtgtgtgtgtgtgtgtgtgcaacacgtgcgcgcatatatgcacatgttcaaatgtgtctgcttgacaggaagatgggtgttttcagggtgaccccaccctgtgctctgaacaccaggtgccagatgtgagcaaaccactgtcttatgctgctgccacctggccatccttgtcatgatgcccttaaactgagcccagataaacaacttctccttcctgtggctccttgacaggctttgatcacagctacaagaaaagtaactcattcaggggacccaggaagagaagtggggaggcatgaaacccgctgagctgcctctccaaccgaccctgtgctcagatagtcgggtgctgcacaggactgtctccagtgccacaaccccaatgcctaatgtctgtttcagcattctggatctatgccctttcccggggagacaggaacattactctctatgctgtcatcccactggaatgtagtgaaactattagtgtgacccccgaagccacatttcaaccacaaagaactaggtttctcacccggagggtatgagagatgcccattgtattatatattgtatgacatggatctaaatacatggtatgtgtaagggcctgcttaaactgtcagtttgttcctgttacctaacagatttacttattgtctaactaatctgctttacatattcttttcagacctttcttaatctcgaaagctgaattccaaagccaacatattttaacacattcttcctgaaggaaaaaacaaaaatttgttttcttgccaaaatacttccaaactctcaatgatgactcagaacctgggtttacacactggatccattcttaaaaccatagcctggcagctgagggtgcagctaagtcatagtgcccacctggtgacaagtttgtttcccaatgccaaaaaaaaaaaaaaaagaaaaagaaaacaaaaacactgtaagtctgagcatcctgcttggcttcttggtctcagtggatttgtgaaaactgttaggcttgaaacaaagtgagtgaaagttgagtgttgcccacttgccttgaacctcctcatcagtggccttgagctctgtgcctcaagccctgcctcccagccttctctcaggccatactccctcatgaactaaactcagcaactgatagctcatgcctttaatcccagcactcaggaggcagaagcaggcagagctctgagatcgaggccagcctgatctacagagcaagttccaggacagccaggattacacagagaaactctgtctcaaaaaaaaaaaaaaaaaaaaaaaaaacaccagtgatacagatccttctactggataagaagcacacggagaacacaatgccaggtcatcaataatgtaaatacctttatgtcaaacatttgcattattgaacccaatgcaaaatattacagattttttaaagatgacctgtatgttgtgtgtatgcactttgcatatatgtatgtatgtatgtatgtatgtacacccatgtgcctgcagtgccaacagaggccagaaggaagggacattggacacgagctgccttgtaagcactgataattgaacccaggtcctgtagaagagaagccagtgctcttaaccaccgaaacatctctctagactctctacatatttgtaagacaaagtgagactcgaaataactttcactagcagattacagcttttggctccatccctggacccacacaagccgcccactctcctccacagttcaggctgccctatgaccacggcgaccttgttgatgtcctaaccctgttgcatgcgcagatgcatcagaacacgtggtccccagcaggggtaggagttgtggaagtctcagcctcccggtagagcctccgggaggaagtgggtcactggggataggcctttgggttttataacccaacttcctgtttgctctcgcttcctgtcttccaagaggcgaggggtcgccctgtgccttcccctccatgacagtctggacaccctcaaactgtgggtccaaataagccctccctcccttgagtttcttcttgtcgataatttatggtcacagggaagaaaagtaaccaaaccgattatcctgtctcactaaaatgcatgttccatacggtcatgaagacggctcccagcccccaccactcaagctcgccagcctgagcgtcgagcatcgcattcctctgcccccatcccatccctcctcccctcagtccctcctcctgtttcaggtgcaggttgaatcttggccacagatggtatcttagtaggtatgcaggcacacagcaaggctgcacctcccaggcacaggccagggtaccctgctcagcaggagccctccgggaccatgcccagaagcgcagcatccccgcctgcaagtcaaactcctgtccggctcaacagccctcacggacggttctctgagccgcccacataaagcccttctttgcaaagttcgagttctgactcctcggtctatactttaacagccaccaacaccagggcgcgggctccctacccacctggttcttgcggtagtcctgctgggaatgccgcaggacgcggtagcagaggcgcagcacgtacttgtagggggcatagcgctggtcgcccagatcctccagcctcagcatcgagccctctcccgccttctccttgaaaggcgctttaaggatcccaaacacctagaagaagaagaagatccttctgttttatggacatgcgtgtgcactctgcaacctatttgcatttttaacaaataacaaggacttaaaagcactgtagaaatgtgtaagtgaaattagtgcaaaggcagaaggtacttaactggctgttagtcctgaataataaataaaacactgtcgaaccaaaaactctctgctcacgagagcacccagtcaacaagtccactatatcaatggcatgattaattttatttagaaaccgtattttattaagataggaaatatgaaggtgtttgtatcaagctacatggatatattcacacgaattaaaatatattttctatatgcttttattattctgttatttttctataactttccaaaatcaaaataatattaaaaaatgttaactttttacctgaaacttacaacaggtaatgacttccaaatgtcactcttacctccttttaggcaaaaggaaataactccaaatacatatgcccccaataacagagatcctaaatacacaaaactttctcagagggtttgtccactgttcacagaacgcagataagtggccatgggaatgaatgcatccacactgaagtcttaacaaggaaccacccctgcatccccactccctcagcccctcccccattcccagggagccaaattcttgccttctggtgaggagccagcaggcttagttctctgtgaggaacatgagatcaagacaatgagcctcgaaataagaattcaaaatggaaaggaactgtcccgtggagttcatgaactaagacactgtggttttctttgagcctttggtgttctcaaagagtcttttttgcaacaggtggagactgccacagagatctacaactggtcaaaattcagagactaaggccctgggggcccaagtctatcaatccatctgcacaggtctccaacctctaagtcttgaaagtcgtggaggagtaagagatgggaagactgtaggcgccagaagcagaggacagtgtcctaggagagtgtcctcggtgtgcctcccacagccagtactgggcacaaatgagaaggctaaacggactcagtcccttgtatgtacacatgcatgtgtgtgcgtgtacatataataataattacaataaggggacatcatgaatttggaggacagagaagttagggggggagggtggtgcagatgtgataaatgcagttagtgtttatgtgtgaagttcttaaaaataaaaattatttttgaaaagaagaatttgatgttccctgaaccttgaattttatatttgtatcatgagataaaaaggttggagacatcagttaatatctcataattcactcaaagtcctaaaagtccctgaaatcaaatgctttctaaaaataattcactgatgactaatgagggtgtcctgtgtacgtgtttgccctattggttgataaataaagcactgttggccaatagggaagcaagttaggcaggactaggagaggaggaggattctgggaaatgtaggaaagagagagagtctccatgtgatcccaggaagagaggacacataaggctggagtcctgggtaagataagtccttataaaaacatatagattggtagttatggttggtaattaagactgagctaacaaataaatcctagtcattgtccagcagcaacgtagctgatataagactctgtgtgttattcaggggctctaaggcggtggcagaacccaggcagctggtggaaagatatatcgttatagatggcagaaagactttgtccctgagactgaagggaccagcttcccttttggcagccataacagccgaacacgtgcttctatgaccttgtcctagacactagaaagtcagatgcctgcctcgtgacaaggaaacaatcagaagttagctggtggtgctatgctttacgaccctgagtgtgctttacggacaagtgcacagcaatgacgcacaaagtatagcaaccaccctggagggcctatgggccataacaaccagttgnnnnnnnnnnnnnnnnnnnnnnnnnnnnnnnnnnnnnnnnnnnnnnnnnnnnnnnnnnnnnnnnnnnnnnnnnnnnnnnnnnnnnnnnnnnnnnnnnnnnngatctctcaggaggccctaggagctgtcttttgctagccatccgccatggtgggtgggtgaaagacccgagctaacatggggttagctcgttaaattacaataaagcctcatgcagtttgcagcaagctctcgaatccgcctggtgattggggtgacggaagacgtggcctgggaccctggatacttgagttttccgggagtctaacaagacctgagactttatttctgaaaagcactgtcttcagacagtctatagatactagctgacaacgggtcttcagtttttccttccccagctcagcacagtatgttagtttttttgttgttgttggttttttttttttggtttttttttttttttttttttttttaaaagtccaggtttggttttttgagacagggtttctctgtgtagctttggagcctgtactggcactcgctctggagaccaggctggcctccaactcacaaagatccacctgactctgcctcccaagtgctgggattaaaggcgtgcgccaccatcacccagcagttaatgttaattataaactaatgtcatttttgtgttttcaattatccatatgtggttgatacagaagctaattgttttaagtagcaaataaaacaataaaaagatgtgactacagggatgtccatgcaggtcactggaaagcaggttaatttactagtgtgtcatgcacttcagagatctggactggactgctgtcttcctagagcagatggaagcaggtagaacagttccaaagtcacctgggaatttgtttcttaagatgctctgaccacaccggtattttggagatgtgtggtgggaacctctaagctagcctcaaatggtccctaacttctgccgtccatgtccctgtgggattctctctctgcttctaaccagtcacacagaactgatggatatgggatctatggtgatgttttaaagactatgtataagcattacggctctgatggaaaggtattctggcactctggagccaaggaaaactgagtgttacagtctcaccgaaacctcattcacgagatttattgggagggaagaatccaggagagtggccgcctgtgtcagagtggaagaggacagtcgggcagcccaaacagccacatgctgaacaggcacaggatttatacagggcttcttaggggtggagttttccaggaagaagactttcagggtgaggattggtcagatttcagtccctgagctcaaattgcctagatctcatgctcagggattggttggttttctgctcgggttcagggtcatatttggctctggtttcagggccaaagtgtgtttctttcactggtccttttagccttttggctctaattttagggccagggtgtatttctttcactggttctgattccagggacaaagtgtgtttcttgggcactggtttcagggtcagggtacatttttttttttttttttttttttttttttttttgtttttggttgcaggaccaaagtgtgtttctttggctctgctcagagtgtgtgtctttggctggcccttttttcctacactatggctatgtctaggtgccctctctcttctctggaatcccttgcttttaagggaaatgtcttggtgtgaggctgaagctcatcacagagaggaaagcatagcaggagctctcagcagctgctgtcactgtcctcagccaagcacagagagcacccaatgcatgctcagatctttctccattctctgctgtctgggatctccacccagagggtgggctggcctacagttaatgagtctgcctaaatcaactagcatagtcagggtaattccttataggctcatcagcccgtctctcggtgattctcaagccatcaaacttcagctaacacaaccatcactggaagctaacacaaccatcactggaagctaacacaaccatcatcacaggaagctaacacaaccactgtcacagaaagctaacacaaccatcaccagaggaaatgctgtatcctgaggcagacttgcaccaaactctatgtgccatctacttaagtggacctcctctcattctgtcttgagatgatggtagccctacataacacactgacagtccctctgaggatgcccctcagacactgctcttacatttaaagctcatagaaactgaaataagtgtctaggtgtcatttgttatgcagcaaggcataactgatactgtaactcaaaacaaaaaataggcaaatttggttctcgaagcaactcacctgtgccaggatgttttgttccctcattagtttctgccgttcccggtttggcttggtgatgaccacatccagaacatcctgtccgttgttagtcacgtcagccacaaagaagatgaggtcttccaacaacttagtcacaaacctatcacagagaaaagatgagacagttctgaactatcggaaattaagtctgagaactgaaacactaagaaagttaaactacttttaagaaaacataatcaacaaaatgtaatatctaatgtaattgctacttaattttgacatttcctatccagttccccctgccctccactctgattccaattctaatcaaatattgcaaatggttattaaataaaaatcctatgagtctcaagaacaaatgggcacggaagacggcacaactgtgatttaatgtcccccaaatattattgtcaaagcaaagctctgacgccaggtaatgtcagcgggctaaagtgagacggaatctcactgatggctgctcagagaacatttagcttcaacacattttctcttgttgactccacaactggaattaggtgtttagacacaaacaacaaaaggtccagttgtgtcgtgactctggattactctttaaaatggtaactgttgatggggcgagtagaacgttaatttttcttacttttcattttatcatataaaatgaaacatataaaatgggtgtttagcccaaggaggccagaagagggcatcagatcccctggagcattccctggagctggagttacaaatggttatgagatgccatgtgggtgctgggaactgaacctctgtcctttgggagaacagcaaatgcttttaaccactgaaccatctctccagcccaagaatattaagtcttgatggagtgtcacattgcattattcctaatatacagatgatgtgggacaatgctcttgtacaatgtaaagatttgtcactcatatttaataaaacactgatcggcaagtagccaggcaggaagtataggtgaggctaccagactaggagaattctgggaagaggaaaagcagagaaacagtcaccagccagacccagagaaaacaagatgagaatgacttactgagaaaaggtaccaaatcaccatgtggctaaacatagataagaattatgggtgagggctggagagatggctcagaggttaagagctagtggctgctcttccagaggtcctgagttcaattcccagcacccacatggtgggctcgttgatggggaatgtactactgtgtatgtttatcttattgattgttaaataaaatactgtttggccaatgagacagcaagttagacggaactaggagtcaaagaggattctgggaaatgtagtagagaagtggtgatccaggcaggaagtgacatagcaaggagactcatatttaaagaaggagaaacaggaagagccctcttttcccctccgctcctgctccagtggcaggatgtgatccaccggcaaggagggacgcctataaaaggcgtccgataagatagtcttataaaatatataggtttatgatagttaagactaagctaacagatgaagaatcctagtcattggccaagcagctttgaacctaatacaagtttctgtgtattcatttggaactaactcgggcaggcggctggcgtaaagctcacaagtggcggtggggctcaggcggcttttggtggaaagatttatcgtaacagctcgtgaccctctataatgagatctggtgccctcttctgtcctgcaggtgtgaatgtaggcagagcactgtatacataataaataaataaaatctaaaaaaaaaaatattctgacatcttggaaatttgtcatctttaaaaaaaaataattatgggtgagtttaagacaaaagagctagctggtaataagcctgagaagtaggccaaacagtttataattaatattggcctctttgtgtttatttgggacagaacggctggctgcaggaccaggcagcacggaaacttctgtctacatacagaggtgcctctggttatgatgaggttggtagcaagacaccaagcttcctctttacttgtttactcatgtgccaagaaaaaaaaaaaaaaagcaaacaacaacaaaaccacctgctggttgttgtcagctaaactcaaacttcaattctctgttaatggttatcaccctgtaacacatgccatcttgctaacttttatctaataattgattttctctgtgacttactttaaagcaattcctccaaattcaaacatgctactctggagggaggagagaggctcatgagactgaggaagaaaaacaaaacctgggaggctgaggcctgcagggctaagactgctgccccgggttctaggacagaccgtgggggaggctggggagagaggctctggggcccatgggctgccaggcgtcaccgtccctgctggggcagctgtcaggggtgcagctgcctcttgagtcatccgcgatcctgtaagtcacccctcacccatgttcctgttattagcgctccaggtgagacgcgttttggtctgacataggttccctatctgaggtgcgtttcctcacacgcccctaagaaaagccaggcaacagacttcctgtcgggtttagcgaagttaggtaagacatacattccgtatttaaagggaaatataaaaggccggcccaactcagccaagcgtaaggatgacgcagccctgctggaaggatgggcccagctgcagttgcggaaggcactgatggagaaggtcccccttgcagaaagcctccaacgtccctgcgcgggctgcagccaggcggtgcacaagggacaggagacactgatggagctgctgtcccagctgcgatcaccacgactcacgcaccctccacaccgacccctcgctgcgggctggccgagaggaggcagctggaggccacgccagcagacagaaaacgaatgagcacagagagaaaaagccataatgttccagcggaggtaagcccgcgtaattaaattccaaaacactcagaaaaccaatattaggaaagacagccaacatcggggctaaaaatcagaaggctgatattcatcgccaataagatccaagcaatgaagccattcctaaatgacatttaaatgagtgtgttgtcagtcctcaacagataaagaacttaaaactatatatatataaatgagcattccctggagctggagttatgaatgaagactaaatgggtaggcaaagaaccagcagaaatctgagcattaaaaagtgtatataaaatcatctaataaaagtccaggttataagaaaattagcaattataagacagtatccaaaggatacagacaatagcgtacagagatttttaaaagcagattacaaaagagaagttaaagagttcgagggcattgttggctacatagagagttcaaggacacgctgggttatatatgagacctggcctccaaagagaaaggaagggaggactggggagaggagatgagagagagaaggaagaagggcagaggaaaggaaggagtaaaagaggaagacaaggagggagaggaggagaggtagaagaagggggtaaagaaggcaggaacggggaggggcaccataattcatatgacgagttttaagagcccttgagctctgtttgttgcctgaaggcatggcggtcttcttaaggtgctgggtttggcagcaagtgtcgcatggcgtggggctggctgaataaacactctgccattgagccttgtccccagcccctagctgcatttagacaagagcccaatgaccttggcttttgcagctacttggagcacagtctgtgtggccagcacctggcacataacaagagctcagtctcacggaattagctacatgtgtgtacagctgtgacaacggacactctgtggacaaaccaggtccttcagaagtgcagcctgtgtggtacagagactgtaagacttgcacacagtgccttcccaggctccaggtagcagctgacacctcatggccctccctcgtcatgagtggggcacacacttctaatgctctgcttacttggtgcagtcatgtagaatacaaacagaaaattcaaatgaaaacatcgaaagctgaggatgctgagcctggcaggagttgcatccagagtcccttcctgggtcaactaaaggagagcacggtgtgtgtgtggggggggggggaaccaacatcacaggcattcagaggcaggtctgcaatgttctcaaaccctccctttgaccttggttttgaataaaaagaatagctaataataacttcactctccatgggggagagggaagggtgtcaaggctgccagtcattctcagaaagaattttctattaaattctaaagctgagagactaagagccccttcaccactctgcagcacggactgcatcaggatgaagggtggatcagcaaatgtaacttcccagttctcaggcatagtctccttgctgttattctccactaaagcagtgaagagagaaagaggcaggggatataaaaaataaaaatagggtcaagggtcatcctaatccactgtcctcctaagacatatccagaggggctgagtcccccccaacaagcactgggggagaaggccctggagagagaagcacccagagaggcccagcactcaatagatacttggagtttaccaaaggagacctcgtagagaagtgtgtaactttctgtgaatgcaggagacagacagacagaaacggattcatcaagaggaggcaaaagagggaaacaccccatctgcacactggaatccatttctgttgtgagctggccctggtctctaatcacatgaggccatacgagtggccggtttctgcttctggccttggtttgttggccaccacagggcagatgtctaaaggcagttgtcaaatgcaggctccccacaggaaaagcagtagtaaggacagagaggaggctgagaaccgtttgactgtcagcacactgacaatgtttgactttattgtatgggctgtgtgtaaaggtctccagaatgtatacatttagtgacagaacactctcagagtgtaatggtgggtttatccatcctgtttccttcttactcaatccaaaacttgtcagagtcatgtacaccatcacacatggtctagttcattcctgaccctggctatgtgctatcccattgtgtgagcacagaacaatcatatcatccttcaactacagcaaacatgacggctttcagttgggggtgcgtagacaaggctggacatttctgcccttctgttctggggattctattgaacagatagatgttccagaacgcccagctggggaatggacaccagtgagccacagtgctcccttctctgactttgcctgctgtggaatattattttaagatgtgttacatttgtctatgctgtgggacatttgttcaattacacaaagatggactgcattcttttattttgcatttgtttaactctgtgaagctgtgttactttgcctgtctaaaacatctgattggtctaataaagagctgaacggccaatagctaggcaggagaaaggataggcagggctgtcaggcagagagaataaataggaggagaaatctgggagggcagattgagaaacaagaaatggaggagagaagaacttgaggagccggccacacatggagtaagaagtaaaggaagatacacaaaaatggggaaaggacaaagcccagaggcaaaaggtgaatgggttaatttaaggtagtttaacaaaaactggctagaaaaaagccaagccaaggccagccattcataagtaagaataaaacgccatgtactgcttatctgggagctgggtgtcagcccccccaaaagagcaaagaattaagagttagaaacaaaacaacaactacatttgccatgcatttctgtctgggccgtttggtggggggcttgccatttcgatggctgcaggtgacagctggaatgcacgtggcaaatggctccttattgatcaaagtctgcagcaggtcatgaagagggaagagggcagacgtctttgctctgaggtcctgggagcacccaactgtcgatcacatgactggatcccccacttatgattcatgtaattttaccaggtggagtttaacccccattgctttaggcaggatgggaatagctactgaagggctgtgtgaaggcttagggcacgaggtggagacaatgatctctattacaaatggccatttctcgcatatttataaataaatgaataaccaatcgatggtccagtttctctgagtgacacaagcagagaatacactttcaaaaaaattacatggtaattacatgcaaaatatgtcatgaatccaggaaatataaaattctccatctaaacaccaaatcaagtatggtcctgtgagtctttaaaaagctttcaaaaatagagcagagagaaactaaaatcatctatttttgagccaagataaaatgggaaaagtaagtattccatctgacatttttagtttatttttattttttatttttatttaggtgtgtgtatctgtgcgtgtgcatgtgtgtgcagtgcctctggaggccagaggagggcgccatgtcccttcaacctacagttacagaacctgtgagcctgcacccccacacccaggccaacggttgactctcaatgattcaacgtcacatttggttccactcacctcctctcattctgagtgatgctgccattctccagttttttgaccgtggttgccagcactttgttggcatcattggcaaagtctaagtctcggacctcggacagtgggacgcacacaatggcaaaggcttctttgtcctccttagtctggcaggttccaatctgcaatatgtgtttccattaaacagcaacagtctctagagaccgtagtcctcagagtaagatccactggggtgggtgtggacaagacagagaaactccagaaaacaccatccacaatgaaggactttggggacacgatggctttccgtgcccaattcctgccctgctcttttttttaaggttttttcaagacagggtttctctgtggctatgtaattttagcaggctgacccggaactagatattgtagaccaggctggtctcaaactcacagagatccgcctgcctctgcctcctgagtgctgggattaaaggtgtgcgccaccaccgcccggctttcctgccctgttcttgaagagcccccaaagagggtttctttcacacgatgtccctcagtcccagatacttccaagcagagaaggtgcccctggaatcctcctgcacctttttgatgtctgcaaacccaccctcctccaacagccctgctgcagccacccaagtcagagacctaaccaactggcagatgttcacccccacgaaatcagctgcaaccagttctagcaccctgcaagacggactgtcagtcactctcagtcctgtgtgcacagcaggtgaaccagtcggggcacacttactttcagcatgacgggcctctcttcctccgtgtcgatggggatgctggtgctcgttacccaagtattggtgcacaaatgccttagccgcacataggagttcctaaaagcaaatgatataaaaaggcatggagggcttatgtggtgatatattgcttgtgcatttattgggctagctctcctcttaattactaacctgtaacgattaatctatgcatttctataaggtcttatcttaccagagaaggcccagacctgttactcctttggcggctacgatgtggtgtctccctggtggctcctctctgccttcctcttccccagaattctccttgtctggtagccctgcttatatttcctccctgaccaatcagtgttttattcatcaaccagtaagaaaaacatatatacagaaggacattccccccatcaggctggcaagagagctcagaggccaaaggggcttgctacgcaactatgaggacatgagttcaatcccagaacccactgaagatggaaggcaagaacccactctacaaagctgacctctgacctacacacacagacaataatatgtttaattagcaccctttgcatattgacatattcagcagatccatgtgtggtgtgaacagtaaatgtcatagactagtaaccgtctcaggatcttgtctggaatatgaaaattcttagatttagacttctctggagcccacggccatcacttcctgggccatcagtgtcaccaggaaccttgtcaaaatgcaaattctaagacctcactggtgcactgggggtgcggtcagcagtaactagtttattctgtccccagacagctaccaacctaaatgtactgacaacccctaaatcacggggctgctgtacccattgagggcaaacccagagcagttaaatagataagtggttcagagcagcccgacaggcacatccccaatatgaggctgagcaggcagctgctcaggttctaactcagacttcacaccatgttctcttagtgacacttctcagatttctgggttttgttctggtcttgctatttaattcggaagcaccgactctgggctctaagtaagaagattaaaacaattgccagggtgacagggaaaggagtggagttggggaggcgaatacgaacaaagtctggtgacatgtacaggaagacgccatcatgaagccatcactgtgtatgctaacttaaatttcaaaactttaaattctgtgtacatagttaaatgcagtgtccatagaggccagaagggggcatcggatcccctggagctggagttacaggaggttgtgagccaccctatgtgggtactggaaagtgaactcagggcctctaaaagagcagtatgaactcttaaccgctgaaccatctctccagcctaaaaacaaaataaaataaaaaggaaagaaagaaactatttgttgtgtgaagaatcaaggtgtctaccaaacacacacacacaagcttgtgtgctgactggaaggttggcaggtgatttcaaccaggagttcacaggactcacaccctgtgtcctccaagagcaacagtcacacatttgaccatgttttgagtcacgagtaacaaaaattatctgtgtagacgccatggcagaatgctggagagggcgcctagagctcggttccactcagacggccccttctccacacctcatctcttaatccaattatttcttcaacaagagtgcatggtgccattaaaataaaaaggcttttcacttagtgttcagcctaaagctaagacataaatatgtcatacaacccaaagtaaacattttagagtcaaagagacatcgtcaaggttcttgctctgctgtggaatattatcttaagccgtgttgcttttgtttatgctgtagagcattcgtttaacggtgtaaaggcgtgtggcttctgtttattctgcatttgtttaagtcggaagccatgattttttgcctgtctaaaacgcctgatggtctaataaagagctgaacagtgaggcagtagaaggacaggagtggctttcaggaagagcatacaaaaagaaggagcaaactagaaggagagaaggacgtcaggggacagccactcagccacacggtcagccaaggagtaagacggtaagataaacagaagaagggaagataaaagcccagagggaaaagggtaggtgggataatttaagaaaagctggcaagaaacaagccaaagtaaggctgggcagttataagaaaaatatctctgtgtgattttctgggggagctgggtagcaagtcccccaccacaagagcccaaaaagcaaagagtaaaaaaccaacaacattgctcattcgtaaaggtagataaaatacacactgagtttcaatatctagaatggccagcacctaacccttgtccaaataaccagaaacgcctctgttttagcacccagcatcctctgcactgacctaagcaggagacatctacagctgctgtctccactgctgtcctacgctctggaaaaatggggccacaggacactatgtggtggccagctcctccattcaacccttacatgtttcaacacaggtgagtttcccttcttcaaaatgctcgtgtggtggtttaaacattgcatggcttccatgggctcatatgtttgaatgcttggttcccagatggtggccttgttagaggaggtgtgtcaccggggtcagcttgaggctccaaaagtcttgccccattatagttgggtctctctccttcccatctctctgcctagtagttattgctcaacatgtagctctcggctattgctactgcacacgcctgcctgtggccatgttccccacctcctggtcatgaactctaatgctctggaaccatgaatctccaagttaaatgctttcttctacaggttgccttggtctcggtgtcccttcacagcaatagaaaagcaactattttattttttaagcatttcagtgtaggcgtttaatgagctcttttagaatgagacccaagtctagacatgacattcatttatattccatatgtgccttagccatcgaggccaaacgtaattttatacagtattttaagtacacctgcattttagctacaacccatcacacaaagtcaggtgcaggattttccacttgtgccgtcatatcacttctcaaaagctgtcacttcttgggtcatttcagattagattttcagatcagggatgctttcagcatggatgaaccccttgagtcaaccatcaacactactgggctgcaaactgaagagaagacccagagtaataacatgatctgcaaggatttaggaactaaataaccctgggaccatgtcacagatgtgtgctggcagtcaggtgtgacatggtctggttgtctacagtgcaaggctgctgctgaggaatggtagttcagggcagactttacaaaccatactccagggtcaaactgcacttcatgagcacagacagttaggtcagttagcttgtcccaaactctgctgtctgtcacctgggaagttctaacaaacccaaagcctaggttataacacacatcagttaaatcagtgcctagagtgagaggtaggcatcaggactggtcacagattgctaagtgtccattgggcgggaaagattgggagccctgctcaaggcccttgatccaaacagtgcagtccgtggcttgctggaaaatctctctctctcccagccccgccatggaccaaggactcaccatctgtgtctctatcagatccccaaggctgacttggggctcaccaggctaaagcaccactgtggaactctgacctctgagcataaaggccattgccatcttactcaggacaggtgtgactgtcccccaggattgggcctgttgatgttccctcgtgggggagggtaggaagggtagaagggtagtaaatacacttcttcctgcgtttcccaactatgtatagtctcatcaagttctagaatgcacggtagggaaacgtcagctaaagagggggtgccatctgtacggcatccggacattgtcatccatgctggagtcaagcctttcagtgacacagctgtttgggatcacccacattcccgtaagaacccctcactaagctccagtaagtaaacccaacagactcactggttcactcactggacttgaatggaatctttcctttgatctactgtggtgccctgtgtttggaaacatttgtacacatccctccaggaaaagatcacacggtaagaatttaaagtttggggaaatgctgcatttcatattggagccccctggataatgcttttaaaagatggggtgtccatatctcactgaaagactgacttcttcactctcagaagggccaggacccattgctcagatctttctcagccagtctgagaagacttgctctaactcagcctctgacctctgacccatgagagttacccagggtgaacccagataatggccttgaagaactcatggggcttggcacatagaaagcactggaggattttatatgaggatgtaaaagtggctagcgttaaaggtttattgttagctataaaccgtgaacagcagctgaatgcttcaacacaaaacccttcacaacggggcaaagaacctcagcccttctgaacagcagcagctaacacccctgtgcaatgtgagacatagcaaccttgtggtgggtgcatgcacctgacggtgagttcttctcaccacttcctcaggcaaattctcctacactgagttcaagaaagatacccatttttgcttagacctaaaatgagttaagtcagagtaataatcagggtcccataggttgtggttagaaagaaaatggcccccacacagagtggcactattaggaggtgtggcttattggagtaggtgtggcctttttggagtgggtgtggccttgttggaggaagtgtgtcaatgtggaggcgggctttgatgtcttatatgctcaagctgagcccagtgtggtactcagttcacttcctgttgcctatagatcaagatgtagacctctcagctccttcttcagcaacatgcctgcctacaagccacctgccatgatgataacaggctaaacctctgaaattgtaagccaggcccaatgagttgctttcctttataagagttgctgtggtcatggtgtctcttcacagtgatagaaaccccaactaagacaccatacaaaaggacagacacttggctcaggccaaagcagcagaatgtatgtcttcaggggctacattatcgagcaaggaggagggagagacagacacgcaacagggggttttcaggtctcttcatatccctttctggtatggctacaccaaataaatctcctttttcagctttctgtttttaatttgggtcttttaattggcttaatgagcacaggtggctggacccaacttggggcactggctgtgaaccacaagttcaagagtcacctgagctaatgtgtttattgctctgattgatgacccatgtctcattttgatgccaggggcgtggtctgcctggtaattgacaatcaacaaatacttcttagctgaaccactaaaagaatgagcatataaatgagctaggcaggaaatctgacaggtaaatgataaaatttagactaaaaatgctattagattattttttttcgttgtcgtgaccaaaggccacacaattaataagaataaatgactctaatacttttttcaggatgtctttggtactgcacattttagttatctatacaaataaaataagttgtgttgatgagctcacctgacagaggcacagcgctttgcatgcattttctccactcatgctcccttctgttgtaaaattgtaattatacttttttatttcttcctgttgggaggactattcaaagaagcatctgttcaccccaattccttttacttacttatttccttttattttctatttctttttaccttggaaccaggcagtcagctctctgaagagttgtggcatcaagttcgaaaagggatgcgatgtcatttccgtgtggtactgagactagcgtgtacataatcttctccccagtctggcgtttcttctttgaggttggaagctctccatctctctgttgaagaggctcaaggttattcggtgtcttcagatttagtgttagctgctccagtcaatccggagataaggtgtgagtttgcgttcttccattgggttataggagtgtctactctgaatcccccagaagatcaggcacatagcctttgtaacgattatgggcagtcatacggtccatgctccccagaggggtcttctaatctgagcatgtccttaaatcacaatcgttatggccccttctctagtggtttcgtaccctctgcatttatatcaaacatagagaagaagcagcgtcccaaatcctctaaattccatggactcaagaagacacacaaatgaccgatgcatataggtcccactagttacagggggaatgtaaatcaaaactgctgcaggcagcacacttctaaggacagcatgaccaaggtccagtgataaacggccaaaggtgcagagaaagggaacccttgtacccaccctgtggatggtatgtcattatgaaaacatgtgacccagggactctccctgtgggcatgaggatgtgagaaccatgcaggatcacattcaaatacaaaaatcacaatccctacctcacagagaggcctgagcaaaaaaccacagtccctacctcacagagaggcctgagcaaaaaccacagtcagtccctacctcacagagacccgtgccccaggctggctgcagaacaaaccaaaaagctatccttgtaaacagccaaagacagacagacagacagctgttgaaggccctggtgctgcgtcatgacatggagaataccacactatgagccagagcaactgagtcccagcaggcttggttctgccacaagccacaccaaccctagaccagcccaggaatccatgagcgaggtctctcatgcccacttcctccgagggaacccaaccccactgcaacactgaggatcaagtttccaacacatggaacatgggcagctcgcactaccgcagggcttaagtggtttgggcagatagggaaggttataattgaaacacaactgagctcagggaagtaagttcctattggttgcagtgaaccatgttttgaagacaagctttattggcagaagagggtttcacaacctcaacaattggagggccagtgttcagggttccaacagtgtctggtagaagaccaaagaagttgccagcattcttggaaaaatactgtctccctaaaagaagtatgccatctgatttcctagctcagccttcctgccccttaccttataatttatcttttgatacacaccactccagggggaaaatgtgctaactgatacagctatttagatctatttaggatctgaaagttgacagcatttgtgtggtctgtacatttagtgggattcagccctctgttcaccccaactttgagatgactttggtaaatttacaagaagatttcagatctagattcctagagatggcctcctatatggttctccttggtaatgtctgcctaaggggcccaatcagagtggtcaggggtctccctgtactgtgacgattgcactgcaatgactctttccaacacacctatttttaaaaactcactgattaggcttaattaaaacaagccactgctaattatccacagtattcaagatttgtaactacacagacagaacacatggaatgtgctattgtatttccccatccttcccactggtctttggaaaatagttttaatatgaagaaaattcctgtacataaatcatttcacaactgtgtgtggaagacttccgatgtgcctacatatcttttacgagggccctgctgtctgaagcttcctgctttggcttcccacactctaatttatttaacagactctgcttcataaacagtttggaagtaaacattaagcctgccccttggcatttttaagtaattaaatatgaataatgagttatgaacatacaagacacctggaaaacgttcttctatgcagacgccacacaggctggcgagaggcagggtggaagcctggcttctctgccctccttcactttgtctcagaagcctgactgaccctgagtgtaggcaggggatctgacaagtgtctgtcttcctcccccatctcaatgcccttggagaagtcattgtcctcagcctgcagtcaccttgaatccaagaagagaaatcctcaatgggtagaggctgtaccctgagcagaagtgatcactctgggggaacccattgatccagtcaagtgaaggtggcagcggtaacttcacacggcctgtgcagcctggtgtgagagagctgtaaccagatggagccttgaccagggctcatagtcggggcccaggcttactctggttaaaccgagagctcgagccaggaccctgaagacagacaagctcactggcccctcatctgctcctcttcctctgtggccaccctaaaaccgtttcccctctctgctcctcacaatcaattctctctctaactggtacatcaggacgtcaagcctggccgtcaggactgccagagccacccaaaaattctagttacatatataatagtggacgtagcttcaatagacaagaaaggaaaccctgtatcttaacaaaatgatgacaactctgttcaaactcacggactttgtggattctgtttataaacccacacttatttctaagggaagagaaagacagcaactgtagctccctgcaggggatttcagaagcacaatagtttgcctttcatcatggagcttaaacaggtgtctaatggaacaccagcaagctctctctgacgaatgcccagcttaggagctcaggtcccaggcctcctgtcccctgggtacttgtcagacaggtacgcttcagataagtttgtacatgtgtgggcatgcgcgtacacatgggagtggctgtgcatgtcctcatgtctgggtgcagaggggtgtctgtgtgtgtgtgtgtgtgtgtgtgtgtgtgtgtgtgtgtgtgtgtgtgtatcagagatcaatcttggacctcagtttttgagacaaggtctcaccgggacttggaggcagactgcccagcaaccaccaggagcctgcctgagcctctgcctccccagtgctggggttacaggacggcaccgccactggcagcaactggcagctactgtaagtgggtgctggggttgaacttaggacttcatgcttacaaagcaagcactcaaccgactgagctgtcttctcggccccagatggcacagatttccagggctacacagggagaaacctgcccttatgcaaagctacaaagaagctaatggcacctccctgggaggtgcacttcgggacaccccagaatacctttgtggtgactcatagtgagtcaccaaattttaggtcaaacttcacattgctggtactgttggagcctgagacatgctgggaggagctgaggttcaggctgcaggaggttgctgtgtcgcctgtcactggcacccaccccatccccaccctcccagttctgccttggggaagccacacactccaggctgcctagggaagtggcaagcacgctatctctgtaagcctcctccccagagcaggaccccttctgcttgcccagcctgcaccccttactgccagtgagcctggaataaaacccaaaatagtgtggaggtctgctggcacctgactccccatctccaaactctacagaacagaatttgaaagtattgtgtcaacagactccagctctagaacatccccaaggatataaatgcactcgggtctgtggtttgccacacaggagggttttgacaatcagaggacatctggcaatttctgaacacatttttttttttttggttgtcacaactgagagctggggcaggggtgtggttgctgctagcaccccaataagatgagatcaatgatgctgcccatcaccctaccatccagagggtaccccactaccatgcaggaagcacccactacaacccatgcaggtgacagcccaccactcacaccgaagatcccccactaccaccaccaagaattatctggtgctgtgtgtaggcattgcagacaccatgaaacgtccccctcaagcctccatgacagacactccttcaaaaggatcaggtcccatgccacatacacacggcaatgtccccctaacatgaatgacatagcagaaaaaaaaatcccctctgcagagctgtctgaaaagatgtgggctttcaagaagaaataatgaccatgaggtactcggctgggcttgacaaggtaccaatgtttgccgggtgcccagcaaagctgtgcatttgtaagactggaaataacaggcccctttgcaaaatgaacacggcaatttggtcttaatgggagccctgacacacacaccatctcatctcagccacaccatgcattaacctctgaaagttcaaatatagaaggcggtgtttgataaagatttctgaattacaggggaaaaaaaattagcaggtcattaagtcgccaacacagggaaaattaaggaaaataatcagcatggtcgcagatcggctctctcggcccctctcccttcctcctgcctcagccactgagtaacttggaagacaggtctgcaccacaggtccagctacttgtatttttttttaaacctactaacaccttttttgacctgtcttggttcttggagtacaaggtgaggtgggcaggcagacaccagcccactagacagcaaggaaagcaggtctctccagaatgtccacaagtgggcctgctgaagaagcggcccagacatgatagtaatacactctagacacaaaaagtagcatgcgaactcctcctctggccagcaccaaaacttcagcctcactcaaaacaagtataaatataaacaggcctaaccaatcaagtaagcccacctgtatctagagatgtttgaacacagagtgaacttccactgggccagcagcctgacacnnnnnnnnnnnnnnnccccccccccccccggctccactcctactaaaaccctgacaataaaatagaaagaggggtccaacgggattgagtcaagcccagaagctctttttttttaagatttatttattgattatgtatatatacagtgttcttgctgggaattgaactcgggacctttggaagagcattgccacctctccagccccccaagtccagaagttcttgctggacctactaagccatacaaaaatagactatgaagctggggagtcaggcaaacactgccaccatttaaatcaggcacttggggctggggctgaggctcggacggtaggacacttgcctatcatgtacaaggccctgggttccatgccccacgccacataaaacagatgcactggtgcacacttgtaacccacttagctgtgggtggacacaggctagttccacgtctcgctggtgtgaaaaatgctttagggaatcaggcatgaaagctgagggtcgatactagcttttatctgcggagggttgttactcaatagtgggtctgctgggttggactgcaattccgcacttaagttctgaggaattaccacactgtattcacaccgactatccaccccaccagctttgtaggaggcctctttctccacggccttgccagaatctgttgtgttgtctttttgacaatggtcattctagctggggtgagaagatgttacaatgtggttttgattttcattttcctgacaagaaaaaaaaaaaaaagaagaaagaaagaaacgcaacatgatactgtctgtgtgaggatgttttagacagtgcaggggacaaaaagcacagatgcatgggattacaccaagccataaaacagagggatgagggacagaggcagagacacctcggaaaaggggaggaatgtgtacacctcacgaggagtgaacgcccagaagtgactctttttagctcaaagcaacagcaaaagaataaacaacccaaaaaacattctaaagagacacttctccaagaagacagatagatggacaaaccaaatcagacctattaacagatccctggtgacagtgtcaacatgtcctcctcctcctgcctgaccaacactgtgtaccacaagaacagagggggttttttgttttgttttgttttgtttttgttttttgttttttcgagacagggcttccctgtggctttggcgcctatccgggaactagctcttgtagaccatctgcctctgcatcccaagtgacgggaataaaggcgtgtgccaccactgcccacctaaggacagagttttaaatgatgaagtaacatctgccaccttgtacacacactcaaagtgtgtctaacccagaggtttgtctacatctacttcccccgagtttccgaacttgggttaaataaagctaaccctactgtcccccacacccctgctacagagaggggatgagcagagtgtgtaacatgaaaaacgcttgtgaaaactggtgttaagagtgtggcactcgccaggcagtggtggagcacacctttaatctcagattggagccgggagagacggagagacagagagacagtcattcctgaaggacacttaaaaatatcaagacaccacccatgacacatggattgcagttttaatttctcccctcaagcagatcccaaatcatcttaaatccaagaaggagagtcttcctgtcctatcttaacatcttatgtacttctggaaactggacctagaccttctacagaagcctcaatgcctttcaataaccagtcttcaagaggtcccttagcgccccctgctggacagagatcccctgggcgcccctctttctcacagggtcccttcagttgagaggctctgtcctgggggccacagcactcaagctggttactaaggttctgacttatttatgtaaaccagggtgtgaaacgcttgggacagtctgcggggacttctactcaccacagtctttccctcgttttgagcatctcgatagtcagggttaagctgaaagacaaagcaaaactagtgttaattaaaaagttccagtgaagatggcttgagttcaatccctgcattcacctgcatgctcatgcacacacatgtacgcacacacacatacacacgcatgtatacacacacatgcccccccacacacatatacacacatgtgtacaaacacatgcccccacacacatatacacacatgtatacacacacacacacatgcccgtacacacacacatatacacgcatgtatacacacacatgcccacacacacatgcccccacacacacatatacacacatgcccacacacacatgcccccccacacacatatacacacatgtatacatacacatgcccacacacacatatacacacatgtatacacacacacacatgcccaaacacacacacatatacacgcatgtatacacacacatgcccccacacacaccacacacacgtgcatacacacatgctcacacacacatatacacgcatgtatacacacacacacccacacacatatgcccacacacacacatacacacatgtgtacacacacatgcccacacacacacatatacacgcatgtaatacacacacacgccctaacacacatgcccatacacacacacatatacatgtatgtatacacatacatgcccacacacacacatgctcacacacacatatacacgcatgtatacacacacacacacacacacacacatgcccacacatgcccccacacatacatgcccacacacacacacacatttacatgcatgtatacacatgcatgcccatacacacacacacatacacacacacacacacacacacacacacacgcccacacacacacacgtgtgcacatacacacatgcccacacacaggtgaacatgcttaagtaccaggcgagtgctttagtggacgctgacatggatgttggttttgtacttgtgtttgattttcactgaaatgtcattaaccctttatgattatctgtgttcattattccatctatatgtggagtaatacatacatggaatatatatatataacatatatatatatataatatatatatatataatccctctctcaagttgtttttgttagtattgtcactacagagaaggaaaaacacccaaataaactcacagcctcaaattctaccgctttgtcccttctccaaatacagcaacagccgtatttatcaaagttatcggcaaaggattacagaaaaagatattgctaaagaaggaagaaaatgacgggctagggaagtccctggatattttaatgctttgaaggaaaatacagcattatgttaaaaactgaattataaatctggcacaagggagagagagaactcttgtaattgatagagcatctctaaggggcaaacttgtgtcgagtggtattttagccaagagtcctgtccctgaccactgaccctgtggcctaggaaggaaaataagacataaatgtggtcagctataccatgatgcagatgtgatgggagctaggaggcagaaatgaatgacttgtaaataacacgggtcagaggagacagggagggaggagtctgtgatgcgctagcttattcaagaattgttcaagggtctgagcaatccttgaactcgggactgaattttaagtggcaggtaaaggagaaggaacacccgcaccctcgggacttatttgcagagtctctctgtgatacttttaagatatgtttggagagtttatccacttagcctcacaattctgcttctcaggaatactctcgattctacttcactgggcgcactgcatgagggacttcacgcggtcacacccacgccgtgtcagggtgagggcacatgtctgagggatggaatccacaccctgagtaactgctgcatctggctctcctgcctccaggaagcagggtgtgtgaaacaaaacagaagggttccacactgaataggcccttatgttggaaggaagatcaccctaggtctagggcctagaccacgaggattttaagctaaaaggaagatcactcaagacaaacaaggcttttaaatgaatgctataaagtcaatcttataggcttgcattcagcagcatctaagtatagaaactgcgacagaaagatatgcttgattctcaaatgctaaccctgaactaggagagaaatcactgcgttatggcaaaataacccaagctttaataatatttgctacacttttaaggcagtgagatgggcaagatcagacccatggtccacagagccatgggaacctcaaaaggagaagaacatagattactggcaatatcaaaaaacaccgtcttcgtcaactgttgaagacagttaaacacgactgcaacgtggaggagaggagtcagatcattgccaagagtcaacagtcccaatgccagctgcaaaatgccctcagtgtttcatccacacaacagtaagaaacagactgaaatcatagaagcccagaacacgtgctcatattcttgctttttttttttttttttggttgggggcgcggtggggaacacactcatgagtttgtgcacataagtgcaattctcattgagaccagaagagggcaccagatcctctggagacatgggcgctgagacccaacagaactgcagagcaataggtccacagtttggaagcaagcaccttaatgggctgaaccatccccccccccaaatttccctggttgttttggtttgagttgtttgtttgtttgtttgtttgttttggttggtgtttctttgtttgagaaaatgtctcctgaagtttaggctggcctcagactcactatacagtcgctggggggcggggtgagcttctgaacctcctgtgtccccctctgggagtgctgggacacaactgtgagatgccaagcctgacctctttgctagtattaagtttttaattaactgcacctaactgcaaagttaggaagtgcttagtgccatctggtggaagcttgtcctatctacaaacaaatatgctagttcattttcttcagagagagagagagagagagagagagagagtgtgtgtgtgtgtgtgtgtgtgtgtatgtgcacatgcacggtttttcaggcaccagtcaccttttgttgttgttgacacagtgtttgtcactggcttagaaccctcctagttgtctgctgggattacaagcacaagccaccatgcctggctctttttaggcatgtacccgaggacaaactcagggcctcttgctttcccgacaagcagcttacccagggaaaccccccccccaagccccgggtgagccactctctaaagatgctaccaaagccaggcatggcagagtgcacttgggagggggagacaggatatgaggaactcgaagccagcctctgaaacacagtgagttccagcccagacagaatgagaccctgtcttgcaaaaccaaaggtaatatggaaacttttttttgtttgtttgtttttcgagacagggtttctctatggctttggaggctgtcctggaactagctcttgtagaccaggctggtctcgaactcacagagatctgcctgcctctgccttccgagtgctgggattaaaggtgtgcgccatcaccgcctggcttggtaatatggaatctttaacaaataaaattatcttacattctctgatttgtcttgtttgggaaagaattatcacgtcatttgctttagtggttaatctccacggtgagaaaatgtaggaagcagcaggctggaagctgtggtggaatggctcttcccacatgatgggagatgattctaaggcccatgctagcctgttcctaagatgacccctgtcacaagggcataaaagatctaagtcacagcatcagtgagcccacagctgtgctgcccgaaatctatccccacactggccacctaactcatgtatgccccgtggaagggacttactgagagcccagtgacatgcctgtgtaaccacatgaagtccacgtgtctttattatctgatctgtaataaaatacatagatatagatttcaaccacagttttatggccctgcgtatttcctgaaaattaatccacactatgtaaaactgcatggccgggggtggggtggtgggtgagtggggggtcttctaaaccttggcttactctgtggtcttgcagagtaagacccaattacatcctccagtgctgccctaagtcgttatgttttctacattcagccaatcttttacagagatcctattcgtcagcggtttacaactgtgcatgctggctgcataattcactatagagtctccagcctacggaacacccggcttcccttgacttgtggccgcttctgttccgcacgaatcttatgctcaccacgattatctggataacttcatttccttgtgaaatgctggttaaaagagttgcactgagcactatgttcacaaataatgctgcagagtttctttctcttttctgctcttaaagttgccatctttaaacttgctgattttagtgtgcacacctagatgttggtaatttaaacatttactaaagccagaggtctcagatgtatctgatgggagcaatcaacacagtaagagccgatatatggctcggtgatgcactgtacagtcccccacagacggcaggcacttagcagacagcaaccacagttaacatctgtgcctctctagagctcttccacatggaggcattcagtaagtgactgtttcatgtcagactgaggtagagcaaggtttcttggcctctggatgctttgtgtttgggaccagataattctgtcagcagaggagaaaatggccctctgccttagccatccatgaggtctagcggcagatcccagcccccttcccaagtatgtcagccaaccatctccagatattgtccaaaccactgacaaattacacagtgcagtagtccaaaagcagcatccagcctgaacacagttgttacattattttttatctgtttaaggtttcttgtttatataacctctcagagaaaggttctatataaccttctctatgaaaggaaaccactgtatttgcagcagccatagttcctatccagtcagcaacctagtctctggtgagtgcaaattcagtgtgagtcactgtccacgctgtagagacaccgtccacactgtagagacacactgtccacactgtagagtcactgtccatgctgtagagacaccgtccacactgtacagagccaagtagtgtgacacactgttcacagtggagagctgggtagtgtgagagacacagtccacactgtagagacaccatctacactgtagagacactgtccacactgtagagacacactgttcacactgtagagacacactgtccacactgcagagacactgtccacactgtagagacacactgtccacactgcagagacactgtccacactgtagagacacactgtccacactgtagagacacactgtccacactgcagagacactgtccacactgtagagacacactgtccacactgcagagacactgtccacactgtagagacaccatccacactgacaggcatatacacaatgcacatacacaatgcacagatggatgaacaaacacataaacaactacacactagctggttgcaaggacattgatgctcgtggggacaggatgctgctctccgccttctctcctgactctccacagaggagaggcacttcaaatctcccagactttttgtgaacatggtgctgtacattcctgtcttcttttccagcacaacccctcagaacacagatgaccgcctgggtctcacacaagagaacttgggtccagagagaggctaaatgtctgcttaaagcctgacacacagggggccgtaggtatgacaatcctttgtaccattataggctctctttgcctaattagcactgtaaacccaaaagcagctccaggattatgtaatctcttttgaccaggattgtctaaaacacatccatgttttaatctataaatatgcctccccagggtgggaaagagagcacaaccctggccgtccaggtcccctgctgggcacttcccttccacgcaaaaggaggacaatcccctgtctgatttttaaatccattttatacagagcatagactggacttagggcttcccctcatcactgctgcttctcccggtgaagggcattcgagaactcggcccaccctcccttcagctgggctcccctgaagaactctgcatgaagccactcatggccacaccctggcctgtgcaacacacacacacatacacacacacacacacacacacacacacacacgcacgcacgcacgcacgcacgcacacctcaccccaaccccggtgaaacactgccctgacttcctggcacttatgattcaacccactgggttttctagttgtccccagcttctcaggctcccaggcttcttggaggttccagtctaaacacaccatcctctccaattcctggggctgatgagataaaaatctactgtcagccccatctcaatccccaaatttccaaatgcagagaaactgtagctgttaacactgtttcctgtctgttatgagcacctcagattaaccataataaactaggggtggggggcagagagatggctctaagagcatgcaactgcttttgcagaacacctaagctaactaattaatgagctgaatgactttcttcatcaatgtgttacctctgtcagtttctctgggtggtgatatgttatttatgatttattaaagcttaccacctgaggattcagaaagcaaagtcagcctcaagctatagagatcaggcagtggtggcacacatctttaatcccaggactcgagagacaaaggtggatgaatctctctgagttcaaggccacccagggctacaggagattgaatcagtctgaaagaataacaaagctcatgcctttaattctagcactaaggagatataaaagataggagcaggtcttcagtagtcagtcttaggattttccagccatgctgaggagagcctagccgtctgggattgcagtctgaggtttggtggagccaggatcacctttcagtctgaggtagagtaagagttagtggctggctgctttgcttttctgatcttcagcttgaagcttgaaccccaatatctgtttctgggtcttttatttatcatgctacactctggccaacctgcctggcctaatcagatagctccagtaaaagtgagagaccctgatgacatggatgtccttctgtatactacaaatatgtgttgcttttattggttgattaataaagctgttggggctaatagacaggcagaatacagccaggcaggaaatccaaacagagatagtgaaagaaggtggagtcaaagagatgccatgtagccacaggaggtaacatgccagagcatctccggagtaagccacagccacacacagattagtagatatggtttaattttataagagagagagctagccagtaataatcctaagccattggacaaacagtgagccgttatcttataagcagttgtgaggacctggtaggtggagagaaaccagtcaaatggtacccagacaggacaaagtctccagcaatatctgacacccaacgtgggcctctcaagtttccacatacaacctaaaaacaaagcttaaaacaaaaagtgggatctgtgatgtatatacagagctgaggaaagcttcctggttctgtctcccatgcagaccacggtgcccaatgacatagcattcaggcttgaacgcacagaaaactagaactgcaaccagcaagaacaatgccaagcaagaaatacaaacacatactaaacgtgcaggctataggtagttggcgaataacagagattactccagtagccgccctatcctgaggagcctaactcttgatctagtcttcaaccccaagatcctccaaacccatagaggatggaatcctgagcaaaaagacatgaggctcaccaatggtctccacacacaagccctcaaatgcacattcatcctacacacacacacacacacacacacacacacacacacacacgcaggaaacatacatgccttacacatacaaacacacaatagtgactcatagtctaactgtaagggttaatcgtagtggccaacttgatgagttctataatcagctgagagaagggtctgtgggtggccaaggggggttaatcctgagaaggctgaggtagaaagacttgaccactgtgggcggcaccattccctgagatgtatgaacaggagagaaccagctgagcggaagccctcatcagctctcgatggctggttcatgttctgttgccctgactttcacatgctggtctgtatcttattagccatgagccaaaataactcctttctcacctgaggtttttgtcagggtattttatcataacagcggggccagggagggacagaaaaacaccaagccagacatgacaggcaatattcaaatcacaggaatggtccctgacaatgcaatgactttcacagaaaggggttgcctggttcgttgtttcaggcagagacctaacaacactgtacccaacagtctcacctcggcagctaagtagttcccagtggcaagatgtttaaatctgaacaggctgttccactgtcctgcaccgccccggcacggatcgtggtgaaccacctacagagagggagagtttcagtgacaaaatggtatccacatggcagccaacaggtgtcatcagccagagtaacctgttgtgtatgccaacccatctaacatgtacccccgagagcacaatgtgggagaaaaacacaacttcccatcagtgagcataagacacgtcacacctcacttgagagagcccgtgcctcacacctgtaaacactgtcttactgcaaaaggcaatgtttccggtcaggggacagaggctcacacataaaatcccaggacttggtgtgatgaggcacaaggattacaaaaggttcaggatccctttgtgctgcacagtgagttccaggccagcctggactataaagtgagatcctgtctaatatgtaccatcattaggctgcagaactgggaaggtcttggcagaacacccacaccacaccaggcaccacggactgcatgaagcccttgccaggagctgcttaacaaccattcttccagcttgcttaggagacctggctgatctcaaacttgtgactgtcctgcctcagcctggtgaatagcatgcttagctatgcgtatctcgattttgatgcattcaaagaaaaaaatacccgctattttccgtggctataggttctgtgtggatgtacagattaagatacatgagactaggataatatttaattttattcagggagaagtcacttacatgagaacccgataacccacaagttagctccgaggatcaatgtcctgccgctctctgtgacccgaccagaaccaagagagagcacagcctgtcttggagcccaggccaaatcccacatgctcacgctcacatacgcacctgtgatcacgcccaaatgggtgtggtcagtgccacaggtgcgtctggtagctctcactacagatctgtctctgcctctgccagtcatgacgcagtgccacagaggcacatggcttccagtctgatcagcactgatgaattcacaatggaaatgttttctcttttcaaccccttgattaatttgttctgctttataatgggtgacatgttcctttcaaattggtcacagccacaaagagattatgtgttaattcacaaaaattattccatgttatagacatgccaccaatgttacccgtaacagcaaagccaacagcctgatgatctttatctttttatataaatatttagcaaacctcctcccccccaaaagtacatacctctatttcccagagtgctttagaactagtagctgacgttgctgactgacgcaaggtcgtccgaaggaaaatgtgctgttttttctcgtagtcatcacaggtcagaaacttctcttgttcggcatgaaacagtctcacgacatcaccctggagaaacaggtgaggaaatggtaaccatccagtggtcaccaccaggaaactgggggtcctgcagttcctttctgacctgggcactctgggctgcagggccttcgcctatccttgaaggctctgagcacatgtcagattactggcgcttgagaataaaggtttgtatggagggcttactcacccctttcaacacatcctcacgataggagctgaatttcatgaataaagtgattttccagctagtgttgcaattgacagcattcacctattggtggagacaaatgttaaagacataagacagtagactctgtgttctgtaccaaaaatcaccattccaaacaggagaagaaaaaagacaactatggacagcaaagtgtgggcctcaataaaaaacatcttcaaagaaccattcaagacaggcagtacctacagacgcccaagggtgctaacactgccagcatggtgctcaagagaatcaagaccttcctctgtcctactctcttcctccctccccctagagaaaatcagcaccccttcctctcccacctggactcacctctttgcagcctgggttgtccaggagttccacattgctggcatgcaggggctgcccagcgttcaccggcatcagaacaactttatctcctacgacgatctgggaatcagaaacacaccctgatgctctgaggctggaaacaccccagcagtcctcaccagcagcctgcctcccggtcctgtcattctacagattgtgacttgactcttctccctgagaagcatgttcagtgttccatgcctgccaaaccctagtccccgttagtctccatgtcacctggggcttctcagaggtcagaatcaggcgattttcttcccaaaagtccttgcggctgacacagtgaaggcagctaccacgatgttccttctagccaagcttcagaatctcaccagggtagcagagaacacatccctccatgctccctccccaccgaaaggcggtgctcccactccaccgaaaggctgtgggtctgcttaactaatcatcccgaatctcagaattatgaagcatctgacctctgggttcaggaaatacaaagcagggcacaaccttggaaaaatctatgctttgtcaggcctggagctttcggttcccttttacttgaaatgtctaaaaccaaaactgtaggagcctgtgtttcttttaaaataagaattatcagggttccaggggaaagtactaaaaaaatctaagtctgtatttatagtcatctgtgtgataagagcaatgtctattttacatgcaaatatctttatatctaattagacttgagggaattgaatttaccttttcttaatggcaataacagtgtgattttagtaactggagagacttgtgctagttcttttttgtttgtttttgcttttcttttttaagatttattttgtgtgtgtgtgtgtgtgtgtgtgtgtgtgtgtgtgtgtgtgtgtgtgttttctatctgtatattcacctttatgccaaaagaggtcatcagatcacactatagatggttgtgagccaccatgtggttgctgggaattgaactcaggacctctggaagagcagccagtgctcttaaccattgagccgtctctccagccacccttaatttctttagaagacggttttgtggcatctactttcccagctgtggggctttcccactctgaagcaaaatcaaaaaccttccctttgcatgtttcataccaattacatgttagaacaattaaagattgctttgttacataaatgagaaaacaattgggacttgggacatctccatgtaccttaaccaaaacacacgctcacattttcagtgtcccatgaccctaaatgtgtactattgaggagctgtgttgccgcacgctgcatctagagacctatctgtgtccaagaagcctcaagttcagtaacccagcgcaggaaggtgcccttggctttgtgggatgagtgcctgctgtttgtaggacaggcctgtagacctcatcccaccttccaaacacagatgccagcaaacactcatttacagaaaataaagtatatcattttttagatagcactgaagagggactagggaaaacgtgtgtataagaaacagtccataatctcggggaattcgcattactagatgtgttggaattattctcagaagagtgaggcttcaggcctgacggaccctaagaaactctatttgatgcataaccagagggcgaggccctttgcttttacatcttataatcccaaagacttctgttgggtctatgcagtgaccatgtcacgctgcagatgggatttcactgataacgatgccacctgcagctggctgtccctgctctgagtgtcatttgggacagtaagaggaacctcacagtgggaatcagaaaacaccaatgccctatctctgcctctgctacaaatgccaggcttgtcattttgtgaaatcacaaaatctgcctgccagagttcctcaccgtgagttagaattttctactgacttcaagaattctacctctttatgcttctaaatctacatcagggcaaaggacccttgtcttctcaggtcaagactaaaaaggaaaagagttaaatgctcaaacatgaagaggacacgtggaaatgaaatacccatgttttcggctcaccagtgtcctcggtggtttttctagtaacttagcagcagtgaaggactttctatacagctgacagtgaagggacctgtgaacccgtttcccccaaaccatgcatcctacctagtgcaccttcgtgcacttagctcaaggaacagcgtgcactccaggccgccatctgcatcattctccacttgagccccgaggacttcttgttggttacacacaacctaagtctctccttcgctcattgctaaataccaaactgcaattttaaaattcctctgaacattgcaatttcctctccatttaagatacttacgcagaaactcagtcataattaaaccactcaaagagacagcattggcaaaactgccttcaataaactacagtctgatgttttaaaacgctgcctgttcctagccaagaaaacaagagttgcatacaagtccgtgcaaggctgacacaaggctgtgggcatgccagccttcctcggcaacgttcatcacacacaaagccacatagaggtgaacgaacacagtgacggtttcagcaagaaggtggaagactgtggcagcgggactttgtggagtgcatccagaaaagaacaacttaacgcactgtggggcggccacaaagacaaggtttgtttctgctgaaactaattgtctaaagtagttgttacattcaactctctcctgatactatcaagtggcttgcaagcaaggagagaaagtcaaaggaggaatcagcagagggaaccatgaaattcacagcaacccgaaggcagagagaggctcatttcaccatgtcatcacactcttttagtttgagcgtagttaggatttgtttgatttgacgtttggttttcatgaaccacctatagaggagttgggggttggggacaccattacaagagaagtggatagttcccaaactacattttagcccttgaatgattgagagttgagtgtaattaactacaaatccagtgtaaggacgcgccatgctgccagcacacatcacttcatatcaaaagtaagcagtggaagggagaactagtttcccaagaatccagtccatccctgcatgccatgcagcacagaccttacctaaggaaagcatcaccagaaaaattactaacccaattaaatcatggcgcttgtgtcctgtagaattgaatttgtactttaaaattcactgagggaaaaaaagagattctctataaaaagaagacaattctcacataagaaatacctccaaacacactaaagatgcaacccaagtactgattgtgaaacatggcaggagaattacattttcacttcagtcagaattcatatgagcttttccacacggcaagtattgatcacctggcatttgtgtggagttctacttataaacctgtctttactgagcatcttccaggagctaaggactaccacaaaaatgtcaaattgttaaccaggtgtggcaatgcacaactagaatcccagcagtcagtaggctgatgctgaggcaggaggaccaataccagtttgaggtcagcctatgctatattacaagtcaggcaagaatatagtgagaagcatctccataaatagagaagatgaggagccatctccataaatagagaagatgaggagccatctccataaatagagaagatgaggagccatctccataaatagagaagatgaggcaatgattcctatggaattatctcactttttttctcttccacaaaatagcagaaaagatctaagccagtggttcccaacctgtggctcacaacccctttggagcttgaatgaccctttcacagaggtcacctaagaccatctcataggaaaacacaggtgtttgcattatgattcataacagtagcaaaattacagttatggagcaacaacgaaaatgattttatggttggggtcaccacaacatgaggaacttattaaagggtcacagcattaggaaggttgagaaccactgatctaagctctggcgacatcacagccatttatacaccccagtttattgtcattgacagtgggcagatgtcacagtccctcaaaccctgcacactgtgacaacactgtaagaagttgtctgtgaagatactgaacagaacattgccatggctctctgctaacttgattaactgtcctgtgatttctgagcgtggcctatattgtaaacaaatgcacttaacctagtaaaacaatgctaacgccaaacgtgttagaaagtgcaatgaatgacacatatatgtaaaaccgccataatgcagcccatcattccctatgctaacttaagtagtttagagttaactggctgaagactgtactttcggagttctctagcacaccgtgggttgtttgcttctcccttggttttgcccacacatacattatcaccctcgcttctcagcttccagaagggatggatgtagaaccaggacccttcgttccctgcggcatccaaggacacgcgcatggcattcttctccagcagagcaggcaacctcttgttgacagtcaggtacttgttgctttttatatgcagtagctgcagaggaaagatgagtgttagagcctgtatctgtggtctcctcgggtagctgcattcataaatccacacaccacaactcatgctggaaactaaacacgggagctactttaaggctcagcaacctccaacttgccaacctgcctgcctgtctcctcctcgtctccaccccaagttctgcttcaagggtgatggtgactgtgcgtggaagataccccaggggacactgaagacaccttcatccactgagaaatagcagactaaaatcaggctttccaaaaaagacccggaagctgcctgaacctcacccatttccaatactcttacagccacacaagcagaatctgctgaagaaaatcagaggcctacgccacaccctaagcaccctgcccatcgacagcactaactcacactggtcctcacctctcccttccccatggacaccatagacagtcttcccaaaatataaccttattgggtagaactacaaaggcaaacttcccatctagtttcaaaatcagccaaaagagaagggacattttagtacccataagatgaggcagaagttatttcaaagtaaaatggcaattttttaattgaaaaaacaagaattatctttttgtaaaactccaggccctacccttggttcttattgtactaatgaaggcatgaaaaaccatgggtctgggaactagctcaactggtcaagtgctgccttacaagcctgagggcccaagttcaatcccccaagttaaaaaatcaaaaccgaaagcaggatgaggaggcacacacttgtaaccccagcactcgggaagtgtatccctgggctccctggcagcctgcctagctggatccacaagtccaggctgtgagagacctagtctccaaaaacaccatggggcagctcctaagaacaacacctgagatgaggctgacttcaggcttacacacacacacacacacacacacacacacatcacacacacacacacacacacacacacaaacacacgcatgcacacacacgtatgcacacagacatgcacatgcacacacatgtatgcacacagacatgcacatgcatgcatgcacacacatgcacacacatgcatacatatgcatacatgcacacacgtatgcacagacatgcatatgtatgcacgcacatgcatacacacacatgcacacatatgcatacatgcacacatgcatacatacccaggcatacacacacataaacacatgcacacacatgcatacctgcacacacacaccctcaagccttagtatgtacctccaggatccatgtcaaagcacagaacgcagcccctaagtaagacaagcattgtacttgaagtacttgacaaggagcttaaatgagtcaccaaagctcagtgaagagacatcatctctggaagtctacttaggggatgtgcagtcccaccaagccgaaagtcacgccctccaccctgtcctgtggggaacagctttgccctgccctctggcacactgccatttgtccatgacagaacaccaggagacattattctttaatgtggccttgttaagtgcctcattgtggtgattactgtaaggaacctgtgcagggtggtgtttaccattttaaacagtgtcttctttatgagcactcaagggaaacattttcctgatctcacttctgggaatgaatgtgcttccagtccccagatgggctctatgctacagacctccactaccggggctctagcagggtccctcctgtggccaagcagcagcagcagtgccttgagctggggtcacagtgacagcaatgccttgggctggggtcacagtgacagcaatgccttgggctggggtcacagtgacagcaatgccttgggctggggtcacagtgacagcaatgccttgggctggggtcacagtgacagcaatgccttgggctggggtcacagtgacagcaatgccttgggctggggtcacagtgacagcaatgccttgggctggggtcacagtgacagcaatgctttgggctggggtcacagtgacagcaatgctttgggctggggtcacagtgacagcaatgctttgggctggggtcacagtgacagcaatgctttgggctggggtcacagtgacagcaatgctttgggctggggtcacagtgacagcaatgctttgggctggggtcacagtgacagcaatgctttgggctggggtcacagtgacagcaatgctttgggctggggtcacagtgacagcaatgctttgggctggggtcacagtgacagcaatgctttgggctggggtcacagtgacagcaatgctttgggctggggtcacagtgacagcaatgctttgggctggggtcacagtgacagcaatgctttgggctggggtcacagtgacagcaatgctttgggctggggtcacagtgacagcaatgctttgggctggggtcacagtgacagcaatgctttgggctggggtcacagtgacagcaatgctttgggctggggtcacagtgacagcaatgctttgggctggggtcacagtgacagcagtgtcttgggctggggtcacagtgacagcagtgccttgggctggggtcacagtgacagcggtgtcttggctgggttttactgagctttgtaagcaagcctcattttttacttcacctcgtccagccaccattattttcccttccacccagctgcctcccttggcaactggtgctttatctaccaatgtgctgtgtgtttcttggaaaaggcctcacattcttctttggaacaaggtggggcacttgctagcaaacaaacaaacaaaagaagcctaaaagatctgaatgaagggggggtgcagttgagataagtcaatgtgcaccctgacaatgaggactggaagccaaagcaatattgcctgttaaataaatgtacaatacgaaaactttccccttgaccccgggaaatcatcaagcatcagcccatccacctaaaggactatgtcttctgggccttacaaaccctcctgcacagtcttacctttggtaacttaagctcccaccaagagatcagttttccgagtgcctgcacggatcgcctatgttcgggacttgcaggccagcgccattgggcctggcacaagatgtattcaatacatacatgatatgatgcatgttcactgaaagcctcagactaatcatcatcccctccaaagaagaacacggtatcacaaatgcttcatacagcttgacatgtgggtagtttgacggctcacccataaaggacttccctctctgatgacaaaatgaagacttacttgtataacgttgctgtatttcacgatttctcccaacagtttcttgttctccgactcattctgtttctgctccagctcagcagcatgctgcaagaggacgaccaagtattcagtgtggaagcatagcaagcagagacttagtaacaagaataaagcagacaggctgtgttattagagagctggatttcagacggtttctctgtgtagccctggctgtcccggaacttactctgtaggctcagctagactcaagctcagagacctgcctgcctctgcctgcatagtgctggggttaatgcacataccaccatgtccagcaaggaagttttttgtaattgggggtacatttacactaggctcccagatctcccccaagccaccccaccccaagtgtggcagcaactttacaatctatgctgaatacagccaaacctgtcttggaccatttgtttctatactgcaaatttcagttaagtagaaggttctgtggaactagaaacttctctacagtatgatgtgaaactgttagaaaagcaggtaaattaaaacctcaaaatatagctttcagtcctgagagtacctaggatttaaatgatacaaaacttagtattatcaaattcagacttagtaaaactatatatatatatatatatattattttttctctatagactgttaggggggaaaaagcagtcaaactatctttatatatatatatattattttttctctatagactgttaggggggaaaaagtactataaagggtaaaatataattagatttaacagtcagggtttttttaattcctttttggtttggtgagaagttgagaattagcccggcacaccttaaaaaataacagtggggatgtgttgcccacatgccaggaaataagtaggtacgccctacaacggaaaactacttacctctgcactctgcctgagctctaactgaaatctctacacaatggtgaaatcagcaaggcgagcggcccggtgcctgcttgttattgttgctctcgggccagcctcaggggcgagcctcggagaaagagggcagcgacttacctgaagcttcttcagcagggcagcctctgtgtggtttccttgcttcgcctgcttggctttccaatattgcttctgggcagagtatcgattcatggggcagaccttgaaaaggcagtctgagaaacaaacggagcagtgtgactaaggctctgggtactttctagacaccctttgtaagcctagtttgagacatgaatatcttttagtatttggggacagtcttaatgcactctataacatccttttcaaatacctacttaaaacagtttcattaaactgttttaaactgttcattaaactgtttcattaaaacagatgcttcttcattagtgttttgtgaaacattctagctagtgtaattcatgaggaagtcaatgacgtgtctggagaaggcaattcttattgtagttggctttggatttttgagacggggtctcatgtagcccaggctgacctccatcttactaggtagacaagatggtcttgatttccgggccttcctgtctttcccttgacagtactagggcagcaggcacaagccaccacatgttgtggaatggttaaccatttaaagatgtgttacttttgtttatgctgtagaatattactgtaactatgtgaaggtgtgttacatttgtttatgctgcgtttgtttaatgatgtaagctgggcgttggtggcaagcacctttaatcccagcactcaggaggcagaggcaggcagatctcggtaagttcgaggccagcctggtctacagagcgagtgccaggacaggctccaaaagctacacagagaaaccctgtctcaaaaannnnnnnnnnnnnnnnnnnnnnnnnnnnnnnnnnnnnnntgtgttacttttatttatgttgcatttgtttaattgaaaagatgtgtagttgtttcactgtgcctgcctaaggttcctaattggtctaataaggagctgaacagcaaataggtaggcagagaaaggtaggcagggatgacaggcagggagaataaataggggaaatctaggcttgagaagaccaaaagagaaggggaaaggaagatagaatgagggagagagagacactcctgggaccagaagccaggcacaggaagcggcgaaagaaagaaacacaggggcgttggtggcgcatgcctttaatcccagcactcaggaggcagaggcaggtggatctctgtgagttcgaggccagcccggtctccagagctagtgccaggacaggctccaaagccacagagaaaccctgtctcgaaagaccaaaaaaaaaaaaagaaagaaagaaagaaacacagaaagaaagaaagaaagaaagaaagaaagaaagaaagaaagaaagaaagaaagaaagaaagaaagagggaaaaaaaaaaagccctagataaacagatcaaagtaagatctaagataaggccaagcattcataactaagaataagtccccatgtcatgatttgggagctgatttgtggcccaaaagaaagcttggtacaaccatgcctggcttgatgaggtatttaattgtcatgagtcccaacactcaggaggcagagacagttagatggtgagttcaaggccagcctggactactccacctcaaaacaaaacaaacaaaaaagatgctgtatctgcccctgtattgcttgtccatgttcagtatatttgatgcaagaaataaccacatgaccattgcagccatccattcggatcccctgggctccaaatacctggggtgaacatggtgaaaatctgagagacagtataataggaaggggaaaaaaatcaaacaaaacaaaagccaaaactgtggtcctgatttccaaatacctaaatctgtaggctggagaccacaatcataggcaaccatggtagtgatgtctccaaaacggaagagctcagcagtgaccccttcccagtggnnnnnnnnnnnnnnnnnnnnnnnnnnnnnnnnnnnnnnnnnnnnnnnnnnnnnnnnagtgatctcaacacaaaacacgggtcaactcccaagggctgagggtcccggatgctcctcctgattcagtgataaaattctcaatagcagctgtcacaccagccatggtcagagggaaggaagcgatggctgcctgctgcccagcctcctgcctccacttacatggccccggatcccagccagggactctgctgcccaccccaatgcagacatgtccagtggtccaactccctctagagtctgacaccctgacaacacacatgacagagcaataaacgaggggccggaaagatggctcagtggcagagtaactcagccagggatggctcaaattctggggacccaacaccctcttctgaccttcttgggcaacaggcatgcacacacatacataaaggccaagggctcatatacaataaaaaaattctgatggtcatggtgacacacaccttctttaatcccagcacttgggaggcacgggcaggcagatctctgtgagttcaaggtcagcctggtttacatagtgagttccaggacagcctgggctatgtagtaagactctgtcacaaataaataaataaataaataaataaataaataaataaataaataaataaactaaaacaaaacatccttaaaaaaaaacttactgtgttttaacaaatgtgctactactatttagagacagtctcgctttaagtgtatatcaaaaaaaaaataaaattcagtagagtcaaatatccattcagccacagtcttaactgttctaatggtataaaatgatcaagggctgtggtggtttgagtaagaatgctaccacaggctcatgtatttgaatgtttggtcatcagggagtggttttacttagcagagattaggaattgtgggccttgttgaaggaagagtgtcacagagggtgggctttagggtttcaaatgctcaagccaggcccagagtctctctaactgtgtctgtctctgtctctgtctctgtgtctctgtctctgtctctctctctctctctctctctctctctctctctttctctccctctctgcctgtgtgccatcttgcttcccaccataaggataatgaactaaacctctgagccataagccagccccaaccaaaagctttcctttatatgaattgccacggtcatggtgtctcttcatagcaacagaaccctaagacaaggagtatgactagcatgtttaagaaattaaaaataaaacaggagacataatgaccttataattatatacatagattctattcactggttggttggttggttggttggtttggacactgtggaagccagagaataacttgtagaagttggttctctccttctaccttgtcagttccaggaataaagcacatgtcatgatacagcagagagagccctttacctactaagtcatcttgtttggaccacaaagtctatcaattgccccacttcctttattttaaggtttatttgttaattatgaatacagtgttctttctgcatgtatccctgcaggccagaagagggcaccagatcacatcacagatggttgtgagctaccatgtgattgctgggaattgaactcaggacctctggaagaacagccggtgctcttaacccctgagccgtctctccagcccaatcgttccactttaataaccagaaaagcaatccataatttcaaactttaaaaataccaatatgaagctgaagagatgggttggtggttaaaagacctcctgctcttccagaggacccaagtttggtttccagtacccacagtgaacaactcacaaccaaccacctgtaactccagttccaagtgatccgatgccctcttttggctttcacaggtactgcatgcacatgtgcacatgcacacacacacacacacacacacacacacacacaaacacacacacacacacctgcaccacatacacacacacacacaaacacacacagacacacacagacacacatacacaaacatacacacacacacacacacaaatacatctaaataaaaatgattttaaaacattgtctcaaaaaaactaaataaataaaataaataaatcaaaactaaataaattcctaaaatactactatagatcaacatttgttcattgggcttggcagtgctgaggattgaactcacggccttgcacatgctaagtaagcgctaagctataaatccactaagatttatcactaagatataaccctatcctgagagtgaatagtttatatgaggcagaaaatggcaccttcaaaatgttaacccaggcttgaagaccatcacggctgcaatgtgactcagaagtacctggcacatgtctgtgaagaccaaaggctgccgttgagacatgttgtccttggcagcattatcctacaaggctcagaaattatttcctacatattagcaataacaaagagagttatacaaagttttcgaagcataaatactaaagttgtttgttcacaagcaagcatgaaaggacatctgtgagctaatgccgtagattattttgacaaatatgaggccagtaacgaaactacattgccttggtgcagcaaaaacacaagttgatgttcatgcataacacagccctgtgacctgtgggccattctcatcaactcattcacttgtggaaagagaagcagtaggggccctcactgttgctacagattcctatcatagttcatcaggaaggggtcttttgacacagaaatatatgttgtggtgaattttagaataccccaatgctgctcctttgaaatgacatctttggatagctaggacaacatctgtacagacagcattgaggcctgagtatgtggctgaatgggtgaggaaataccagacatcagacggtgcttattgtaatcccgccaggagtcctgcctgtgccttgggtgttatgactcagcccccaccctcaggaagctcactgtggacttaaagtttcccatgggggctctggaggagcataaagactgctccttggaactcttccaacgggtgacttctcattttatgtcagtaaatatgcatgagaattaggactgcaagacagtctggactgacggaacataggtcaaacaccttctgtggaaaagttgttattgggatggagcttaggtgtgactggttttctctcactgacttctttagagcatgttagaaaatatatactatccttggactggtcagatatgttgtccaattctaaatttactgcctagcaagagtgttactaatgcccccccccacctaattcacaggggtgctgagatagacaaaaagataatctaggtggaatctctctgtgagctttaaggcctgtcataagtgtgaggcagtatgagtgatgttgcctctttctcagtcagagccccatgaagacagaggggtgactaagccctcagcaagccacaaaaaaccagcaatcttaagttcagccggaacacaccccaagagtgtgcaattaacaacgtgtccaccctttcggtggaagatggccctgcgtgagcttgtataaaattcttgaaggctctggaacgcagcagcattgaacagaggaaacccttgctgctgccttgtaagtcaaacacgcaggttctgtcacagtaccagcgagggtggcgcctcagacaggccctcttcttgttcacagaattcacctaattcagactcacccaaacctatccagacctttccaaacctgctgttaaagttagctctccagagacctgagggcaacacacctataatgcaagcactcacgtagaggactgccatgagtctgaggctacagtgtgagacccaaacatccacagatacacactgaactgaactctggaacttgttgcagagagggaggaatgaagatcaaaggggtcggtaccaggcttgtgaaacccacagaaacagctggcctgaacaagggggagcacatggaccccagactgctgtctgggaggccagcacaggactgatccagacccctgaacatggatgtcaacgaggaggcctctgcactctagggggcccctggtagtggatcagtatttttccctggtgtaagaagggactttgagagcccagcccacgtgaagggatgcactctccgcctggacacatgggggagggcctaggaccagccaaggttgatgtggtggactttggggagccccatccaggggccctaccctgcctggggagtggagaaaactaaagttagctcctcaaattcctgcatgtgttcattctctcaacttgaaactagtacagaaattagttcagagccaatttttaactagacagccacctcctcatcatctcaaggctcaatgaattaaatttttttaaaaaagaggaaaaaagtttgtatcatagaataatcatgaaaagcacaaataaaaggaagtgatttgagtttaattcttttacaagcttatccttcgccgaggaggccaataatctgcaggaacatggtgtattagggtatgtcagttatccagcaaggcacatgttcaccaggcagtgtccggaaaaccaccgctcaacatcaggacctcttctctaatcgccttgggacagcggttctcaacctgtgggcgtgaccccttttggggagggggtcacatcagataccctgtgcaccaggtgtttctattatggttcctaacagtagcaaatcacagctatgagggagcaatgaaactaattttatgaagggggcgggggatcaccagaacacacggaactgtattacaggattgcagagccaaggctgagctttggaaggaagtgaagccaccagaggtacttgcttcagcctcatttcaaacgtgtgtggagggatgacccttgaaacctcttaatggtgtatagcagaaactccacacgggataacaccaagctccagaaacacacactcacactcacacacacacacacgaagaaacccagcgggaaaacaaccaacacctccacttcctgtagccactgactcaagtttgaagtgctttgcttcgtacccctaaaatatttgcccctgaggctgtttctgtcccccagaaaccaccttcagcactctagtcaaggccagtgtgtaattctcagtgcatcttgnnnnnnnnnnnnnnnnnnnnnngtagggaaggcaggcttcctcatgcgtcctccttagaggtgtcttaagacttaagtgcagtagaacgcattaacccatcagcaagcctgtctttcagcaagtcggacgtccaccttgtagaatgacctcatgccaactagggaacgttgctgccagagacttcactccctgcttggggaggaaggtgtgtaaggtaaggttctgggaatgctctcctctttggaaggggacacagccgagtccagtggccttgcccatgaggaatgaagttgttagagcacttccttgggaagcaggcaggaagacaagtggccagtccacagcagcgactcatctctgacctggccgtggggtagtctgagctggtctgcaacagagctgtatgtaacttggcttttacttcagtctaaggaactcgttttaaaatgcactgtctgtatcagactctcaatgttgagaagttatcagagagagtatgttcttttggaaatatcaaaccaaatctctcccttggacctgcctaaggaggctgcaaaggtcaggaggaatggacggcctgcattaagaaacacgaaaagttcatcacaacacatcttaggccagcacccatgaaaacagcaatctccttcctccatcacagagcccttactgcggaagggaagagaaaccgtcttccatagctccgggctgtgcaatgctaaagtgttaagcctcaaaggggactcagataaaatccagccttctgttctctgagataaaggagcaaaacctcagagcctgagttgtcaaggttcttcctgataaaactctccagattagaacacattacacgtatggacaagagcaaccacacacagtacctagagtgccctggcaaatgactgcttatatcaggcaactttctgttccattaccgtgacagaatacctgagataatcaagttaatgataagtacaggtcctgctgcctttggatctgtggtgccacagtaaatcatggtggcaacatgtgatggagggaaccacttacctcacagaaagcaagcaaagagaagggcggggagggcgggaagccgcccttccatggaagaccagcacctaactttttggctaggccccaccatagagccttctctacctcacagtagagccacagtctggggaccaagctttccatacatgggtcctggtttgtggaggtggcattccagatccaaactacagcactgaccttgacagtaaagacattcctgtcacatttgttccctcaacacagttgactatcggcaaacactgtgtaaacagtaaaaagtgctacaaactggcaacaaacagcgttttctcttctctcttgagagtcagtcagggttacagaaatgaaaacgcagttcttaaacccacaaaggggctaaggagttgatctggaatttgaaccagggcctccaagcccaattcactatgcagctatgagtcaaagcaattactcacacacgtttttttcatgttgaagcaaagtgcctcacgtcaaacgttgttcttaactctacatgtgcatcttgaggtcactcagaaccagttgaaaccagcttccaccacaaacctcgtgtccccaaacagagtccttcggaattctgcacttaaactttccttcatcatcacagaaagatccaggtcctagtgtcaccacaatagatgtgactgttcaattaacagcaaagccttaatgtgaccagcaagtataaacagtggaaaaatactggccagacagcaaggaatggctcgcttctcatccatcctactaaagccgtgcacacagacaacttctagataaaaactgtggagtatgttcacatttatacacacgtatgttcaatagatatcatacatcaaaagaaactgatgaatgtttttagggggattttgttaatgtactaaaataagggtaaatacatcaatgagaatgttacaaaatcgtaatcttcttgagattaatttcctggttcaaatgttaatgagtaaatacttagaaacaaagcttcatttggataagaagagaaatagattataaataatttatattctggttaaggtttggattctaacattcaatagaccatttcaatggataagcagcatttgaaattgggggaaaaaacacaatgaataatgtttttcacttagctttcccactatagatatgacatgttcacaatggtgatttataaaaaaatgtgtaatggatgaattgatttcaggaatcaaatacacatctctaaatttcattaaacaaacccaagagccaaaagagaagaaaggaaacaatttatatgcatgcatccatacgtgatacttatataattgtgtgtggggtgtgtgtgtgtgtgtgtgtgtgtgtgtgtgtgtgtactgtgtgtgtgtggtgtgtggtgtgtggggtgtgtgtggtgtgtgtgtatgtgtggtgtgtgtgtgtgtgtgtgtgctgtgtgtgtgtggtgtgtggtgtgtggggtgtgtgtggtgtgtgtgtatgtgtggtgtgtgtgtgtgtgtgtgtgctgtgtgtgtgtggtgtgtggtgtgtggtgtgtgtgtgtggtgtgtgtgtgtgtgtggtgtgtggtatgtggggtgtgtgtggtgtgtgtgtatgtgtggtgtgtgtgtgtgtgtgtgtgtgtgtgtgtgtgtgtgtgtggtgtgtgtgtgtgtatgtgtgcatgtgtcgtctatggcaaaatcaaacaatccattccatcctaatatcccctctgaatgggatggaaaagatccgactgagtggaaccaaatggagcaggaagaacagggaaaggggagcaggagcaccactgcaccactcttgagaaatgcatccatgtactgtaacgtgtacacacatgcattgcgcagggttacacacatgtgtacacacatgcattgcgcagggttacaatacaaaacacatttacttctgaaagtcgcaatagtgttcagtgggactggagcgattgctcagtggttatgagtgattgctgctcttgcagaggactaggttcaggtcccaacacctacagaacagctcacaaccatctgtgcctccagttctagaagactcgatgccctcttctgacctctgtgggcactgtacacgcatggtacacacacacatacatgcacacttcatatgcataaagataaaaataaacctttaaatgcctcctcctcctctgctcgttctgcctgtcctttcctacagcagtgtccaccagctaccttcactcgtcagcaagtctgcgtatgagtctgcgtttagcacctgtctgcaatgtgcaggcagtcagaacctttttgcaaacagaaggctgccacgaagcttccgaaggagcagtcatcagaagttctccttgctcttctgtgacattttagagcacaacagtagaactagttgacaatctctgttcttgttttacctccaaagcctggcacccaggaagtgaagagggttgggaatgaggatcccagagaggcaccctttagaccacccatgatgacagaaatatgcagaatagttgctcatcaagttttctgacacataaaaatctatacttccttgtactttcaccaacagtcaagctttacaaaaacataaaaaccacagtaaggaaacaaaacccaagcactcaggtacaacacagggggcacagaggacgggtacaaatcactagttcttaaaatacaaatgtaacataatcagagtgactctgtgcttggacgtggctcatctagggtcctagcactcttgtggggaacttggccaggctcacaggtggtgacaccttcaaggggtggagtttagtggaaggcaattaggtcattggggatgcttcctcaaaaggagatgaaggtcgctcttgtggaaccccctaccctctactgcccgtctcgctataaaatctctcatcgtcatcacatgatgtagtaaatggagtcctcaacacagccaggctgtaccacgtccttagacctcaaatagtgggagctaaataagcccccttttttataagtttgcagcctgaggtattttgtcagaacaacagaaaattgatacagtgattatatagccctgtatacccaagactccatggacaagcttaagaaattactgacttattccagctgcctgggcctgatagtaaatcatcccccgttcctttctcaagtgatctagtttgaattacacatatacaatcaccctaatacctcatagacacagtagtggagttgctgaaaagccggggccacaatttggggctggtcgatgaatgaatggtccctcacagaaggaaaaggaccaccactgtaggagtcacactttaagtgacttcctaacaaaggagcttgtacctggggctgcaggcatcgtaacacaagcacaacagccgtggtagctggggaacttcagtaaaaacttgaaaatgttgcattctagaaaatggaaaggtatataaacacatttcacagaaatgagcagctgccagtctaaagcagggaggggcgatttatttccctatagtgattgatccaggatcaaagcaaagcttagttcagcatcagggaaccttgccaacaactgggggacaaagccgaaactgtgaattactcacaggcaggcaaacttattcctcaagctgggacaagcaacgagcagaagggatctgtgtcggaaagaggtctgaacacttcctggttttcaggaggttggcacgaagaggacagggctcgcccctgcacccacagagtccccaccactcgcctgtctctgttgtggtcactaaactgcagtttgctttgacttgccaacattctggaaccaggaaggcccagccctggagtctcctgcgttttctaccactgagtgtgtgttggtatgaggttaaaacactcacagttcgggcaatgtcactactcattattattagcccaacttgccttgcagatgaacaaatacagttgtgtttgtgtcctggggtttctaaagcagggtgccatgagaccgcgcaccacactcataaaataagggaaggcaagaagcattttaaacgatgtttaaaacatgtgtaaatgattttaaaacatccagaagagacgaagagataaccaagttcagttcctagcatgtacatcaggtggctcacaaccatctgtaacaccagctccatggcctccaacacctctggcctccaacggtgcctgaactcgcatgcacacacccacatgcagacacacacacctataaataattaaaaataataaaaacaaatatcaaaaaagctgctgcttgggggtggcttgtcaggtaaaggcacttgcctcaggcctgatggcctaagcccgcttggcagaaagggagaaccaactctcacaagctgtcttgaccgccacacacatgctgtgcatatatattcccttttagcacacatacacacacacacacacagagagagagagagagagagagagaaatgtaataagaaactttgagatatccagtacccgtggcctttagggaaatgtgactgaaagcacatcagaatggttaaaattaaaacgaatgacagctttggagggtgggaggaacggtcaagactgcgcctccccaacacccagcagcttctacatggttcacggataaacactcgatagattatttaacccatggaaatttctttagcagacgtcaacgctgctgtcattttgcagatcatgagaccctgtttaaagattagagcctgacccagagccagaaagtggcactgctaagactcgaacccaaacaggcagcctcaccagctgtgtccttgtgagcaggagatgatgcaaagactgcgtccagctgttctgtacgttcgggaaggtaatggcacatggatggaaggaggaannnnnnnnnnnnnnnnnnnnnnnnnnnnnnnnnnnnnnnnnnngtgctcactgctcactgaatttaccaacattccttggagtaaacacttaaaatgagtgaatagtaaataaattactggtttgtttgttgttttaattttttaatggccatagctgtacctgaccctggagtgcctgctctctatggatcagctgcttctcaaacgctcctaagacagaaaccatgctttcaaagccacgcagctttcctctgcctgttttgtttgtggttgcctggtaagcaggctgggaacactggggcagttgcctgctgcctggcaggatctagagatctccctgtacagggtagctttccaaagtatttgatggctggctgataagacactccctgggcgcagcaggtaaatctggctaagtttcctgagataaactttcctaaacacagcatgaaacaaatttgaagctggagccaccatttaatttggggggagaacagcctggaacacctggtgttcttggttcctttctctggttgagacaaacaccatcaccaaaagcaacctagggaggaaaagggtttattttagcctacaggttacagtccaaaaactatgaagaaatgatgcttaactggcttccttatagagcccagggccgcctgtccagggaatggagccacccacagtggactgggtcttcttacatccatcaataatcaggaaaaccctgcagatatgcccacaggccaacctgatggggattgagattcctttccaggcgacttcaggctgtgttgaactgacagttaaagttggctgtcacagcagcctgactttttacctgggctctggggatctgaactcaggtctctctccctttgtgtctcatgtaatttatccactgagtcatctccctggccctcactgaattatcattaaagaaattttggttcacagcattctcattctattgtagtgtgtgtgtgtgtgtgtgtgtgtgtgtgtgtgtgtgtaaactgtagaccagtctggcctcaaactcacggagatcctgtctctacctcctccatgctggggttataagcgtacacccaccaaactaaccctgcatacattagcactgtgttttcttgtttccatttattttagacaaatcttgagtagaatccagttgtggcaccagatactacgagcatattctctacaccctgattatgatcaaatataatacatatctaggataaagcctttaaattgaactggagcctgtgacatttcatcctgtattcacgagtgaatacttttaatctttcgttcagttgttcatggacactcaagctcatcacgatggtgcatgcctttaatcccagctgaggcaggaaagagagagaggaggagggagggagagagggggtaacagaagtagacaggcataactggtgggcccctgagtggccagatcatggcagagaggccacaaagcagaggcccagccagtttacacagggtcatgggggccaatagggacactggatgtcactcacagcgagatggagacattgatggtgtaccccaacttctgtcctagcatgctcattccactgactgcagagagaggacagtcaagacaaggatatgttgggaggattacacaagagaggaggcactggtcacagagccacgccggagatcagaatcactgggcagacctagagccacgccagagatctgggcagaaagcactatgtacattttaaaagggaaaacctataggggttttgtccattttgaatgaggcgtaagagacagaggccacagatgaaccaagatgaaaatcctggccatgtgctggatggcagcagctcacagaactggacactgttctgtgtgacagtaacaacgcctgattctcccaagagaaatgatctttgttgttgttgatggtgactgccttgccgttttaaggtggctgttaggagctttgcaaagaaaaaaatgtggctaggcctggcattacactcctgtaattctagcacatggaaggcaaaggcaggagggtcaagagttcaaggccagcctcagctacacagtgagtttaaagctaacctagtctacacgagaacatgtctcaaaaaaaaaggtaaaaatacaacagacgaaaatgggaaatacagaagaaaatgattctacaggcaattacttatttatagatcatcacaagttaaaagttaggccaactgggccagtgagatggctcagtgggtaacagccttgtcaccaaacctcacaacctgagtttgatctccggaaacttaccctctgacttccacacaaatgctgaggaatgcataacacacacacacacacacacacacacacacacacacacactaattaattaagtttaaccttaagctatgccagcagcaataggtgtaactttcttcacatgaaatggcttttcaatggagaaacaccccaggcaggagcagtgtgtgtgttctccaggtcatggaggcctatcctgcccagtggttagcaacagctttgcctgcaccagtaggctcattcgtggagaatgagaaaccgcaggccctaggctgctggatgaaaacacaggagctcctgggcttctctccttttatccctgaacaaacacaggcagagagcaggtgtgatctcctggagcagtagctgctcagctgagagtcggggcccctaatggttagatgccacgttccccttctgtgtgactgactccagacagaagaggaaagccgccccaccttgggctggaaagtttgtttatctgaatcccggggctgataatctggtagaagctacagattcattttctaaactgcaaatccaacagtcagcttgttagaaaaattgctagcaagggggctgacttccattgtttgaagaagggctctttggcgccatcctggaagcaccaattcctcaattacagaagtctatagggggatcaaactggaaaaaaaaaaaaaaaaaggcaaaatttcagaacaattcatttggggatctgggaaagtgagtcgcctgatgtgcactcatgaagacctgagttcaaaccccacccccacatgaaagctggtcatggctgcacaagcctgtaactggcacgggcagtgagaaagcagcatccagagagcttgctgggctgctaaccaagctgaggcagcgggaatttctggttggggagagagcttgtctcaaggaaataatgaggagttagagaaaggcatcccatatctggctctggtctctacatgtgcacatacagacttgagcacctgtgcacccgtgtacacacaagaacatgtcatttcagagagagaaagaaagggtgggtggactgtttcccaggaacacaattaacagagagtgtccacagcttcccagaggtctcactcaacccaaatctgaatccagtttctagacagaaagaccgcaaatgttcaataactgacatttccattaaagtttaactccagctggccatgatgacacacacctgtgatcccagcccttgggaagctgaggcaagaggatggtcatgcatttgagtccagcctgcattacacagtgagttcaaagtcagcctgagatacggcgtgagacactgtctccagaaagttgggagagagagagagacagagacagagaatgagaaagaacttatttcgcaaacctaatttctactcttccaggaggcttccctgactacatgaccacacaggaatccctttcttggtcccctgtcatatatactattcatctacagatacaaaccatcctgttggtctttattttctacgttgactcttaactccctaactagatgatgtgcaccccataaacagcacattaaatttctgattaaccccaaagaatctaaacaggggactccaagtgaattaaaaaagctcaaaatgcaaggttcccacagcacatacactacatgcatacacactgacaaacatactgtgcacacacatatgccacctactgtgcacacacacaaacacagagtgtacatgcatgcaaacacacactgtgcacacataaacattttgcacacacacatacttgtatgcatacattacacacgcacacacacacacgcacagtgcacccaagcaggggatgctctgccatggctcccagagccgtttctctgcagcctgcttgcactgtgcattcgaacgagcacaatctctccctgaatcccactttcagagagcagcagtgttctccttggggctcaggaagcccctgtgcctttgcacaagaaataagcgaagaccaccctggtaatttgcctcctggaagctggaaactgctccctgcattgctctgggtcctggcatagtaggtgcctctgtggaaacagtcctgacaactcctgagggttcttgtctgtgggtggtatcacccagccagttgtgttgtccctagcttgccaagagattcacagacttggcttggcagacccccacgcttgatcactaaccacactggggtcattcacagctaatgtatgctcctcagttaaatgcacatacatgagagaaactcggtgtccacaaagtgacccaaaactgggtgtggcaaaattgtgcattgctgtataaatttgccttctctccaaagagctcaagcttgcgtgtgtgtgcgtgtgtgtgtgtgtgtgtgtgtgtgtgcgagtgtgtgtgtgtgtgttggggaacattattttgtttagcttcctaattaattttgctctaattctctgagtggttacatgaaaatgagtatcgtagtaagcaaaagacacccccagcttccctttcaaactcacagaaacacaccttgctaaatacccaggtaaatcaaagcagcaatcagcagctagggccaagcggtctgagggacaatcttaagcaccacacaaggacactttgttttatctgaagctctcagttatacacagaagcaggcacttaaaattagaaaggaaagtaattcgttagacttgcctgctcgcttccttccccactgttcttattactcttctcttctctcctacccctcaaccctccctcctcctcctcctcctcctcttcctcttcctccgtgtctccttgctcttaataacatatcacactgctgccagcccagagctctgtatgtgccatgagcccctaagactttgtgtgacctgctatgactgtgacccctgatgttccaggttcctcactagagagattatcatttttccaaagtagttaatccattccaacaaggtctcaatgaaaaaaaaaaagccataatctaccacactcctagacttcagaaatattagtaacctgatggagtcgaccctcatcgtctttgtgccttcacaatgtgcatgcaaatgctataaattctactcaggtccatggaggtcccttgttttgtctttaggctccattctctgtttgctaactgtcacaggacaagtaaagtctctgcttaactcacctccacctctcacaccatcccactccaatcccgctctaccaccaccgggcccatctcttccaacactggctttaatatttcctcttgcatccgattctaactcacccccctttgccttttgttgagtgaccgtgttgggtatcctccctcatactaatctttcattaacttttttttttagttattattcttcaacaggctctctcaacatgactcactccttccacgggtcttcagcaggcctactagccttctaccaatacaggtccttccagccagagcaactgttcttaatcttcggaaatgactacacaggaattacctctctgggtgacagtcattcccacctaacttcaggaaggtgcctctcacccagcttgtcaggaaagcctcaggattgtggctccccagctgtctgcagaactgtccactgggtgtcccatttctcacgtgagacagaccctgctttcacacttacagatgccatgaccacccctagtatctgaacaagcttcctcccaggagcccacactcctcagcaatgacacactgctggggagaccaagaagcttatttggcttttgagttcctggggaccatgaaacatatatgatggaacaaatgaaaaactcaggcaagcctcggagtccaccagccaagacaccgttgaaaccgtcgccatgcctgagggattgaactcgggccctcacactcacacagcaagcactctaccccctgagccagctcctagaccctctattaaatgtttgcactgcagcgtggcggtgaaatccacagggagttacacaaagtggacttaccattggttagcactgactttaaatgctcaagtgagagctgaaaatggacagtggtccaaagccacagtcactcagattattacccacaaagctctagaccttagagactaggggaaagcccctgctcattccatgacggacaatgccaggtgctgctgagaagccaaacttggtgtcttttcagtcgagaccgtcaaactcctctaatgagttccaattgctgtgttttcttctgagcaagcaaaggggcaccaagacattaattatagagcatctctcccctggtcctcattcttttcctgcagtgctgggaactgaacccaggaccttttgagtgttgggcaagcgctctaccactgagctacaagcacagccttagatctgctcctgaatcttgagaacacaggaactcttgctttccctgagttaagattgttgcaggcatgaacagcacaaccaaacagtacattcacattcgaaattaaagtcttgctacctcaaaataataataataataataataataataatgatgatgatgctaggactaacatctattagtttgggtgggcttttttctttttctcaatggtaacaattctggctaatgtcctgaaagtagtactaaaaccaaacacctgccagtctagtggcacacgctataaccccagcactcagacagctgatgaaggaggacccttagtttgaggtcagcctgctacactgtgagaccatctcaaaagacaaaataaacatgagaggagctgaatataaccagaatatgatattcatccataagactgtcataataagagtcatcatgttgagtgttaattaaaattaatgtataaggaagggtgcagggggaaaaggagtttgcagcgagagcctgatccccagaagtagcacgggaaggagagcgtcaactggcatgcgtgtgcccacatggatcatgcacacgccatgataagcattttgaggaaaatatcaaaagcattaatgctctatttttaattacagccttgtcttctacaacttcataaagaaaagagtaattttaagttatctgcctcaggatgatgtcataactcatgaatcacatggaatttccccagcactgtcatgggatctttacatccgctattcagtatcgacttggtgtccaaagggatgaaaagtggagaaaaacagaaaattcaccatgtgaagaacaatagacttaggtgagacaccatgagaacaagaaatgattcctgtctctctctctctctctctctctctctctctctctctctctctcacacacacacacacacacacacacacacacacacagttgttctcaaactgtgggtcacaacctctttggcaaacttctatctccaaaagaaaatattacactatgattcctaacaatagcaaagttacagctacaaagtggcaatgaaaatgatttgacggttgggggtcactgcaacatgaagaactggattggagggtcacagcattagaaaggttgagaaccactgctctccagcctcttacagagcaagacctatttcttttttttttttctactttctaccttttaatcttagtctattttttgttcattttttaattaattttttacattccaatcccagttccccctccctcctttcctctcaagccctgcactcccccctcctcccacctgctccatggagagggtgaggcctcccctaggaagtctactaagtctgtcccatcatctcattgaggcaggaccaaggcacctctccaccccccacacccctgtgtctaggctgggcaaggcatctctccatatagaatgggctccactaagtcagtctgtgcattagtgttagatcttggaccctctgccagtggcctcaaaattgtcccattcgcaacattgtcacctatataaaggaaatctagttcggtcttaggcaggtttcccatttggcaagacctatttctaactattgctgtcaacactgggtagggtctggtgtgtcagcgctcccgaattaggagaagattttctcgaatcaggaaaaaattgatcatgaatttgagcttcaggtcagagacttagatttccaagctaaacatgtttcaatgtttgaaacattcttgcctttcactcttgcatctggatagtcaccctggttataggatccaactgcccaggcctcatctaaagtgtgggctctgtgtctctggatggcagagctggaaatccctctgagccatgctcgccgaccctatcgtcccatcatttcctgcagtcaatacgtcacttgtcactgtgtcatctgcagacggttgctctaggcatgcagtgccaaggagggagagagtcgtcacacaaggagtccaccttctcacacgggcccatggtggtcttacgaaggataaccaaggcctttgtttccaaaactacatccttgacaacatgaaagagctatgccaactgcactgcgaccacggtccaagtcaggattgttccagggaaatgggatagacagtcacaaccaataaacttaactggatgctctgtctacacaagagagctcagaagacagccggcagaaacagggcagtaagccaagccccggggcagaagagcagaaagtagacaccttacatgagcaggagggaggttgaggagaacagaaagcagacctgaggggggacagccagcaggccagccattaccctaaaagctttaaacatcttgttgagtttaatctccaaagcagttctacaaaacacacataattacctcactttagaagtgagttaaatgaggctatctgcccatgatcacgcagccagctgacatcacccaagcagcaaaaacagttgagtcataatgacggcaaacactgtgactgaaggctctcaaaaaggtgcgcattctggggggactatcaaagaaaatactagaaaaaaaaagtattatgtttacttctctatccttaattcttttgtgtatgatgcaaatgtgtacagttcggtattattggaacctgtgcagaacacaatcacgtggctggctgtgtgtggcgtgccatcatctaaggagggcagccttcgccatcttagtcacagctgccatgatgacctacaagaaccccatccctgaggattgtggatgttccctcctggaatggatgaggaagtgcactgcacccgcagctgagacccagtgctccctgctgcaccctcactgtgtatacctcagcctctgctgtatgtgatgttgggaagtgctggcagctggaagggtaactaaggggggggcgcggggggagtcaatgcagatgcagccttgcagaactcaccacacatgccagagggggactcggtggtggtgcagatgtttgggggttgttttaattttttaatggccatagctgtacctgaccctggagtgcctgctctctatggatcagcgcaccatctggcccgaatagatatttggtcatgcctcccgcacggaaagttaacactcgcttttttgtgataggacatcaactcaaataggtggaaagatgactgtgtctcagagttcaaagcagtggcgagtcatctctgcgggagcagttttaatggttgctgtggcatccacaggaccggtctcgctactcacacacagtgctgtagccatgaggcccaggcagtgtgaccaaagctggcttctgtcttccttcccttccccatgttttcataataaacttccatcggctcaggccaaccagccttgaaatgtcaagcacatcacctcataccagaagtttcaaatgtccaaaacccagacataaaattatcccaagcacatgcagactctctcacaattacagagctgtgtgtctagctgaaggtctgtgcatttgtggtagtaatagcacactatatgggtaagcaggttcttttgcagcgaaggaaagcaaggttttatcaaagagtggaataacggctcgtggcaacacagaggatccccagtgggttgccccagactccttcaagggaaacaattagaaactgtggagatagttcagtgggtaaaaacactggctacaaagcctgaggacctgagttcaagtcatggaccccacatggtgggagagtgtgactgccataaattgatctctgacgtccacacatgtgtcaggcgtgtgcaagcacatgcaccaaataagtaaatctaatttaaatttttttagcattttaaaatttcatagtaggcatctaaaatctcctaggccaggtgtggtagtgaacactttaatcccagcactggggaggcagaggcaggtgagtctctgtgcatttgagtatggcttagtcttcatagaaagctccaggacaaccagaaaaaaatattttttgagaccctatctcaaaaaataaattaattttaaaacttgtcttaattttaagcaccctagaaattaataaagctgccacaaagcttgagcctgagtcatctcagctgtgccgtgtcagtttggggaatgcttagctgactctcttggaggcacataagtctttgaatccggaacatgtgtgcttagcacaactgttactcttcctctgcctatctgataaaatttatcagaggcacctggtgctgtgacaatgttttaggcagagacctcatgagaacaacctctgggaacacgggagacgtgaaagccagagtggatggctggcagctcagactctcccggctaaggcggactggaagctcaaaggcagttctgagagggctaggagtatttgcttctattcattgtaatcccagggatagtgatgttagctaaaatatgatttaaaagaaaagtgcccaaattaaaaacccagagtgcgctcctctctccaggctccttgtcctgcagctgctccctcgcctggatcctgccttgttctctgattggtctcttcccagctctgccacactttctcatatcccatcaccccctgctcgtcttctttctgccttcaccagacactgaacatgttaagagtttaataggaattgatactataagcacttgtgaggctgaagcaggtggctctgtgagttcaagaccaggctggtctacagaggaagaaaaaaaggagaagagaagaagaaagggaggatgacacagggaggggaaggaggagagggagagggagagggggagggagggagggatgacaggagggaggcgcccaggcaggatagagtagcaggcctggtagtttcctccgaggtcatttcacctgcagcagcctgcacaggcattcctcagtggtcccggctccctagctagagctgggtacctgaactagcaaaggcatttctatgttctcctaggatcaaataaaattagcatttcctgtcctgtaagaggcctgcagcaacctgaaaaaaaatggttccctgttctcttgacctataaagccatgcaaatcaatagagtcaaatgtccttgctaacaacacctgtgaaactctccgggcctcaaacatatctggaaagtctccgggtgtctgaaagatgtcactgtaaggaagcaccatggcaatgtgaaggatgagtcagggagtaatgctgaaccttgagacttagaggtagattctcccccaggatgcagagctcagggtcaagtcaaccctagcaaaacagggagctgctcctcatggaaaaggaacaaatcactccttagtcacaagaggatgctgtgcagaactgagatcccaaaagaaacaaaccttacagcacaggcatgagcgcagcataaaaccacgcatttgctcttattttctacttggtggcaacaggaacataattgtaaagcttaaatagtctttcagagagtttatgttgccccggtgaagccttggtaaagaatacaaactgcagggtcttctccaggattgaggtccagaccaatgtggattctcctgctgatttacaacaggagggccatctacctctgactaacccagtgtctatcaaagtgagtctcaagtaaatcggtaaatgctacagaaaagaaaaaaaaaaaaaccaaaaaaatatccacttctgaccagatggcggtgactgggccatattcattacattaactaacttgtggtaagaatgttctgtctgagaaatgctgaagtttgtcccttcacatttgtctggcaaggatataatttatgcaccaaattcaaatgaatcctgtgtttccctttttccatgtaaattagcccagggtagccaggcaaggcatttccccacagaaaggctccctttcaaaggaaggcaaagagccatttgtaactgttggccttccctccacagctgctatttaaatactgaggtcggattcaatttcgattgtaaaattgtatcttgcctaagaaaattaaaagtggtttcacaaacaacaggcaaatttagacaaatgaaacacagactgacactgtgcgctggtgcctgcccacaagctagcaggtgacagacagcattcctacaaagactgactaaaggtggtgaacactgaaagagtagctttgggcagagcaaggtgtgtaacctactgccaatcactttcaataaatccaagccaagtctgagtaaagaaggcaaacaatgtagcaaccaagagaacctagaacttagtttcacataagggatacagataaactaaagccaggctcagcacttcaggaagtgtgtcaggactcagataatgacacccccagatgtggtgctgtgatgtgcccagctgaagcaggggtagcagactgcagtctccagccttccccttgccttggttctcccctactccttctcctaagcacagcgagaggcttctaccgaattccctcaggggacagaacagggggtcgggtgactataactgcctttagtcatctggctgaaatttcattacccaagaaaaatcaaactctgtcagagaggacgggaattaaaactaaaccagaatccagaggagtgctgtacggactccatccctgatcatgccccctgagaatcacggatccccccccccaaagtgcctacatcccctgccttcctctcctccatgaagagggtattgaagtttcaaccaccagacaaagccatgtcatgtagctcccgaagatactgtatgaacaggaaagaacaaaactcaagaaagccaataacacgttagagttgttatgagtatagttggatcttgtatagcctcctctcaaaagacccagagaagccacaggggtacccagtccacacctcttcctgtcacctagttcaggtcatggcctgctgcctggctgcagtacactacaccagcaaatacacagggcatatgcagtaaattctctgggttgccagtgttttctccactttctacgttgaaaggttcaggcattatgctggctgcccctgttacctggcaggatccactcaggcagtgccctggtcagcccagggttccatggaaactaagtctgcacgcaggtgtagaggacccctttaagagacagaccctgcccacgtaggctctcttccctctgttctctttgcttctcttctctctctgcctcttctctcttctatttctctctcactcgctctccatgatataataaactggttacaatgtctcttagactcatgtctcatcttgcactcctttatttctaatttaagcaaaaacctgacaatgtaccaaaactttggttagcaaagacagcatttctaggctccttggaacctgggctttttgacagacttactgagaagggcaaagagaggccatcagggaaagcccggtaggcacagctgcccatcctccatgtaagggtgaaagtaggaaactactttctctattggttcaggtacctacacgcctttaactttattttatctctttttttttttcttggtttttcaagacagggtttctctgtgtagctttggagcctatccttgcactcgctctggagaccaggctggcctcaaactcagagatccgctgggattatagccctgtgccaccatcacttggttgcatctttaactttcttaatactgggagaaactgtaattgggaataggaattaggagttaagtgatggttcagctagctaaaacattaccttacaagcattaagaacagattctcagcacttaaaaaaaagaatagaaagaaaaaataaagaatagaaagctaggcacagcaaaaggcacacacttaaaatcccaaggctgagagggcagagacaggaggatccctggggctcactggtcagccaagctgaatagcaagctccaggtgaaggtgaaggtgctggccgccctaagatgcaagcctgataacccgagttagagccccagaagccatacacagataagggagaaaaacaacttcacagagttgtcctctgacctccacacatgtgccacggaacactcacgtgtgtgcatgcacgtgcacacacaagtaagtgataagtaaaagtaaatttaaattatttttaatataaggtggagtgtgaaggaggaagatactcagtgttgccctctggctgtgacacccattgtacacactcccacagagttgcatacacaccaattaacatacctaggaatacacacatatgcccacactatatacagtcacatacacaaaaatacagtaacaatagatactaaaatcctttttgctaatgttttacaccaaaatatcagccccagtgtggtgtccacacggggacagccataacagctggctttgtttgttttttcagtgtgccttttgaaggatttggatgttctttgtctacaaccacacttcagaacctagccacacaaccaaatctcttcaacaatgtctcttccaaaattttcccacatctgggcatttcattatgcagatacaatcagagttcaaattgcttaacaggaaacttctttggagcagaaggctgtcccagacttcatgaaggactccctacaaaaagcagtacaactacacaatgactcaaatgctaccctaagacaccatcttcagcccatctgttgaagggaccagctcccctttcagcagccataacagccgaacacgtgcnnnnnnnnnnnnnnnnnnnnnnnnnnnnnnnnnnnnnnnnnnnnnnnngaaagacccgagctaacatggggttagctcattaaattacaataaagcctcatgcagtttgcagcaagctctcaaatccacctggtgattggggtgaccgcagtcgtggcctgggaccccggatacctgagttttccaggggtctaacactgtgattctaggacaggacactccccaggtcggcttatcttcttccagtgttctagtgttgcactgctctctgcaagcaaaagtgtaaccacctcgggtggtgcgcagccagctgagactggatttcagcggctgaagagagagaggctttgtgaggttattatgcaccttcttctttggaagacggcttccaaaccgcttccaagcgtttgcaaaacaaacatcaccacccgccagcactgtttgctttcttctgaaattgctgtatttgccatgaaaaccacagactataaacaagagcgcctgatcagaggagaccttgaaaccactgggtcactgagtcaacacctaaggaggaaggcagtcgactgggatctggaatacacgagtcagaaatcaatctctcacctagaatgtcttactaactcaaaagaacagtaaagattgtgctatttcagggagatacctggacttcacacatgaaacaggacttttagtctttttaatactcaggagggggagacccaaggtacacctacctcaggaccagcctagtctgtgcgtatttccacttaaaatagtgctttgtccaagagtctccccaaacagcacaggctattgtcattgtccctggttgaagggcaggccctatgactgaagacaccatatacttccaacaccaaacttgggagaatgaaactgaactgactcggaagcctcctccttgaggactagctctcatggtatcagaaggagctgtacaagctgccgagggaggaaaaaaggatcaataatcctacctagctgtagagcctacaaaccacgcttgtgactgtcctggtaagatctccccaggggtgccatagtggcattgttatcttgggggtaaccaacacctgtcaaacttgactttagtcctattcaacaagaaataactcatgtctggtactctaaacctagccaactaccaatgagtggagagatcccacaccccagaggaaaacccactaccaccatgtaattgctaactgtattctgaactcttatccttaaactcccagttaagtgcagctctcacctctcgtcaaggaagcctcttttgtagaagacaaagatcatcacagaaaaccacaactgctcaaacagcagagaagtgaccaacctaatccgactgatgtatctgcaaagcaaccactacacctaagtccaggaaaagcagcaaaaggcagaaagattacaacagcccaagaaccagagtacctgctgctagataacaccatctagacacagcagggaagatgcccccctgaactcccagcaatatgttgctaaaagagaccagcataatgacaactccgaatgatatgtctgcaagcccctcccccaaggcctctaactgccaggtcccacccacagaacactctaagtgccctaacttctggaccctgcccctgccctacagagttaaaaaccgaatgtctggacatgaaatcccatcactctccacaaggaaagctccaccctgaaaagttcaccccttcccaagaaactgtacataagccctgcatcctgatcagtttgctgctgtttcttgcccgagcagaagcagtcaccctcctggctttttccctcccactaaatcaattacgtggtggtgcacgcctttaatcccagcaaccgggagactgaggcaggaggatctctgtgagttcgaggccagcctggtctacagaacatgttccagaacaggctccaaagctacacagagaaaccctgtctcgtgaggtttgctgtgcagcgtgactttgtggtattccttggctcctggctgccaaggaattccatccgagctgaaatgctcacaaaatcaacatggatgaaggaaatatctcaaagcccactcctagaaaaagagctacaggcaattaatggctgcagagaaagggagaatccctttctctagtataaatccctggtaggttctgcaatcccaagtgacactcagaggatcaacatatgagggagaaggggtgtgcagcaattttaaagaaagagaggtcatgaatttgcaagtggggacacaatagaagttgaagcaggaagagagaaggttgaaaaaatgtaaatatagtatacatgtatgaaaggctcaaaactaatctaaatttaaaataacaataaacaggtatgtaacaccccacacacacacacacactggacatacttttatgcatgctaagaatgtaagaactgagccaattcaacatttcacaatatgcctgcctgtcgtggagttggagagatgtctcagctgttaaaaacacttgctgtatgcccggcgttggtggcgcacacctttaatctcgggaggcagagacaggtggatctctgtgagttcgaggccagcctcgtctccagagcgagtgccaggacaggctccaaagctacacagagaaaccctgtctcagaaaacaaaacaaaacaacaacaacaaaaaaaaaaaacacttgctgttcttgcagaaaatccaggttcagttcccagcacttgagtggctcacaacaacttgttgctacagctccggagacttcaacacccttttctgggcctccacagacactgtgctctctctctctctctctctctctctctctctctctctctctctctctctctctctctctctctctctctctcacacacacacacacacacaccagaaatctttaaattttttaattatcttattatttttacgaatgggtgtgttgcccacatatatgtctgtgtgccatgtgagcacctggcaccctcagagaccaggagaagatggtttccctgcactggagttacagacagttctgagctgcttgtgggtgctcagaatctaacccgggtcctctggaagagcatcctgtgtccttaaccactgagcaatatctccagccccaaaacaaatctctttaaatatgcttatagtatggtatgtttagagtggctatgcaaaatgtttaatttaatttgtcccagatcagtcacctagcaactgttaaaggaaagataaataaacctttgacctatataagtcattggtgtcatcgggcctgtttctccaaatcgcaacattctctccaaattgaaacatttgctccaggagtcccaggtagtaaacatgactaaactgaagtccgggtacctgaagagagttagagcctggaagattctttagggcctgtaccaacattataaaagcgattaaacaatgctcctaatggtcacctatgctagaatcggctttcctgagatgttgctgcttttgagttatccctactccttagaagcaacctttcaccccaattaaaaactcacgggtgcaactgttacttttatctgctgtgggttccctttctggagagagtaacacatgcgctgttgtctctccagggaaagccgttggaacagttttggggttgttttgaaaggggaggcttttggatttctgtaaacaacagataataagaatgtattaaaataaggctcattgggtaggattaaataatttaatgatataaagcaatcaatcagcatacagtaaggacttgacaaatatttgttgctgatgagcctttttttaatcatcatcaattgttgaatcacttacaatcacctgttcctgactatagtggcatcttgccttgccagtgaaagttgcagtagcaaccacacccttttgggcgtggtttcaggtgcagaagatagagaaggggggtgctcactctctttagtctctcggggaacagagactgcatcttttggagcaggaaccaccgggccattattttctcttacctgcgtaagttgttctttaaaaaaacacctattcatctttatcttgggtctggtgaactccttaattcccccgcctctacccaaccatatctccagtgatgacagcctggtgcttccatctctggtcactcaagagaacagcggggctggtggataacatcacagttcaaggaggcatccggacgctgccagacacaccagtcatcaccactgcacagtaactgtagccagcagagaacacactcctgagagccgtcctctgaggtaggcagcaataatagtttcttaatgacattcatgaaaagtcgaattgttggcctgaaatcccaggtgtccctccctcagggacaatccttccaagaaaaatgcaacctaattaagaagcatgggctgcacttagagcaggaagttcaaatctcccacaatacctctatcattgtagctttttatttagcccttatcgatttctaccttgactaataattatttgtatacacctcttatctccctcgttagattataaactcctcgagaactatgtttatctccggcttgtctggagtgtagcaatgatctctgttgacagtctacttttaactgactgcacggccgtagcatggacttcccatcttaaagtatggcctgcaccttggtaaaaataggataatactagatcacgtgagatggcacacacacaaaagaccattttaagaactcaaagctgagaatttccacatgtaacacctttttttaaagacttgttttggagttgggcgccatctcagagcactggctcctcctacagagaatccagaatcagttcctagaacctaccttgagtgactcacaaccacctgtaactccagttccaagagatgcaacaccctcttccagcctctgcacatgcgtgatactcatacacacagggtacacatacatgcaggcaatactcatatacacaaaataaatctttaaaaaagaaaagggtttgtttttaattatgcacatttgggtggttcatggaggccaaaagagtgtgtcagatcctctggagctggagttacaggcagttgtgagcctcccatgtgggtgctgggaaccaaactcaggtcttctacaagtgtccttaagctgctgagcagcccccagaactctctgtcacagttttatctacttgccgtgctagctgttaaaattctcagatcatgatatttatccagtaggaatttagaccaatagcttcccgtgtagtttgaagggagaccgtgacccacgaacttacaacacgagtttgtttttttttacttattgtcagttgtaaaagtgtgcatgatatggctttatggcgtgtagttgtgcactccacagcatacctgtggaggtcagagggcaactttcaggagctggttcttgctgtcagtcttaacaaggcagcacctcccacttctgcaatagtatgctccaggcaagcagccttcatgcttccaggcagttctcctgtcttgcctctcacccctcttaagagtggtggattgcaagcgtgatccagcatatacaaattgttttgattttatttgatttttgagacaggctttgtctgtgtagccctggtggtactagaactcactttgtagaccctgaggctggccttgaactcacagagatccacctgcctctgcctcccaagtgctgggattaaaggcgtgcgccaccaacgcccagcagtgcatgatctctgtaactctgagtagctccatgggagattcaaacaggcgccggaatgtacttctcctcacccttcagctcttctctgaagtatcactgaagaaagtgaactcattaaggaaaatagactcattattaccccaactgggagtttagtgacagaggattagctatagacagcagttattagggtgacttccgcaaatgctcagtatctacagtcaaagtgacaccccgtgaagaacgctgaaggtcctaatacagatccaggcagctgtcagtctgagcaacaaatcattacatcacagttcgggttcactggaaaagcaaagggagaaagtcccttgagctacagtgtagtctccacgaccaagatggcttctctgatgggggaagtccctctgtgtgctgtgaatatatgtttctcttatttgtagatgactaaagctgttttggacaatggacaggcaggatgtatccaggcaggaagtataggcagggctaccagaccaggagaattctgggaaggagaagagagagagtgagtcaccagtgagatgccatgtagctgccacgggagcaagagcaccaggcttcactggtaagccaaggccatgtaaagatacatagattaatggaaatgggctaataattaagagagacctatccaataagaagtctgaaccataagccaaacagtttataattaatataagcctctgtgtgtttacttgggactaaacggcctggggactaggtgggacagaaacttccatctacacttctccccagaataaagtcaactgtactatgtttagtccttggtgcttgttaagtgtcaaactaaccaacagggacctcagtagaaaactaacaagaccatatgatggccagaaaatccctgagaaactgatagttgatggcatgtaaaaagaattaaaacatatcaagaccacagaagacaggagctgcaggaaatcccttgaaacagacccttgatgtgaggaagaggttccgactccctcgggcagctgtgaacacgaggcagaatctccaggcaagcaacgtgtaaggactcaggcattatgctggctgcccctgtcacctggcagaatgcactcaggcagtgctctggtcagcccagggttccatgagtactaagtctgcacgcaggtgtaaaggacccctttaaagacagactccacccacttacgctttcctactctcctactctctcactctcttactgttctctctgctcttgctctctcttgctctctcttccttcatctctctcttcaccacctgtcgctcccctccccggcccccctgtaataaactccacggttaatgtatctcgtgttggtgttccatctagcacgcgtctttaacttaaaagaacaacacaaagttcaaagatcgggagggatgtgaaccatggctctggtctcagccctgcttcaaaggtcagtgaccttatgctgtgtgacctcattaccctcagattttggaaccccaaatctggatagcaacaatctctaacgacaaaataaagaagactcgggagcccgaagcaggatgctgcatggaagtatcaaataaatgtccaatcgattacattagctgatttcaaacttgaaaccgtttgtctttgtgtacaaaaagaaaaagacaggccctgaactcaacatgctggactcgctgataatcacatacatacatacacacatacacacacaggcacacaagcatgcacacacacacacacacacacacacacacacacaggcacacaagcatgcacacacatacacacacaggcacacacacatacacacacaggcacacaagcatgcacacatgcacacacacagcttgcatatacgcgtgagcacgaatgcacacactaataagtcttcattcgtgtgcctgagtgtgtaacctccatgactggaggcaaaggtgaggccatgccttcaaaacaccctttgtagtcaccagaaaaggaagcaggttaaaaattttttccttggtcacacccaagccccttcttctttgctacctgctattttcactgcacagagccgaaatccatcctttgaattccagctcctgaagcaccatgacatatgacctctaaacatctgttgcttgccacgagtggccctgtgacagacttggtgggttatgaaacaggcatgggtcaacaattgcagaatctgaagagttggaacattctagtccaaaaacccaacactgtagagaacctcttctctctacttggccctcctggggacaggttccttggcttcaccatcatgtctatgtttcctcccccacagggacacagaaagacatgtaaacctcttactctgatggaagctagcttctcctgactgaaaagtaccatacactggcacacatagacttttgtacaactccattctacaggagggttttccagaaaagggagaaatacaaaagggaaataggcaagaaaaaatgtaaagtcaacataacataagtgaaagtaaatgtctccatttaacacaataaatgtgaaattatacatcaaaaaacaagactagtaataaatcatgttgacattatggcctgtgtgatacagagacgtacacataacctctgtactgtaagtctccagactttaacccccagctaagtgaactgtaaccaaaacagcacaaagagccaagccaaaagaaagtcaataagatgcctggctgtaatctccaaaaatatcaagagcaaagtcaataaacaccgaagcattgcaaccctgagacaatgaatgagacaaggtgaccaaatgcagcaggggtttgggggaaaaaaatggacacccttctctgatgaaaactggagagacagattggctttaaagtgggagcaggaactgactgccaaccagcagggagaggagccgagagtctgattacaggaaaaccaggctccagctcagggtgattgacacattgaagccctgcccactgggtaacaggggcccaggcatctgaatctgtttgcttcttgggcacagagctgttagcttcaacctttcccattcaacagaataagctgcactggcacacaacctgctgaggggcacaaaatccccctgggaatccggctgctgagactcacagcaggagacctgggacacccctgggaaccaagtttgatcacacgatcccagagagagcttggatgtctcagcccacagcatccaatggctggggtgttttttttttttttggggggggggggaggatcttctatgggtaaaattcaatgactgagaaacaaaaataaaatgaaagaaaactctgccccagaagagggtagggtgtaaagggatagagccaaacacacttgatggaaatgcattatgcctttttattatacatttgtataatgtaacttcatctgcaatggctgtccctgggaagactgaagagcctgcaaaccctgagcaatgagcattgttcttgctattcagctcaactctcaagggacagtgacagatgccctcagaggcccctgacaggtgacccactttagatgacacagctctcagacagtgcggttaaaccctgacatccatgcctctccctattacaaacactgccttgtcccagtttgccttttagactattctctttgaactatcatgagacggtgtaaggtcggaaaaatggaactatgaaaagttaaagttttcgaacagcaaagacatccatcgtcagaatgaatgggcagaatgaagcacactctgtaccagccataccccagacagggaagttagcatatataaacaactgtgtgctggctagttttatgtcaacttgatacaagctaggatcatcacagaggacccagaagcagacacccacagctaactattgagctgaaaccctggaatccagttgcagagagggaggagtgatgagcataggggtcaagaccagactggagaaacccacagaaacagctgacctgaacaaggggttgttcatgaaccccagactgatagctgggaaaccagcatgggactgttccaaaccccctgaacgaggatggcagtttgaaggtctggttaatctatgggatctctggtagtggatcagtatttatccctagtacaggaatggactttgagagtcctctccaaatagaggaacactctctcagcctagacacacgggggagggcctaggtcctgctccaaattatatgacagactttgaagatctcctatggaaggcctcactctccctggggagcagaaaagggatgggatgggggttagtggggggcaggggaggaggggagggggagggaactggtattgacatgtaaaacaagcttgtttctaatttaaattttgaaaaaggtggggggggggaagaaaatgannnnnnnnnnnnnnnnnnnnnnntcgtgtgggggggggaaaacccaaggggggggttttttttttttttttgggggggggggaggatcttctatgggtaaaattcaatgactgagaaacaaaaataaaatgaaagaaaactctgccccagaagagggtagggtgtaaagggatagagccaaacacacttgatggaaatgcattatgcctttttattatacatttgtataatgtaacttcatctgcaatggctgtccctgggaagactgaagagcctgcaaaccctgagcaatgagcattgttcttgctattcagctcaactctcaagggacagtgacagatgccctcagaggcccctgacaggtgacccactttagatgacacagctctcagacagtgcggttaaaccctgacatccatgcctctccctattacaaacactgccttgtcccagtttgccttttagactattctctttgaactatcatgagacggtgtaaggtcggaaaaatggaactatgaaaagttaaagttttcgaacagcaaagacatccatcgtcagaatgaatgggcagaatgaagcacactctgtaccagccataccccagacagggaagttagcatatataaacaactgtgtgctggctagttttatgtcaacttgatacaagctaggatcatcacagaggacccagaagcagacacccacagctaactattgagctgaaaccctggaatccagttgcagagagggaggagtgatgagcataggggtcaagaccagactggagaaacccacagaaacagctgacctgaacaaggggttgttcatgaaccccagactgatagctgggaaaccagcatgggactgttccaaaccccctgaacgaggatggcagtttgaaggtctggttaatctatgggatctctggtagtggatcagtatttatccctagtacaggaatggactttgagagtcctctccaaatagaggaacactctctcagcctagacacacgggggagggcctaggtcctgctccaaattatatgacagactttgaagatctcctatggaaggcctcactctccctggggagcagaaaagggatgggatgggggttagtggggggcaggggaggaggggagggggagggaactggtattgacatgtaaaacaagcttgtttctaatttaaattttgaaaaaggtggggggggggaagaaaatgcttccataagatggggctgtaggcaagcctgtagggtattagtgattgatagaggagggaccagcccattgtgggtgatgccatccctgggctggtggtcctgtgttccataaaaaatcaggctgagccagtaagcaactcccttcatggcctctgcatcagctcctgcctccaggttcctgccctgtttgagttcctgttctagcttccttcaacaatgaactaccttgtggaagtgtaagcaaaataaacttcttccccagcttgcttttggtcatggtgtttcatcacagtaatagtaaccctaagattcaatcacacagagtatagcacaaaaagtaaaagtcccagagattgatattagggttcaaacttcaagctgaagatcagaaaagcaaagcagccagccactagctcttactctacctcagactgaaatgcaatcctggctccaccaaaccgcagactgtaacctctcctcggcgtggctagagaatcctaagacttcagtatcttcctatcctcagtgtggctggagaatgactgcctgatactgactactgaagaccctgctcccatcttttatacccctctagtgatgggattaaaggtgtgtgatcccaggtgctgagatcatcttcttgtgagctgtttctctttaggactgggatcactcttgtgtagatctgggtggccttggactcacaaagatcaactacctcttaatcctgactcctaggattaaaggtgtgtaccaccacctcctagcttctggctgctgggattaaaggtgtgtatccccactatctgatctctatagcttgtggctgactttgctttctgaatcttcatgcaagctttagtaaataataagtaatctatcaccacaacagagaatgaaacaaaacttaccatcaataaatggactggtgaaataaatagttcccaaaaaaagaaacacaaactatcattatacaaataaacattttacgttcgacatactaggccaatgcaaggaaaatgcaaatggaaactttaagattctatctcataggagtcaaaatggctatgatcaaaaaaaaaaaaagaagaacaaataaaatggcaaggctagggagatggctcagtggttaaaagcatttacggttcttgcaaaggactcggttcaattcccagcacccacctggggcagctaagaaccacctgtaaccacaaatctaacacctcttctggtctctgtgggcacagcacacatgtgacacatactggcacactcaggagcacatatgtgcatgcattcacacaacaaagtaagttttgtaaaagagaaaattggggaaagaggaatccttgttctctgctgggaggaggataaacttgtatagccattaggaaatcaatatggggatttctaaaataaaaataaagctaccatgtggtacagctgtccactcccgattttatgttcagaggactctatagctacaacagagaaatgtacacatccatgtttattgctggtgtgttcacaatagctgataaatggaacagtctgggtacccatccacagatgaacggatgatgagattcggcatatatacaccgtggaattttactcagttgtaaacaaaaatgaaattatgaaacttgtcagatatattcatcctttggggaaatgggtggatctagacattattctattcaactggttgggtttgggggcattgtttttgttttgtttttttgtaaacttgacacaagctacagttatctgggaagagagaaccacaattgagaaaaaaaatgtctccatcagactggcctgtaaaggagcattatctttattagtagttgatgtgggaggggccagcccactgtgagcagcactactcctgggcaggtgggcctgggttgtataaaaaagcaggttgagcaagccacggggagcaagcagcacctctccatggcctcagcatcagcttctgtttcgaatcccagccctgaatccttcagtgattgagtgtaaccaagagttgtgagctaatatgaccctttctccccaaagcctggcaggtggtggtgcaaagccagcctggtctacagagtgagtgccagaatagccagggtggttacccagagaaaccttgtcttgaaatggaaggaaggaaggaaggaaggaaggaaggaaggaaggaaggaagggggagggagagagagagagagagagaaagaaaaggagagaaaggggagggaggagagagagagaaaaagaaagaaaaaaagaaagaaagaaagaaagagggaaggagggagggagaaaaagaggaaacctaactaagacatgtattaagtgaggcactccagctcagaaagatcagtatcacatgttctctcttatagcttttaatgtttgcatgttgttatgatgtttttaatgactactttctgttttctagaacgttctgcagatcccattaatccttttgcagcagctgagttataaacaacaggctgctgcaactggtttctcagccaaggagaccatgaagagacttctaagagttcacttggaatgaagttctatgacaacagttagttaccacaaagcctcaaggtgtgactctgaaagccacattcatgcagcacaggactttcatgaagacaattaacaagctgccagtaaaatatcataacttttgtaatatgactgccacagaaatctgtaaatgggtagcctttagttcttactgaatggcttgaaaagccatctttcatgattaattaccaaggtttctttctttcttttttctttttcttttttttttttctttttttttttttttttttttttttnnnnnnnnnnnnnnnnnnnnnnnnnnnnnnnttttttcagacagggtttctctgtgtagctttggagcctatcctggcactcgctctggagactaggctggcctcgaactcacagagatctgcctgcctctgcctcccgagtgcatgagccaccaacgcccggccgccaaggtttcttatcagtgtgtaaaaatgacattgcaaaacaaaactcagataattgttgatcagcgatcccccaaagttcaacaacaacaaaaccctgtgggggaactgggaatgacacactcagtaccatttaacattatttacctaacgacaaaaaataatctaccctcttaagtcactccttctcaattcttttcttacctctgaacttcttgggggggttggtaagatcccctgcctctgggtgtaccacacagcggtcatccaccaacctagagggaaagaatgtttacactgttagcgtcatcacactcagaaacctcactctgcacaaggacatcgggtaaatatttacagttggaatactcagaaactttgagagtcctagattcatgaaaagatctggttgtgggaagaacaggaagcattaagtggtaggaaacctgttagatcagctttgaccttgacagccaccaacagcagctgagctatctaaagccctgcaagtgaaatgtcctgacctataggatgttgtaaaaataagcatggaccaatcagcaagcttgtgtgtgtgtgtgcgcctgcgtgttttcgccagcacgtatgtatacatatatgcatatattaaaataactcgcctgagatcaagtcagccattattcctccaagtatggagaagggaggggctcacaaggccccacccttaactgaagagcttttagcaggtgatagcagctgagagaccagagtcacttttcctcagaggtgtggccccagcagtctgcccaggctggagtagatggccccacactcttgcacaattagtgggcaagactaatcgactctgtgggtaataggaggatgaagaggtgacatctgtatttgtgtctgaaattgccagagaataagtaatttaatagtacacgtacacacacctctagatatgcacaatagaaaccgagggctgaagagatggcccagtggctgaaagctctgactgctcttgaagagaacccagatttggtccccagctccctcatggtggctcacaactgggactccagttccagttatgtctgatttgacgcttcttctggcacactccggctcctgcacacacatgcacagtgtacacactctggagtacacacgtacacataaaatgaaaatttttcagtgagacacagcaaaatactgagtggtcaggggccaggtgtatagcgcacacctttaatcccagcactcggaggcagaggcaggtggatctctgtgagtttgaggccagcctggtctacatagggaattccagtacagccagagctacataatgagaccctgtctccaaaagaaaaaataaaagcagtcaggttagtgtcagcttttatttccctctcttttttttttatgtgactctgtaaaaggtgagactccctacctggtggcagtgatcagaggattgaccaccttcagccaccacttctgacacgttctaaacccttagagacacattgtcagtttcagtcaccaatgcttgctctgcttcagaaaggagcctggcgcacagcaggcattcgagagagccacctaagttaataaatcccttcctggctgggcggtggtggcacacgcctttaatccaggcactagggaggcagaggcaggcggatctctatgagttcgagaccagcctggtctacaagagctagatccaggacaggctccaaatctacacagggaaacactatctcaaaacaccaaacaaataaaaacttccttcgtgagttacaaaattacactttgaacctatggaacatttttacgaatgtttctaggacaattctaagagggaaagactgtgcaccttcttctcacgggggaaatctcactcagattcaggacctgacctcgcacaggcagagctacagggggtctggccggcagtgctgccatgaatactatgagggtgtgtgagttagatacacacatgataatcctcccaaaaggaggtgtcccggtggtagctgtccttgtcatcctttttcattccggtattaaccagaatctccccaatgcatcgagatcgcattcactttgactagaaacccaaacagcatgaaactttggttcctggtcatttaatcaccaaaagaatctgcttcttaggccatcagatgttttcttctctgagatcagattcccatgggggaggaggtggtcaagcagtacggtgcatatgtagagatacaatccatgtatattgattatatatacaaatctgtgcacttccctcatgctagtactgccacggttgacacgagctgccaggcacacaaacgcctgtgtggtctttagatggtgctttcttagcaatgggatgttggattgtgtcaaaagggagcaaagcctaaccgcctaccacccaatccgacgnnnnnnnnnnnnnnnnnnnnnnnnnnnnnncaacccaatcttacagaggccttttctcagttgaggctccctcctctccaatggtaacataaaactagccagcacatatgcaaacctataaacttaatctaagacaagtgtataggttctgaaaaacctcactgttgtcagactgggtatgaaatactgtttactgaaattattttacacattttattgccttgttgaacaccaattcccatatgtaacttacattagaatgacttggcttataaaacattgtaatacataagtctctataaatacataaaacttaacagatgacccaaccacacctgagatgcacactgctgtccggctgtggtgctcttcaagctgctaccttattgcaccaaacctctcactgcctcgggacagcagaagtctgagtttaggaaccgatagttcagtggctcacaaaggcaaagaaaacaaaacgcagaagatgaaatggggttgatgacaccacaggaagaaaggttaaaacaagggaccaacgatatagagattcacactgactcacccctgggaaaaccatatgtttgacatcatatattgtacacagagacgacataaggggacctccaaaatcacccagccaggaagagtgccaggacagaacagggccaagtgttaagtaaccaggaactttccatcctataaaatcttcagagcactgtggttggtgactaggtctggagctaagcacctacccctcccgttcccttaaccacgctgccttcttcaaaacagcgaagaacatgagatgcaggtatctcttcctggctgagcagacataaaagggagatattcttagaggaaaaagttggcaagagaagttccctggccagaaaaacctctgacaactgcagagtgattcccacagtcatgattacagctcaagaagctgtgcatttccagaaagctggatgggtggaagctacctcgttaaagctaaagcagctgagtgttttttctgagtcagtccaagaccagggtgcgcctaggaactgccagaaagggacgagctgagaagcaagacacttcccaccctcgtgtaactcacgcagacaccaagcttccagaattttccaatagctaaatgtaaacacaggtgatcaaaaagaagctgtcatcccaaagacgcacctctgattgacgtgggaagaatcaaaggcattaaaccattcctaaagccaagcctagcaggatgggccgcctgccccaggaggtgaaggcagggagttcaaggccaacatccataatgaggccaacctatgacaatctgagctcccatacttacatcagacactgtctcaaaaaaacaaaacaaaaattatctcaagtgttgcttatgagccaagccctgtcccgacttctgggtccacccatggtcatgagcatgagcataccttgaggtcaataaggcttgaatttttttttttttttgaagttttgcaattcttaacacaaatctaatcttttgacctcggtgaagggcaaagaggagcctcctccattccacaggcgaaacactgcaacactgctctgttacacacatcacagaactgcctactttcattgggtttttcctctgaaaataaaactaacaactcagagctggctgtccttaacccttcatacgtggaagagtgtctccaatatcagcccttcgggggagaggacagagaggacaaagcagaacccctcccaagcacacatgcgtgtctaaagatgaaggaaaggaggagctacaccattatcttcctagaagatctttgtggtctgaagctcactgcaaccatctgtaggtagactatgtgtgcttttcttctctctctatttcaaagcctccataccccacataatatatatgaacatatgcatttcttagttttagatgcaaacatatgtatttcttttttgtttgtttatgtggggaggggagttaagacaggtcttatgcagctcaggctaggctgaccttgaactcctgatcctcctgcctccgcctcccaagggctgggattacaggctgcactgccaaatccagcttcacgttgtaatttaacacaacttaagagacaacgtggagcaaggaaagagttgagaactctagagggcccaggactggccatgataaaggctttttggaagttgtatacctcacttttagaatttcacatctgagaacgagagttttaggaagacacggtgaagggaagcaccgttgtccctcgggcctaagagccacaactgtcctatccctggagggagcagctgtctcggccacacttgctcctttcatctataaagtactttccttctgtgctgacaccaaacagattcctctggttaagaaagaaaacaggaagcgccactttcccttcttttcaaaacagcctcggggaaacacagattctaaggcccttcctgggggcctcctacttcgaagctcctgaaggcaaattcactttcagagccaactgatgcttccaccacctgaaagtgaagttccaggaatctaaggtacagagtaacgactttcaatcttaccagttaactcactgatacatgcaagcaccagaccttcactcttctttacggggagtctgtcttcctaggaacagcagtatttgaatttggtaagtgtcttagttttagggtcatcattgttgtgatgaaaacaccatgaccaaagccacctggagaggaaagggtttgtttaccttacatttccacatcactgatcctcactgaaggaagtaaggacaagaacacacacacacacacacacacacacacacacacacacacatgcacacgagtgcgtacagactcctggaggcaggagctgatgcagaggtcatggaggagtgctgccttctgccctgctccccatggcttgctcaggatcttgctttcttacagaacccaggactaccagcccacagcacagtagggttttcctaattctctccaagatagaataatcttctactccctgtggatgtgaggagaaatcgccatcccttgagaccatttgtgctccataactaaatattatatgtgtgtatcactttatctggctttcatatttcctgaaggtggggtaggattacacatgcatatggcctgtgcctgcaagtgtggaagcccccatgtcttcctccaacgcgccccactgtgtttttgagacaggctctctcactggagctaaagttcacagattaggttagactagctgccatccagccctgggatctgcccgtctccatctgcaacatccactcacatcaacgctaagcttacagactcttgccatgcccagctctaacaagggtcctcacgcccgcacagtaggcgctttaccactgagccatctccccaacccctcgcattcctttcccttcaatggattttttagattttaatttaaatgctgcttttaaggttcactggccttatcgttgtgaagatttcccaccaaaattctaattaaaaaagggacagccttccacagtcaccacatctcacaggcacttaccaggaacaagcagattcacaagagtcaacctctctgctaaaccaaaacttccagccttcctcatttacgctgttttagctttgggcattaagtcaccatgccatccatcaatgtcatccatcattataaattagatgagaaaatacacacagtaggagacagacaagccttcaaccgtgggtctgtaaattgcacactaaggacattgtcactgaaaggccacaaccgtggaagctggtggcctctccctccaggaggcacagagattagcatgaaggataagactccttcaaatccttcctctgctcctgtctgaggaaggcctgtgaaggggccatggtgtccaagctcactctggactcagtgtcatcaacaaaagtccctgtcctttactagttttcttctggatcagccagagagtaacagttatgagagacccgtgtcttctctcctagtgttccacccttcaaagttaagttagtgacatcacatgccctcacttacctgctttattttaagtatacctggccacccagcactttgtcttgttaattttctaaatgggtttttatacagatgtgagtctttgtctgcttggaatgtgcaccatgagcctgcagtcctgtggaggccagaggggcatgagatcccatggaactggagttaaagacagttgtgagctgcctggcataaggaggaaccaacaaacccaggtcctctacaagagtaacgagcacaacaagcactttatttttttagctttttgagacatggtttctctgtgcaacagccccagttgtcctggaactccctctgtagaccagactgacctcaaactcacagacatctgcctgcctctgcctccccagtgctggaaaaaaggtgtgcctgtgccaccactgcccagcccctgctgagacatctcttcagcccttaagtccttgattttacattgtgtttattgatacggggatatatttggaaagcagaaataattggctctctaaaaattaaaattttacttatttttattttaggtgtatgattgcttgcctgcatatatgtttatgtaacacgtatgtgccaggaggccagaagaaggcaatggatacctagactggagttacaggtggctgcgagctgccgtgtgggagctggaaaatgaacctaggtgctctacaaaaacagcctgagctcttaaccgctgagccacctctccagcctctagctacaaaactaaatagcttgttttaggtggttattttcaaactacactacaatcacagcacatggggcaacactcaggtcttctttatttcccccatttaaagcaagaaataaagagaggaaatgcggtacagccttaaacttcactggttgttaaaaataaagtaaaataaataaatactaaaccaaaacataaactggcccagctgtgtcttcaaagcccaggaatcagagaacaccaaaaagaaaatcacactgtgtctaaatctaggcacccagaaattcagggaatgcaacctcaagtgaggggacacagagcgtttcctgcagaagcttccggtcactgtctcaaagttccaagactaattaaaaaagaagaggtcatgaccttgagagggacatgggagtagggagagggaaaggtaaaaattatgtcaatatagcacccgtgtatgaaatcctcaaaaaaaaatagatagttttttttaagttccaaatctgctaaagaaaacttaggcaaggtttctgtcaacacttaggcttctgccaaggggctggccatgggacagcacacactgccacactcgtggaatttagattttagacaggcagggaagagctttccgttactatgatgagctgcaaagaaagggaagaaagacataggcaaagtgaccagtccatgtttcatagcacaggtaagcacatacacacacacatgcacatacacacacacacactagaacacacacacacactcgagcacacacacacaaatgagaaagagaattaaatgctgcatgaacaataagcttttagaaaaacgctgtttctcgaactctttccactttaacagtgaggtgtcaacatcactgaccacagcaaaccactgggttccctctgcaccctccagcagagtccctgaaaacctttcttcactggctggagacaaagcagagctctgaagactgaggcttcccaggggctgagaagtcagtatcggaccactccccatcaggagaccgcccctaaagcaggtctaaaacagagcccaggggcagtgacctgaaagagaactctgagaactgagtaattggtggctgcagagtttcctaaggacctagagaactcagccttctgagggctgggggctaaggcactggccacagtgggtgtgaggttaccacagcttgctcaaccccagagtcccgccttcctgccaccagccctgactgtaggatggagaagagctcttctcccactctggtgctgaccacatcccgtttgtagcccccgaagctcatcctccagcctcaatgtcagctaaaaaaatttcaactctgcctaagccactgcagcatcggtcgctttgtgactgtaccgtgtatgtactgattctagggcttcaggcactcatcacttctgggagaaagaagaggaggaaggaggaagctaccagcagccccaggtggccatagacagagtacctgactggaatgaggctaacacctgcggtacagtggccaggggccctgagtttggatgcacacttactgttactctcaccacaaaatcctttcagtccagtactctgacgggtctcccagtgggtccaggtgggtctgaggcactccctctcctggtgggtgggagtgagactagcacaatgatgtgagcggacttgcagttgcttggtccactgggggccagtccacctgcctgcagtctccaggtcaggagattccagagtggacaaacagatgtcaagccaggaaatttgactgggattttcttattcttgtgccccaaatcatatgtgactaataaaattagcgtcttcagatatattcatcctttgccatgcctgagagtgtggcagttttcaaacccaatcttaccaccagttaatcttgggcgcgcctaccagcagcccttctgcttcagaggcccataagaaatgtgaggcgtgagccaatggaaagctgctcacagagaagttttcgagcaagattttacaaaatgctcttaccaggtctcaagtagctcaggctggcctcaaactctctacatagcctgggctatttgagactcggtgaaagcatgaccttgaacttctgatcctcctgcttgagcctcctgagtgggaccacaaacaggcaccacacctggtttgcatcttgcatggggatcaaccccaggcctttgtgcacactcagtaagtactccacacagactagctacatcctctggcccctttaaagcatttccccaaccactgccaaagcctgagtgacatttgctggttgggtagctctaagagacaggagtaaaatcctctcaaattttgtttgatattcacaagtgtttccaagggaagtattataatttgattagttgctatttaaaacttgacccactttttcctaaataaatatgtttgtaaactggctaattatcttatataaataaatgcttttgctcatccctaacagtagcagaagtttgatcagaattcccaattcttggccaagctgaaagctcagagataccgggagggtggggggggtgattttttttaacgtaatggctgcaaacaagtgcattttgtctcaataaataaaacaaaacaggagccagccagatggctcagtgagtaaaagcacttgttgtgaaagtctgcctgccaaagttcaagcctaaaacccacacagaggtagaaagagaaaaatgaatccaccaagttgtcatctgacctctacacacgtgctatgcccacacacctagacacacaataaaaggataaagcaatacatttaaaatgtttccttttgttactatattctggtagggggaaaatattagcaagcaaaaatccttagcgttaaaatgtaacaaaacttgaaagttctagccataggaaatacagggtggagatgtgagcatatgaccgtgtacacaccataagcgaagttattattcacactcatacatccaggtgctttccagtacatcagaggataatatgcatcaaaccagaacagaaagataaacccaagcactggcaatttagaaatgtacactggcagcataaggaagaaaaaaaaaaagatcaaaaccaaaacaaacaattgataaggcagcgtgactttgaacagctaagcaaacatcagctcacaatatggcactacttccagcacccctggagtgtgagctcaggtcagccgctgcagagggattcctgcaaatgatcttacaaagactaaaagacagcgtgcacttatttcactgctcaggtgcctggtgctataggcctgttttacaagtgttgatcatagctgaaccccttagtaaggtgagatactgacctccttacaggactagcatcccattttacagataaggaaaatctaggtgtcagggttaaataacatctgaggatcacactgtgagaaaagtaagtagaggcacaatttgaaaccagacttgtctaaggcagaagtccagatcatctgctacagcacagggcattgatacaatgtatttcttggatgtgttctatccgatggatgcttggcaagaccctggcaaggtaactacaaacaaacctaatgtagactccgcccttttgtttaaatctaaaaggagaaaaaggacaacccaatactcacagaaatagaatcaagggctaggaagacggctcagcagggagagtgcttgccatgcaagcatgaggacctgagcttcaatatttggaagccatataaaaatccaggtggccagcaaactggggacggtaatcccagcactgaggaggtggaagaggcaggaggatgcctggaattcaatgggcagctggtctagcagccaatcaccaagctccagacgcagtgagagactgactcagtctcaaaaaccaagagggaaagatgcttaggaaatacacttgacatctacctctggcctcaacgcaaaggaaacacacacacacacacacacacacacacacacacacacacaccacacacacacacacacacacacacacacacacacacacacacacgaacattcatacaccacaccagaaaaggaaaaacaaaaaacaatgaaaattaaaaccaccactgcaatacactgtcctcacacagtctggagatcagaaacaagtcaccgctgacatttgaatgaggagcagatgacaggcaggcaggtaagaacggaaactgaccaggcagtggggaatgcatggggaacatcctgtggaggatgttcatgcaactgaaaagaaaatcagacattctacctgagtgagcgcaatagcacagaacacggaaaacatggagtcaagtgagaactgatgacacttttatctagatgtgagcaaataaaaacctcactcaaatctgtatgtttagttttcagggtaccagagcctcagcagcagtggtgggtgtccaaattcccaagtttttcctagatctaaagtgaaacagagcaaaggctgtgtcccttcagtgcctctgtggcaagaagcttggttcagactctctctctctctctctctctctctctctctctctctctctctctctctctctctctctctctctgtacctgtccttctccttctcagccactagaccaaacccaactattctagagcaaaccctgactgttctaaagcaactgtttccctctcctgcttacaaatccgtctacagatgatctaggaaacgcactctggcccttgaccacccactatgtgccaccttttcttaggtgaaaacagcagaggcagacttaaggccatctggagagcaggttcctttcttggagccttggtaacgtctgcagggcagctacagtggcctcatctctgtggcccaagatgctttcttcccacgctcatgctgcaaacaccttttcagagtgaggcgctaaaccttcctcaaagggcatcctcttcctctgaaacatagtctgtggtggaaaagaggagtagagggagggtggggggagggaaagggagtggagagaatgtggtctttatcctgaccacccacaaatgtaagtcctctgctagtaagaaaatggggaaaaaagattttgtaggaataaccagatgggtctgacattaacatgcattttgttacatagatttccaattacacgaggctgttggtatttctttagaatttcttagaatacggctggagaaatagctcctgtcacacaagcatcaggacctgagttcaaagtcagccagaaagaaaatctgagtatgtacaaactacaaaacaatttgaaaactaaagcagtactatttaattgccccaggttccagagacaaggtggacagcacacttgagggtcatgactggcctccaatgcaatgcgtgcatgcaggagcacacacacaaatattttaaataactaaaataaagatgcctattataacccctgctttgaagaagatatctcggagagatgctaagctcttcttattgtctttttattttttccactgctgaggagcaagcctaggacatgatccattcttcagagtgcggttatgaactaacctcctgggtgttcaccgcctaagaaattaccgcctgacaaatttcctctacaacacttgacctaaacagatgctgattctgagcctctaaccagcagaaaactctctatgcttccaacacggctggaggcaagctcttcccgtctctccaacacaaagcaaggactcacaagtgttccaggcatgactgacaggtaaacagagaaagaggcaaataaaagcccttgctcattagcccggttttcatagagagctttgactcttggtttgacttaaaatgaatgtctcttacgggtctgtcatcccaagtcaaggcagagcatcctaagaatccaatcccttccactacctttcctgctcttagaaaacacagccaaagccaaagccaaagccaaagccaaagccaaagccaaaaaaaaaaaaaaaaaaaaagcctgcagtacaaatgtttaagtggtcatgtccctgatattaacaatgaccttgaacgctctctaaacacaacagacctgttgctaaatcattaacttatttggattaatgctttgtggtggggacctggacagctgattttttttttaagttatgtttacaaagtgcaacttttttttttttttttttttttttttttgtttttgtttttttggttttggttttggttttggtttttcaagacagggttttctctgtgtagccctggctgtcctggcactcgctgtggagaccagactggcctcgaactcacagagatcctcctgtctctgcttcccaagtgctgggattaaaggcatgtgccaccacatctggcaagtcaaacttaaatttctaatattaagacgtttttaaatatctctcatagaagatcatcgcatgctagaactaggcaattaaataatattgctttagttatcaaatttttttggtttgtacatatccacattttcttcctttcatccctattttacatgtatgtaataattagtctgtgtattaaactcaagaggcttcaagaacatgagtcaatacagtgctagggagcttcaaattcttacacatgggccaaacacatcaatggatataatcaaaatcagaaagaaaaaaaaaacagctatttgtctctttaaattgaaatatttaaacgcctctcattcaacatttattcttgaatattaaaaataaaggttacaaagtgaaacacatcctgctattttttttttctaaagttgcatgttaacacctgaactgttctctgagtttggtatcaggaagttctttctggacgagttagagcaaaacaatctgtcctaggagaattcttcattatccactaagacaaagggctaatctcagctaagaaatagactgggaggtgcttacaaattcactcttcaagcttatagggacaaaactgaactgggaagggatcaactttcgttcactgtggcggcagctacaaaccaccaaagaaaggtcgcatgcattactttttctgatgtaagtttgccacggctggattttaaagacctctaacagcaagatgggatggcaccagttactgtgagaactcccctactctaaattctgtctgtggatctcaaagacttcgtaagaacaattacactgatactttccccccaggaagaagttggtcttgatagacacttagctaccttaaagtacatacatcccagtgtaactcacctttgttctttggtgacattatgacataaaataagccagtcaccaaagggttattacgcaacctgtcttcatgaggcaccttgaataagcaaattcctagagatagaaaggagttcagaagttaccaagaaaggcaaagaggatgcagacgggacggagtctctgacatatagaagccctggctgcctggatatactcactgcccctgagctgatcacacaattaaggcagccaagatatcaagcaatatagtatatagtatatgtactatatcataatttacttcaaagggcctacatgtttactacagctttccttgcctgcaagttgtggcatttcacgaaggccatggcctttcctgccatggcccatgctacactgccccaggagtagcagaaagcccagcttagctcggtgatactagccggatctgggcagtgccactgccttcctgggcatgtaatgttccaggtagctttttctgttgttgtaatgccatgaccaaaatcagcttggggagggaagagtttgcttgagtttaaggttacagcccaccaacagagagcagaattgtggctattaggcttcaatgtgggtcttttagcaatggggaaatgattggtttaaggatataaaattacagccgggcgttagtggtgcatgcctttaatcccagcactcgggaggcagaggcaggtggatctctgtgaattcgaggccagcctggtctccagagcgagtgcaggataggctccaaagctacacagagaaaccctgtctcgggaaaaaagcttcaatgcagatcttttaacaatggggaaacgattggtttaaggatttaaaactgcagatggacaagaggcatggattttgtggagtcttgaggtctactgagagcatgataaatatggttgataacaatatgctatattttaaaagttgtgagatagtataagtgttctcaaaacaaaaatgagtatgtgtgatataacatgttaattggtttaatttagccatgccattgtgaacacactgtattatgtatcataattgtgcatgactttatgtatgagctaaataaatgaatgaaaaaatcaaaaaaaaaaaaaaggttacagcccaccatcaagggaagttagagtaggaactcaaggagatgcttgaagcagaaaccaggctcatggctcggctttattgatatacaggcccagcccacctgcctagagatggcttagcccacagtgggctgggcattcttatatctatcattaattattttacagcccccatcatcatgcccacaagccaatccgatggtgacaattctttaattaatcttctcaggtgtgtcaagttgacaaccaagataaaccaccacaagtaatgactcctacctaatccaaataattctactagtccataatctaaaacaattaacatgaaagacaggggatacataactgctggaccccatgcaaattcatgatgctattcagtgaggagattccccctccctgttcagagccctgtggccatgcttctcacctctctatggctcactgggaaccctcctttcaattgccttgagattcttcaatgtccttgggggcatttcctgctcttgagctggccagggatggtttctgtttattgccaacaaagagcctaactcagccagtcattcaatgttccagcttcatccagtgggtagcgtgagagcagtgtgatagacaaattccttcaggtcttttaagatcagacagtgagagccgggcacaaggggtatccataaactgttacatgaggttaccaagacaactcactgcaagattcacaaatggcttaattaaatatggatggaacaggaattggacgccatctccctctcagaaaccttgggaaattagacacttcaatctgccagtttatccaggcaatgaacaaccttcagggtagtttaaggttccagtcttttgctatatctgcttattatttggccctttggcctttatgttgagccctgaggatccaggnnnnnnnnnnnnnnnnnnnnnnnnnnnnnnnnnnnggcagggaaagctctggctgatccctgaaagtagccgcaggggctctgctggggacttctctggggctccactgtccattaacaatgactgtacgtaataaaagtcccgagcttgataatcagcacagaaagaatttttttctgatattttaacagtgacaaacatcttacttcagataggacctcagtaacgagtgtctgaattctaagaatttagataggagcttagattacaccctgtcgacttccctcgccctcccctgtgctcatgtgaatccgtgatcttcattgctctttacagtagcaaaaccaagaatcaggaatgagaggggcagggggactttaagtcaggtgtggtagtacacgcctataattccagcactcaggaggattgctccaagtttaaggccagccttcaccacgttttgcattccagcccagccccaactacacagcatgagactctaccttaaaacaaaacaaaaccatcattttagatgaaaattcttttcccaaagctcccagggaagctggagacaatcaataggaggcaatttatagagaaaacaaccactatacaaccctggggttggagacccggagaactgagtagaagcctggaattcatggagtgggtgcactgtctaaagacactccagatccttcctttcttccttccttccttccttccttccttccttccttccttccttccttcctgactaggctcccaggtcccagtgtcattgccatggatctctgtaaacccaacacatgcttcagtgtctggaagatgtcatgacagttgcagggggtctaaaccaagctcaaatctccctatcgggtgaagcatgaaaaacgttttcaaattgttcctcaatctctgctggcctcaacaacatcaaaatatttgctttgggactttgagagctactaaagtgaagaacgaatttttgctgacttctgaaaagtataccaagacaatgtcgagaacgtgccattgaccatgggtgtcacaatggtataccaagacaatgtcgagaacgtgccattgaccatgggtgtcacaatggtataccaagacaatgtcgagaacgtgccattgaccatgggtgtcacaatggtataccaagacaatgtcgagaacgtgccagtgaccatgggtgtcacaatgacacagaggtccatccatgctgagttgagctcacattgtacctcctccttgaagccccttcaaccaggtcagaccctcgggacaggaagaaatgtggctcttccaagcccctgtgacatagtttctaaccttcacctggcatttgacagggctcttcttatcccatctcctctgcccattactgaatccgtccacggctattcatgaaacacctctaggggcttcctagagtcctcgctctgtctcagaaattctctgatactggaaatgaaaggattcaaaagacacaaaagtgcctgttggtttctagtcctgagagcaaaggtgttgggtgtgtttatgtccccacagatccccaccaaatgtcaaactacaagttctcaaagggaagccagcttttaacaaaaggatttacactctgtcttcagtatgaaagcccagcctgtcataaaggctcaatgacaactaatgaatgaatgaagccaaccagctaatccataggacatttcagcgttaagtactttctgaggacagtcacatgaactgggttcgtgacagcatatttccagttttatcattaaagattttctttgattctcaacagcctgctattttaactcatcctcaattcaagattgaagatctgtggatgagtaatgttctacagctattcttaaccatttattgattataatttggatagtgttcactcctccatgtcgaaaatagtcaactaaaacgctcctggattatctcagtcacgtgccaataaggcactgtcacaaactgaggcggtagacactggtccagtcaacaggagacccgtgcttagtatgaggattactgacacaaccgatgatccatgcccacacgtgtgtgtcttacctgcagaagtacatcgaaaataaggcagattgcacagtcgctttaacaaaataagtcaggcatcataaccgttcagcacgtctgctcagacaaatgtttaccatgctacactttaaaaacataaatagcaactaggatccatgcttaaataataaccataactgtgctgtgttgcctaatttgaggttttcctccattgactgtgactgggaaaatgtttgtatttttcaaagtaagcactgttcatgaagagtaataagaaactaaagaatcgggctggagagatggctcagcggttaagagcactgactgttcttccagaggtcctgagttcaatttccggcaaccacatggtggctcacaaccatctgtaatgagatctggtgcctctgctggcataaagcctgagtgacatttgctggttgggtagctctaagagacaggagtaaaatcctctgaaactaaagaatccttagatactgtatggaccctgtcccccccaaatgcattacttattaattaagtgaaatgtacagttattgtttgccatgtaaacctgtcatattaatccatggcttcgtctttacatctgcctatgatgcatgccctgcatctgtgatggagtgtgttgagtttaggtccatagtcttccgtctgcatcctctctgttgtttcctcactagtcacacaggaacagtccaaagggagcaaccgtgggaagagctgcagttcctcagacctcaataataagcctctgatcttgtctctctccaccaggtgctgggcatgtgagacagcatggcaatttacctactgagctgctgatgcgagcgagagtctggaagctgtgtgtgagtcaccagggacctctgggtttgagacagcatccagggctggagagatttcccagtggttagagcactgggtgctcttccagaggatccaggttcagctgccaacacccacatggcagctcacaaccatctgaaactccagtccctggagatctgataccttcttccggtctctagtggcatcaggcatgcacatggtacgcacgcacacacgcgcgcacacacacacacacacacacacacacacacacacacataggtgctcacatatacatattaaataaataaatatgaagttgttgtcaattttaaaggtgtattgagaaaagccaggctatctgcatatttgtagggaagaacaaagcctaccacttgcagtcctgttaagggaacaactgtaacgataaatctttccgccagctgcccgagtcccgccaacatgtgggcgcccaaaataacacagagtcttatattaggtacaatgttgctggccaataactaggatttcttacttgctaactcagtcttaattatcaaccataattattaatctatatattttataaaggcatcttatcgaggacaccggccatatgtgccctctcttgctggggatcacatggcgactccacaaagaagaggggggagaaagagagtgatttcctgcttgtccctgcttatattcagagtctgcctgctatgtcacttcctgccaggatcacaagacttctctttactacgtttcccagaatcctcctggactcctagtcccacctatcttgcttccttattggccaacagtgctttattttacaaccaataagataaacatacacagaaggactttccccatcaaacaacttttaaaattataatgggaataacagttaagtaaaaaatgtaaaaagaaatgaatcaaacctacacctattaaaaacagcaaaaccagaatgcttcacaggaaaaaaaaaaatcatgtaggatgtgatgtctcctgcttccatcccagctcttgagcagaatcactgttgagttagggaccagcctgagaccctatctctacagcattaaaaataaaacaacagcaaagaaaagttaaaccaagaaatagaaatgcaaggggccctgattggaacaacataacctgcattttcaagtccactcctggaggaatcggatcagaactggaaccactgtgacccatctcacacatgcccactattgaagacgaaacaagtgactagagatgccagttgaactggcttttgtcactctaagagactactaggactggctgaagtcagattgccaaccactgctcaccaggcagctttctaagcccttaatgtgtggctaccaactatgtccataactggtcatgtattttaggttctcattaggacagcaatggctgaaatgcacacatacaaatgcacatgtgtgttaatgcagacacacacacacacacacacacacacacacacacacacacannnnnnnnnnnnnnnnnnnnnnnnnnnnnnnnnnnnnnnnnnnnnnnnnnnnnnnnnnnntcacacacacacacacacacacaccacacacacacacacacacacactcacagacacacacacacacacacacacacacacacacacacacaccttttcacttcctaatcagaaaccatgtgagtgggcagggaaggaaggacaacctgaagctggttctaccacccgagcaccccaccaccccatgctactcagcccctacctccaaagcacctgactatggatgcagtcagaaacataggtatcttctaggagctgtggcatcaacatggggagagcagggcttataatagaaaataaggaaaaccagaggaccaattgccctgcattggaaactacacagtgcattctcagtcccttcttgcctaaaaaaagaaaaaaagaaaagaaacaaaatgaggaaactaactctaggatacatcatttaaaaaaatcagttctttaaaatatatacactatctaggatgtaaggtaatttttccacaagtcaacacaagggtatataatacagatcttaggtacacattaagaaacatcagctgggtgtggtggcacacgcctttattcccagcactcagaaggcagaggcaggcggatctctgagtttgaggccagcctggtctacagagtgagttccaggacagccagggatacacagagaaaaccctgtttccaaagtataaataccactcaaaggaaaactgggaaacatggatatttgcagccacatgctcaagggtctttaaaccacacagaagggccggtgatatggttcataagtactagctctcacatcctgggatgagttccctcccaggacccaaccacaagggaagagtgaactgaatccaaaagttgccctccagccccacacgggtgctgtgacgctcatgccagcacacacacactcacagagacaactctatgtttaatcaccctgaaaagcttacgagactcattttgtcatagtgctgccatgaggagtgtgttgaactcaaaaaaacagtgaagacccactgcagacactccaaacaacagcctttaaagcttattcatgccataaaatgttaagagtaggcaaaattcatttgtaaatcaacatctgtgctttataaagccagctctgatcacagcccacctgcttccaatcggcagcgccaccaggcttctgcaagtaccagagactgaagaggtaacatggaaagcggagacttgcacggctcacttttagctactccctggaatttggaatattacagtggaacatatgagtttggctaaacacgtgtaaccatcgtgattactgaacctgaactctggcctagttcactccaccagctccttaacctttgaagaaaatttgtaattgtgtatatggaaatatagctgttccctatacattctcacttcacaaaactttcatttgtctctggagctagattgcctcataccttcaaggggaggctatccatcctctccaaggcaaaaacactgaggctgacttacaaaaagatacatggtgtgagcaaggtcatgcaccggttagcagcaggcctgagaaacggacgcaaggagcaggagagcaaggaaacccatggaggagtctctactctgcgagtaatacaaaggcctgtgagtgaagatcagcaacacgtatgtagccagggaagcagctgttgttccgctctggcttcacagccctagagtctccaacaattacaatcacctagctaagacttcccttgtgaggctccagagacaaggcctgctcttgcaggagctggggtttgattcccagcacctacacagcagctcacagccgtctgtgactccagttctacggaacccagtggcctcttctgacctccacaggcactgcacacgtgacacacagacatacgtgcaggcaaaatacccatgcacaaacaataataaaagatgttaaaatatttttacttggctggggcatacacccttctggttccccaagctaaataaagccctacacgttgaaatcatgcatgaaaagatcatgtgtggcgtcaaaataatggaagggaacaagggagggggcgacggggggaagagaaacaaacaaacaaaaatgtttagaaaacagcataatgaagacttcataagctaatttaaaaaaaaaaaaacttccaaaaagttaaccacaaacaaacaataaaaagaacctacaaaataataatcgtcccagtttgtcccctaaaggcccatgtgttaagggtgtagtccttagctcctgtcactgctgggcagggggccaaggtggaaggcctctgtcttagcttgcttttctgatactgtgataaaacactaaccaaaaagcgacttaggtttatgtggcttacaggttacggtccatcctcgagggaagtcaacacaagagttcaaggcagaggcctggaggcgggaactgaagcagaagtcacagagaaatgtgtttggtggcttgctctccctggcttgcttgacctgctctcttaggctccccaggaccacctgcctggggctgactccacccacagtgggctggactttattaatcaagaaaatgccctacagtcttgtccacagagcaatctgacagaggcaattcctcaactgacattgcctcttgctaggtgactgtcatctgccctaaactgacaaaatctccagcagagcctctgacctccacatgtgcagcacacacacacacacacacacacacacacacacacacacacacacaccacacacacaccatacacacacaccacacacacaccacacacgtacactcacacacaccacacaccacacacacacactcacacaccacatacacaccaacacatatacacacacaccacacacacatatacacaccacacacatatacacaccacacacacaccacacaccacacacacacactcacacaccacacacacataccatacacacacaccacacacatacacacaccacacacatatacacacacaccacacacacatacacaccacacacacatatacacaccacacacatatacacaccacacacatatacacaccacacacatatacacaccacacnnnnnnnnnnnnnnnnnnnnnnnnnnnnnnnnnnnnnnnnnnnnnnnnnnnnnnnnnnnnnnnnnnnnnnnnnnnnnnnnnnnnnnnnnnnnnnnnnnnnnnnnnnnnnnnnnnnnnnnnnnnnnnnnnnnnnnnnnnnnnnnnnnnnnnnnnnnnnnnnnnnnnnnnnnnnnnnnnnnnnnnnnnnnnnnnnnnnnnnnnnnnnnnnnnnnnnnnnnnnnnnnnnnnnnnnnnnnnnnnnnnnnnnnnnnnnnnnnnnnnnnnnnnnnnnnnnnnnnnnnnnnnnnnnnnnnnnnnnnnnnnnnnnnnnnnnnnnnnnnnnnnnnnnnnnnnnnnnnnnnnnnnnnnnnnnnnnnnnnnnnncacacaccacacaccacacacacacaccacacacacaccacacacacacactcacacaccatacacacacaccacacacactcacacacatacacaccacacacaccacaccatacacatgccacacacacacacacacacactcacacacaccacacaccacacaccacacacacacacacaccacacgcacatacacaccacacacatatacacacacaccacacaccacacacacacaccacacacacctggggacaggcgatgagtcactggtggcatgctccaactctgtcccctgctcacagacacctgccatctatgccattgtagttccaaagcaacagaatccatagactgtacaactgaagccaaaactgtgagaacaaaaatgtctcctccttgcaaactgataatcttaggtattttgatataacaatgggacactgcccatatattccaggaccttaattaagccattataaaactaaacgtaattatttctcaatagttgaaaattttcactcctgaattttgaaaaaaaaatttgtaagacagaacccctagttttaaaactacatattaataagaaaaatcaatgagatgatttgctgtacaacttaagccccatcagatgtgccaggcattttctgaaaacatctttgaagtttctacattacttgcagatctcacacacaatgtttatattgataagataattaataatttcaggttgaacactattaggtatttcccaaatgtgaaagaaatggcatgcttttctaaacagaaagtactgataaaagatgtcaggacttgtcaagtaagatgccgaaggacctttatattcccttacttcataagacttaaactcatgcagcccactgaagtccatgccctgggctgccctggagtgccctttgaacaccattctccaagggccagaaaattctatctgggaacatcagcaatgacttctgtaactgccctttgaaaacctgttgataccggagtgcaggagtgggggagcaatcacactaacgccgacctctgcagttctatgagctacctgaacctccgagacgtctacttcaatagacagacatccaatcaaagctgcaagctccgcccagggcagcatgttcaagactcttcaacttggactctgacttgccagtcatctcaacactattatttcatgaatagagaatgatagccgtctgggaacacattctgaagaaactccactttcagatcaccagcaagaaaccctgagcacagcgagcgctgtgacaccactgagcctgccacagtcactgcattcgtgctggttttctgtctgaagtcacttgggaaagcagagtagcatacgcttggcaaggagtcgaagtcaggagtagagttctggctttggacacaaaggccctctgcttcttgcagtggtcacgactcgtctcaacaattcctggagacaactccacgactgtggaagctggaccaccttagctctcccagtatctgcttcatacactacccacctttgaccttgcagagtgaccctacagagacaaagtccatcctggcccttgaactcttgcctaggctatgcagcgataattactgcatcagctaattaactggtgaatgtagtcattacagctctgccatgctcggcgcttacctctttgctccccacgcccctgtgtagaaaccactgagtcccatttttagactgaggagttggaagcctagctagatttcataacctgcccagggacataaggtttgcaagtcaaagggtgggaattccagcccaacccttctgtttctagagcccctccttttagctgctaaatggcagacaccctccatgtctgccaaggttcaagtgtaagttcaacagaattcgtcagcaaggcactgtcctggacccaaactggacttggagcatgaattctctcagaaacggctggacacttgcactgagttcttccacacttcaatctccggagtaaactgatgggcaggagatatggaattaaatctaccttcctcccccaaatctgtggggacatgctcaaagaacaggacaccactggtgacttccagggaaggcattgggcaggtgacactgtcacagctcaggagacagaactccaaaactcaacagtgaacagtcaccaatctcaagtctcccagattagagtctaaagagcggaaactcacctgtgcactaaaacatatcgcaaggcgcaactaactgcatcagctcgccatgtaaggaatttctagaaatcagaaaaggccctacttaactagcacgctggtgttctgcaggatacacaaacctatttccccagtgcatacaccaactggaatctccagagccttgcagttcacttcacccggccgagggggatggagaggaaaaaagaagatcccagttctagaaccccggctgcccacgaggcccgttttggcagagccaaaggggtgagtcttcccttggcaaggccaaaaggaaattacttcagcgaagaggggctggtgatctcctccagcgggacaatgccgcatttgcactgtgcaacatcgcctactttcgtggccgaagccannnnnnnnnnnnnnnnnnnnnnnnnnnnnnnnnnnnnnnnnnnnnnnnnnnnnnnnnnnnnnnnnnnnnnnnnnnnnnnnnnnnnnnnnnnnnnnnnnnnnnnnncgccagggaaggctgcctcgcggggcctgtctggggcgtgcgaaccacttcctcttctcggatgtgtctcgggctggagattacgaagttgctgagaagcgctcgcggcttcctgagcgcggggacctcggggacgcggggctgtcccaggcgcagaccccggacacgccgcgcgggagggacagagacctggaccggctggcgctgcccagtgcgcgccctacttaccccagggtgctgatgaagccgttgactgagccctccgcgtacagagacacgatgtccccaatgtagaggaagctggacattttgtcagacatgctgcttcacgctcccgtggccgcctccgctgtctccgctgcgcgcaagggtgagatcgggcccggggggtccgaggagtcggaacggctcagccacggcgcgcggcagcgaggccactgctggggtcaccgcgatggccccgcgccaccgtcgccgcccctgccctgccgcccgccgtaggtttcctgttcctggccgagttctgtcctacatgagaacaaaattgtctcctccttgcaannnnnnnnnnnnnnnnnnnnnnnnnnnnnnnnnnnnnnnnnnnnnnnnnnnnnnnnnnnnnnnnnnnnnnnnnnnnnnnnnnnnnnnnnnnnnnnnnnnnnnnnnnnnnnnnnnnnnnnnnnnnnnnnnnnnnnnnnnnnnnnnnnnnnnnnnnnnnnnnnnnnnnnnnnntgtgtgtgaatgtgtgtgtgtgtgaatgtgtgtgtgtgtcgttgcaggggcggccgggaccccgcggggacggaggctctgggctcaggagatcttggaggggcggccccggggtgcgcagcaacagtctggggggactgcgggaggggaccggagggaagccgatctatagggctaaacagggacccagccgggctgggaaggggtgcggtgcagccagcgtggaggggaagacccagagcgcgcagcgacagtccctgtttgcgaaaggtagaggacttggaggggaggggtggaggagaattgtcaacccgagggctcgggtggaaacggccaggagggacaccgactgggaagaccttgcggagccgccactctgcgtggggcgggacgtggatcgcgcagtgacagtccgtccggggacagtcgggcgagagcacgagcctgcaagcgctgggggtccgcgcgatgcagcgacctgaagacccctgaccccagctggagtcggggaggatacatgtctgggtggggaagttgttgactgagaggaggcaagggttgaaaagggcacagttgagaaaggtgctaacgggagggatgcagcgctcctgtggagtgtgttcctgggtcagattttcttcaagtttatggctggggaaaaggacccagcagccacagctgccgcggtgaccaacctggtgaccgtcggtgggtctccattggcagccagagttctgcagggctcagctttgcaaccccaggtgaggctaactgtagattccatctccaggagctggtgacagcccttgcggcccgggagatggagacaggacacgggtcgtgggtgccctcactgtccccgctcctgtcagtcgacctcttacaacacccttttagaagtgtctggtcctaacctgtggaagacacagaagaggcgaacaccgtggtggttgtgacactagtcacgcaataaaaaaattactgcccaagcaatccgcatagagcaagggatgcgaaaaggcagagagaggatgggcagggacatacgccaaactgcagctgaccaaaatgcagagtttagtggtgtcattttgccttacagttcaaagatcgttggggctgaaagtgcttagaaagcctaccgggtagcaaagaacagacaggaaatgtcagtgtggagccagcccctcctctcctgggctcagcatgaagctgtccttactcccactgtctctccaccccttttcctctccttgctaccacctgagcccacaggtctggcttctgtgttgtccacagagaacaggaatttagtaatttacagatgccccatacatgataggagtcatcctgtctatgttcatgatgtcagtgtcgggaacctccaaaagatgggccctgagtcctaaagtcttgagatgatggccctagaatggaggcatctgttatccaggggacttgcatgccgcgttctgtgatggtcctccctaacatccagcaggtgctcaacagttgttggcctaaatcccgaaggcttcccttacccaaagtcagggcaactccaacaaatgagtgtgtgaatatttatgctgacaaacagatgaagcatcaggctaggttcccaaattctggctcctagtgacagcctggacccagaatagggccaagaggcccaggacaggagtccagttgccttgggtatgacaccttcatcccaaggcacctctcaacactttccaccttgtctttggttatttctgcactgtgtgtgtgtgtgtgtgtgtgtgtgtgtgtgtgtgtctgtgtgtctgtgtgtgtctgtgtgtgtgtctgtgtgtgtagctgtgcgtttgtgtgtgtgtgtcgtatgtgtgaatgtgtgtgtgtgaatgtgtgtgtgtgtgaatgtgtgtgtgtgaatgtgtctgtgtgtgtagctgtgcgtttgtgtgtgtgtgtcgtatgtgtgaatgtgtgtgtgtgtgtgtctgtgtgtgtaggtgtgcgtttgtgtgtgtgtgtcgtatgtgtgaatgtatgtgtgtgaatgtgtgtgtgtgtgaatgtgtgtgtgtgtgtgtgtgtgtgtgaatgtgtgtgtgtgaatgtgtgtgtgtgaatgtgtgtgtgtgaatgtgtgtgtgtgaatgtgtgtgtgtgtgtagctgtgcgtctgtgtgtgtgtgtcatatgtgtgaatgtgtgtgtgtgaatgtgtgtgtgtgtgaatgtgtgtgtgaatgtgtgtgtgtgaatgtgtgtgtgtgaatgtgtgtgtgtgaatgtgtgtgtgtgaatgtgtgtgtgtgaatgtgtgtgtgtgaatgtgtgtgtgtgaatgtgtgtgtgtgaatgtgtgtgtgtgaatgtgtgtgtgtgaatgtgtgtgtgtgaatgtgtgtgtgtgaatgtgtgtgtgtgaatgtgtgtgtgtgaatgtgtgtgtgtgaatgtgtgtgtgtgaatgtgtgtgtgtgaatgtgtgtgtgtgaatgtgtgtgtgtgaatgtgtgtgtgtgaatgtgtgtgtgtgaatgtgtgtgtgtgaatgtgtgtgtgtgaatgtgtctgtggtgtgtgttacgctgatgtgtgcagatgcaatgatctgtgcatgcaacagtagaggccagggtttggcatcaggatgacctcctcagtcactttcccacctttctattgtgttgctgttgtgtgggaagtttgagggacatttatttgtttgtttgtttgtttgttttgaagcagggtctctcactgagcctgaagcttagcatcagacagctaactgcccagagagtacaagtccaagccccggcaatggggttagatgtgcctgccatcacatccagcttttacgtggttcctgggcctggaactcagttcctcattgctgccacagcaagcgcttcacccacagagccacatccacaacaccccaggccgagtcaccacactagaaatgtcctgagactgatcgctctctgacttctttccaccttcacgggtcctgagggctggcatgtggctgggggcagagcactgaccatgcctgcacaaggccctggccttcatccccagtgccacaaaacagtttgtaagacagattgataaaataatatttgtgggttttatactttatttatttagttagttagttagttagtttttccaaactgagtttctctgtgtaacagacctggctggcctggaactcgctctatagaccaggctggcctcagactcacagagatctgcctgcctctccctcctgagtgctgggattaaaggtgagcaccactgcccagctaataaatgctttatgtttattatcttgaatgaagactagatgttgagaataccaggttaaccaaataataatcagtctcctgtgccactgagtccatgaatcacttagttcagcacaagtggctatcaccacccctaaaaacctatagaggcgataaatcaagcagaatatactatctgaggcattgaccaccaggcattgaatgtattagaaatgaacttctgggaaagagcagaggaaggcactggctcccctggggctagagttagagaccgttgtgacctaccatgggggtgctgcccctgtcactgaatgccatgaattgctttcctctcttctctcccttgcaatgaacataatttgagaaatacagccagcttagtgagcagtctgatttatgagacacatgtaaagtataggactaaaaagtcattctccctaagagcatgataaatatggttgataacaatatgctatattttaaaagttgtgagatagtacactttaagtgttctcaaaacaaaaatgatgaatatgtgtgatataacatgttaattagtttaatttagccatgccattgtgaacatactgtattatgtatcataattgtgcatgactttatttatgagctaaataaatgaatggaaaaaaagtcattctccttcaataatgctataatgaatctacatgtttcgctgcttaacaaagcatcaaggacagcctttgggcttctggtttcttctttttaaaacacgtgctatgggctgaggcgatggctcagctggtaaacagactgccaggcaaacataaggaaatgagtttgggtccccagtacccacataaaatcccaggcatggcaacacatctacactagggaagaggcagtcaggaagactccagaagcgtgggccagccaggctagctgatcaggtgcagtaagagacctcatctcaaaaaaaaagaaaaaaaaaaaagaaggtagagagcagtcaaaggtggtttacattgacctctgcctcacacacacacacacacacacacacacacacacgcacgcacgcacgcacgcacgcacgcacgcacgcacgcacgcacacgcaggtgtgcacacagacgaagaggagcacgggcacacacggcacacacacaagcatggtggcacacacgggaggctgaggcaggaggatcaggagttccaggcccaccccgggttgcataatgagaacttgtcaccaccctcagaagaaaaggaaggtagggacagacatacactcacacacattccggatcccatttaaaatgttaatcttgtctcctccgggccccttcagatgagggagtcagctatgggggaggattgctgtatcagttactttctcttcactttggtaacaaagggtttcacggggacagctgacctgaacaaggggttgttcatggaccccagactgatagctgggaaaccagcttaggactgttccagacccccctgagtgaggatgtcagtttggaggtctggttaaactgtggggcctctggtagtggatcagtatttctccctagtacacgaatggactttgggagcccactccacatagagagaaactctctcagcctagacacactggggagggtctaggccctgctccaaatgatatgacagactttgaagatccccccacggaaggcctcaccctccctggggagcagaaagaggatgggatgggggattggcgatgggcaggggaggaggggagggagagggaactgggattgtcatgtaaaagaagcttgtttcaaaaagaaaaagaaaaagaaaaagaacaaagaacaaagggtttgtttaggcccatgtttgaggttacagaccttgaaagtcgcagcagcagaagtacaaggtggatggcgcttacagtcaggaagcgaagagacatgaatgttagtcctcttgctttctctagcccagagtctggccctgagactgtgcgctccacatggccctcctcagtcacctaacctaaaaacttgcgtgaggtgcgcgcagaggcttgcattccatattctgtcctgttggccatgctcatcacccagtacgagcactgatgtagcacaaataaaacaaaaaaacagaggcagatattggggctaaagctgaagatcagaaaagcaaagcagccaaccgctagagagttctcacctctaccaatgctcacacctcagactgaagggtgagccactgaacctctgattgctccccactgagctgctcctcagtcacacccagacttcaatgagctcgtctcctcccaccttccattcctctctccacccagccataccactcccgtctccacctccctagtgctgggattaaagacacgtcatcccaagtggtaggaacaaagatgtgagctctgtttctcttttagactgattcactctcatgtaacctagggttgccttgaactcacagagatccatctgcctcttgaaaggttcaggcattatgctggcctgcccctgttacctggtgaaacaggcaataccctggtcagcccaaggttccatgggaactaagtctgcacgcaggtgtagaggacccctttaaaagataggcccttcccatttacgctctctgtcctgctctctgtgcgctctgttcccctctctctgtttccctgctctgtctctctatggcgcccagccatggcggtcagccatttacccctgttcctcttcttagtctccccattctgccgggccttataataaacttatagtcttatgtctcatgtctcagcatttctcttttcttctttttaaacagaagaatagcacctctgtctccctgagtgctgggattaaaggtgtgtgccaccacggcctggcctctatggctgcagctagctttgccctctgatcttcaggcaaactttattagatcataaacaaaatatcaccacatttcctctttttgtctaatataaaaaagaaggttataacttatataagaaaaactatatgcagtaagtacaataactatataaaatatatacaggcaataaatacatcaaacaatgtctagtccatttgcatttgacaaattcagagaaaatactctattatctaaatctgtaatatgttttatattatacatttctgttccatatcaggtggcccttctgacatgacacagagattttggattttactttaacaagcatgcttgggtttagggaaggaaagagccatgctccaagtccaaagccagcttaaatttttaattgaactgagactacaaaaagaatatttgctttatatgtctaaagagaacagcagaaacaaacatttgggaagatttatgagatttcatcctgttgtaaatgtgatataacaataagtcaatttactctttttcttgggacttttttttctggatgatttgtcctttttcttcaggtgtctcatttgttcaatggtcttcagattccttagctggatgcctttatcctcctgaaaagagaaaaacaaaactcttcctgatcaaatgaaaagcatttattagttttataggttagtttagattaaatgggcatgctgtttgatgaactatcacctcttctaatcaagaggtctctcttgttccaatataatctttatcaattttgatggtatccatagcttttcttctcctgtggaaacaaaagcaaaaccccttccccaatgtaacacatttcctggtttctattctgaggtcaacacatctttaaagtatacaggctgatttagttctgtagtttattctataatccagcatctctctgcagctgtcattccgttctcattagcattcagaaaattcaaagttaataaagcaatctgtttctgggcttctttactatccctttctgtttgtttaacataccctttagagttcagtttgaccttccaaaactgcctgtgtggtatacctgtaatatgctttatattataataaacaaaacactgtttcattttctcagagacatatgttggagtattgtctgtctttatttgtacaggtatacccatgacggccataacttttagcaaatgtatgattactgaaccagccttgtgccattcccatgacccgtttgtcgagtgagatgtgagccctcgtcacagatgtggtgagctcacatcagcatctgaggaagctcccagctccaaccacggtgtctgccacctgctgctgtgctgtcctcaccattccgtacctttccctctggaccataagcccaagcaaactcctgtaaagtcgccttcgtcgtggtgttctaccccagcaacagaaacataacgggcagatagatgtctagctgccattcagggagtcttgataattttgaacaacagaatgcatccttggttttctctggaccctgcaaactatacagccactcctgggttccagcatcctgaccactccggagaatgggtttagaagctgctccatgaagtcccttattctgtggatggctcctccagaaccagcaacaggttctcaaatatcaaccagtctgatgccccaagtcacctggtaccaggagaatgagcaccaggctctttctgttcgattgctggcattacactctataagtttccatcctccatggaggcagggaaaggctctaccccctggggagagatatggctcagtcacagagttgcttgtctaatgcctgatgctctagttttgatctcagcattgactagaaagatgcagtttcacaaatgcacagtaattaatttaaatccacatgattagctctgtggttgattctctaatacatataaattatttagcctcatgctcaaccacaatccgcccctttgaggtagatcaccaacccgatgcgtggtcagcacctctgtacccacctatcacaccccactagctacagcctgaatgggcttagcacagctgcccagtcctggtgagtcctgaagagactaaattagggtgcttttcaagacttcgtgtgcaacaggcaaactgaaaagcttgttagacacaagccttgttccctgggattttcaggtctggggtgagggttgtcaccactcctgaagaggatggcacattaccagtcttctcactgtcatgacagaacccctgacaagagccacctgaagaaagaaggttcgctttgccttcgagcttgtgtgtacagttcatacagggcagccatggcggcggagcctgagcagctgctcacactgagcttgtgtgtacagttcatacagggcagccatggcggcggagcctgagcagctgctcacactgagcttgtgtgtacagttcccatagggcactgtaaggagacaggagtgttcagggatctgtcttatttcccctttttatgcagtctgatacaccacatccagagtgggtcttctctccactgttactctcgggaaccacctcacacacgcccaggtgtgtctcctaggcgagcccaaatgcacttgacaggaaagactcaccacctggatagctgtgggcagcgcctgggagacgggacccaagcaaaccctgaccagcacaaaggcctcgctgaagacattacttgttcttgatttggttgtggttgttttaataatctcaaattcacaaaagattttttttcagaagacatcaaattcatcaatacttataacttaccactttacaatcagtttagtggctgtcttcacacacaggagagggtggggaatggcaacgtacatctctctctcctgcacaagcatggggtgcgccctgcacagcagtagctcgtttagactgctcagatcctcatagcccatctgttctgtgtccttcacccagaaaaaggattttaaacatggtatctttttttagttgtttatttatttttggttttttgagacagggtttctctgtaggtttttggagcctgtcctggcactcgctctgtagaccaggctggcctcaaaatcacagagatccgcctgcctctgcctcccgagtgctgggattaaaggcatgagccaccaacactcagcttgatatcctttttattaaaaaactattttattttatatgtgagaatattttgcctgtatgtgtgtctgtacaacacatgtataccaggtgcccacagaggacagaggaaggcactggctcccctggggctagagttagagaccgttgtgacctaccatgggggtgctgggaactgactccacaccctcttaacgagcataacctagatttaaggatttatttatttattgggtatgtgtctgtgtgtgtgcatgcaaaggacagaagaatgtggagggtttcctctttgttcaccttctactttttccttttaggcaaggtctctccccgagcctggagatctcctgttctcagctaggctgcaaagcagctagttccagcaagcttccagtctccaccctcacccctggagctgggataaccggtgtgtgcaggaaacctgtctatttctgtggttgctgggatacaaaccctggtcctcaagattgcacataaagcgttcttaaccactgatccagagcacagattggaaactctgcgtgtgtgtgtgtgtgtgcgtgtgtgtgtgtgtgtgtgcgcgcgcgcgtgtgtgcgtgcgtgcgcgcgtgtgtgcgtgcgtgcgtgcgtgcgtgcgtgcgtgcgtgcgggcgtgcgtgtgtgtgtgtgtgtgtgtgtgtgtgtagaaagaagttggacttaccctctgggaaggaagccaacgacagcctggcactgataaatggggcgtgggaggggatgggggctacaaatgagaaccaggttatcaggacagaaatgcatgatatcttcataataaaacccgtcagtttggataaaaacctaaagaattaattttcaatggtgagaaatagtctcccacctgtttcctaggctcacagccctggacacgctaacatcctcattctttctctgaccctggcactccagccctacaaggcctatcgaggaagggcaccaatcagcagcagtacgctaaggagtaacaggagttaccaatttttggaatattttaaagattcatgatcagggcttgaggtctgtatagctcaacgggagagcatttgctgagcattcaggaggccttggttttgatctccagcacaagagaaggaagagaaggaagtgggaggggagggagaagggaaaaagaataaattagaattgccattcatcaacatattaaaaaggggatatcagctcacgaattaactcttgaccaatatttgtgcaaataatgaaccctgggacctcatctaccttatctgtagagtgggcacactcacatggtctagattagaaaatatgttttttaaagatttatttatttatttgtttattatgcatagtgttctgtctgcatgtatgcctgcatgccagaagagggcaccagatcacattacagatggttgtgagccgccatgtggttgctgggaattgaactcaaaacctctggaagaacagtgttcttaacccctgagccatctctccagcccctagaaaatatgctcaatggcctttgtgtggcagagttctgcaccaagcaagtactcaaatagatgctaggtattaaaatgatgagacacacaacaacggacatcacagaaaacccagtcagatgtcaccaccagagacttcttgaacagctcacacacacacacacacacacacacacacacacacacacacacacacacaccagaccatctgtgaacactagcaagcacttgctaattgctgacacgtgagttctttcagggacatctgaccttttaatacaggcaaaagaaatcaattttttttaacaggcaaatggcagacataacaaacgagtgttgtgacaccaaaaattaattaattcaattgaaaaaaataagtggctaaataaccacctagagatgccaagtgagaacactagcttccacaagctaagggttctcatcttatctcagaatggagcagataaaacctcccagagaaactgcaccgctgtgcttgcatctcaggggaaggacggccatgcctacaaactccaacgtggctgtcagtgcccacaaagaatgtcgtttgtccagtgaaggttctaaaataccaagagaggtctggaaagcatggtcccatttccaaggtccctgggggtccctgcactgctcttggttggttccttcaggatttgagcctgatgtccagaagctctcactggatggcgaaagctaacagggagtgacagacttcagagctgaagcccctgtgttgctaggaagaaaccagagtgtgtccctgtgtgatgttcactgtagcaagctttcttgtcagcctatctttggattgccagcccccaaacaatgacatggaaactcattattaagtatgaaagctggcggggtagtggtggaacacactttagtcccagcaatcaggaggcagaagcaggcagatctctgtgagttcgagaccagcctggtctacaagagctagttcaaggacagcctccaaagccacagagagaaaaggagaagtttctcatgttctccaacatagcagagcctgtacccacagcatctcaaccactcatctcctgggccagtgtctaagctagggtttctattgctgcaacaatacaccatgaccaaggagcaagctggggaggaaatggtttaattggctttatgcttcagcattgttggttatcactgaaggaagtcaggacaggaactcaaacagggcagaatcccggaggcaagagctgaggcagaggccatggagggaagctgcttactggcttccttcccatggcttgtgtagcctgctttcttatagaacccaagaacaccagcccagggatggcaccacccaccatgggtggggcccttccccattcatcactaggtgagaaaatgccttacaactaagactccttcctctgataactccatgtcaagttgacacacaaaccagccagtgtagccagtaagtcatctttcaggacatctctatggaaaaagtatatatggaaattcgtgaagcctgttagaactggcatccacccatcttggcagaagctgagtaaggttggcatgcagccctccatgacaaccttatcagagtttggggcctgcttgtttctacatcccacattctgggagagggctgacgctgaaccatggttttggccttagttactgtgtcagattaggcagtgatttggctttcttcatattataatctccgtttatcaaactagagcaggtattgtgttgaacaatcctagcagtaaatgacaggatgctgacagatgaaatgttgacgtcttttaaataggaattgtctatagataggcaaatttacgggcctcgacttagcttcccatacgctcccaaatcggcccatctacctctcaacaatgattgtctcaagacccaggatttctccagtcaaagaaggcctacggtggagaaaacaaaattgtccttaaaaagtcatgtcttcacagctgcttcacacagactttcgtttccccaaagagaaagacacctgcctcagatgtcactttactcagagttgtgtacacccagagacaacaggacaccaggtgtttaatacacacccacttcctcctggaccacccaggagcctcgcctgtctttgtggggcagagctgctgagactgtgaaaacagcaggccaggaacaacgggtgacggagactgcagagccttccacagggaagcatgctgttcctgaaatgcctctctgtcagtcagtcatgacgaaacaccgcacaaatgtaatttgaggaaggaagagtctgcttgggttctgggttggagggtgcatggaggaggatggtgacagggagcacggaggaggaggatggtgacagggagcacaggggagaggcagctggtcactaagcagagtggagtgaattcttctcagctttctctcttctctttatgcagctggggaccccagtctgtggaatggtgttgcccatgtctaggatgggtcttccatcttggttaactttatgaagaaactcctccacaaatgtccagagctttgaatcattggtgactctaagtcctgtcaaggtgacagtccatatcaaccacacgaccccctaaggttctataatttcttcaatcttctataatttcctcttccttctgatacaaagaattgttgagggaccagtaagatggctcagtagggaaatgtttcctcaaactaagccctgtgtcctgtcccttcagcaactttctaatgacctgagtgcaatccccaggacccacgtggtggagagagagaactggctttcacaagttgtcctctgactgccgtgtgcacaccacggcatgcacataaataaatgcaataaaactttaactaaaatgtgtcactgtcatgtttacaaaaacaaaggaatcatttatttttaccatcccctccatatataggcaaacacatttttgtgtaaagacttaccatgttgggtgttatgtgttatgtttttgttgttgttgttgttgttgtttttttggcagccatattaccaacctacactaagtttacatggcattctgacagtttacaatcatctgtttttaagttattagtattttcttctaacaacttgaagctaattattttccctttactgtactcttaccaatctattcttaggcaaaagatggaaaaacaggaagaggcatctcagtgatgtgactctctacccctcacccctgcgtgccacacattccgccaaactgtgcctccctcactcatgatcctgtctggtgtggctttgatcactcacagctgcatgagatacattccatttgaatattcgctcatttcttccctccaaataatggaagtgtcagctttctttgtccccagcccccaccaaagtgtgacattttgaatgtgaaatgcaccccatcccatgtgtttgaacgtttagtctccagcagctggtgtttcagagaggaagtctagcaatagaagtgggtatctgggggcctataacgagagcaaagccgatccatagtccgtaaggttaagatgtctttttatttagataaacaccagccaaacacaagccagagcagtgaggccagggagaaggggcaggagatgaagaagagggggctcccaggtgcccatggtcccttaagagtccctctggcgtcatcctgaccccaccttgaccacgcctgtcaggcacacctgtaaccagtttaggaggtgtggatatggtgtctccctacaattccccttttagtctaaaagaggattaaaacttaatagtgtaaaatatccaaaattaacaatcataaaggtgaaatacaagaagatacaataatctgctattgcacatcctgactatgtctatttcagctaaaccctgaagtcatctgaaagcggtgtccaacctgaacacctccttctaatcccaaccctaaacaataggaaagttattccaaactccatttacactaccctaatagacaatactggggaacaggggtgtaccatcctccaagttacttcctgttgaaatggggcaatggtagccttgtgcggtcctatgaggagaaatgttagtacagggaaagtctctaacagattatatccagtccatgttagatgggatttgcttgattaaagatctaggttgaaatcctcaacttgattgaagtcagttcttgaaactctagtcggagtgtcagctgaaatggagcaagttggatccaatgcagtctaggaggtatggcccaattccttttccagagcatccagggattgctgtcaggcagtcttcattggctgtgtgggactcaagcataagtgttagcagagaaatgtttgcttgtatatgtaagtatgctggaaaaggcaatcatggaaaagtaatgattgtgagacagtgtacaccttgaaggaaagagccaagaaagacaaagacagtcagtccccaaattcctctctcattctgcattacatcaattggcttcttgatataatacagagactctaaagtttagttaaccaacatgcttggattttaggggaggaaagccaaatccacctctaaatccagcattgatttacttgaatagggacgaggaaatgaagagaaatagagttattcgagagacagctgtaaagtttaccatatggcacattccttttgtttgatggttatagctaccttctcttcttaagtatctacccatgtagcattcttggacttttggagatgagttttcctgtgaaaatagaaacaaaaacttccctttcctttgggaggtttctatttagttaatgagatatagctcagtaaagacctgttagtcgtccttgttgagagggttgtcttcttcaatttgaatcttgatcaactttgatggtatccaaagttttacttctcctgtggaaacaaatgcaaaacccctaccccaacgtaacacatgtactggcttccatacagaggtcagtatatctttgaagtacactggttgattcagttcagcagttttttttgtatcccagtgtctttctgcagctgtttgtcctttgtcattggcattaagaaactttagtgttaataaagcattatgcaacctatgtttggggggttttgacttaccagcttgtctatggagcatctccttaagtgtcctgttagatctctcaacgactgcttgtcctgtaggattgtgtggtataccggtgacatgctttatgttatagcatttgaagaactgttccatttttgtggagacatatgctggagcattgtcagtttttatctgtgcaggtatacccataactgccatcacctctagcaggtgtgtaataacagaatcagtgtgtaataacagaatcagatttttcagagttgagagtagtagcccattggaaacctgagaatgtgtcaatagtatgatgcatatatttcaaatttccaagttctgtaaaatgaaagacatccatctgccagatctcattcctccgaatgcctttaggatnnnnnnnnnnnnnnnnnnnnnnnnnnnnnnnnnnnnnnnnnnnnnnnnnnnnnnnnnnnnnnnnnnnnnnnnnnnnnnnnnnnnnnnnnnnnnnnnnnnnnngatggagaagtcctttttcaaacctttgctatttacatgatgtttcttatgaaattcagaggcttctagcacacttccaattaataaacaatcaatctcatcatttccttgtgctagtgacctggcagacctgtatgggatctgatatgtataatgtatataggattacttctgtttctgattgtttcctgtaattgtaaaaacaaagaggttaattccgtattatcaggaacaaattctgcagtctctatgtgtaagacgactctctgcatattggaaatcagtaactatgttaagaggttctgtaaaatccataagcaccatgagaatggcatataattctgccttctgtacagatgtatatggacgttgaactactttacttactgttttataaccagccttacctgatttgttagcatcactgtagaaggtaagaactccagaaatgggaatttgtcttacaatatgtggaagaatccagactgtcttttttatgaatttagttctgtcagttttgggatagttgttgctaatcgttcccaaaaaatcagtaagagctatttgccaatattcattatccttccnnnnnnnnnnnnnnnnnnnnnnnnnnnnnnnnnnnnnnnnnnnnnnnnnnnnnnnnnnnnnnnnnnnnnnnnnnnnnnnnnnnnnnnnnnnnnnnnnnnnnnnnnnnnnnnnnnnnnnnnnnnnnnnnnnnnnnnnnnnnnnnnnnnnnnnnnnnnnnnnnnnnnnnnnnnnnnnnnnnntatatatgtctttaactttttattctgtttatgtagcagaaatacacactccaatatagtgtcttccctctgcatcagaatcccagaagggtatcctctggatggcaagataaccagaatgcagtctaaatcaaggtttatctgatctacatgcacatccaatattctattttctacccattgtagctctttttctgcctcggcagataatattcgtggactgtttaggtccttatcacctttaagagccatttttaaatgttttaagtcatgaccttctaccccaataatcgtctgtaattgagaaatttctcctagcagcttctgaagactattaagagtttgataacagtcccttttaatttgtaccttctgtggcctgattctttgtaaatctctatcttataacctaaacagttaattgaatctcttctttgtatcttttctagggcaatctgtaaccctcatctaggcagaacttccatcaccatatcaaacatatgtttcagagtttctttattggaatctgataaaagaacataattcatataatgataaacgagggactgtggaaattttttaccaattatttccaaaggttgttgtacaaagtgttgacataaagtaggactatttagcatcccctgaggtaaaaccttccagtgatatctccgaattggctgtgagttattaagagttggtacagtaaatgcaaatttctctctatcactttcttgtaatggtatagtgaaaaatgtctttcaggtcaatgactatgataggccatcttttaggtattaaagaaggcaatgacattccaggctgtagagagcccataggctgaattaccttatttatggctctcaggtctgtcaacattctccagttacctgacttttttttgataacaaatacaggataattccaaaggctggtagactcctctatgtgtccagcctctagctgttcctgtactaacttttctagagcctnnnnnnnnnnnnnnnnnnnnttttaatggcagggcctttggctcctctgaaggtctatcatttgtatttagtttctgtacagcctggatggttagtaaccatttcccatagcgtcttacctgatcctttctgctatcctctgcagtgattctctataattcatatctgacattggagggatgttaatttgagttttccattgctgtaagagatcatgaccccagagatttataggtatatttgacacataaggttttagtctccctttctgtccttctggtccaatgcagaccaccaagttaacactctgttgtactctagatagtgttccaatacccaaaattcgtacatttgcttccctaagtggccattcctttggccaggacttgtgggtaataatagtgacatccctgcctgtgtccactatcccgttaataattttatcattaatttgtacccgtaagtgaggtcgcttgtctttgattgagatctgccaaaatatgtgcttttcatattgtccagtcttatctgattctttatcactagccaaactaccatctatggcattgtcatctttcacaatagacaaaggactatctattcatcctgtgagagattgtcttctactgttactggaaatgactgaccctttttcgatgtgggggacttctggagtcccctttcagagtttcccaaccttaacgggttcccttacatgtccctggtggatctacactcattagtctagtgtctgcccttaccacatctcctacacaatccagaaggcagtggcctttctcgtgagggattgttagaatttctttgcttacaatttctccttaaatgtcccattctaccacagctgaaacatctattttcctgacacttccatggactcctggagagggctcttcctacctgaggcgctgattcattgtagcaatgaaccccggcctcttggtacctatgttgatccctgtaaggtgtttctccttcccaagcccttctgtcatcatctctgcgactcttaatctcctgctgccttttgaaacctcttgggatagcttctcctgcccagattccagcatcttgcccattatagtcaatgtgggcagtatgcaaaactcattcttctagtggagctgatctgatctttaaaggcaaaagtattcttttgcatattaggtttgcattgtcataagctaatgtatacacaatcgaatgtcttattgctggttctatttcttgtaagtctactgctctggtcaaccggtccaagaagtcctgaaatagttctgttggcccctgttctattttggtataagcttccagtcattcccctggctcacaaaccttatcccatgcatttagtgctgcttttctgcatagggatagcatatgatcgtcatattcagcctgaacctgtgggtcagcataaataccttctcccaggattttttctagaggcacatcaagactgtccctaatggcttggtgttcaagaagctttccttcttccctgattaatgccttccttccatttgacaagaattctcaaggacagttgacactagtccgtttgagctccacgttgggcgccagttataacaagagagagaagtcgatccatagtccgtaaagttatctttttatttagataaacaccagccaaacacaagccagagcagtgaggccagggagaaggggcaggagaagaagaagagggggctcccatgttccctcccacatcatcctgacctcaccttggccacaccttggcaggcgtggtcaggcacacctgtagccagcccttaggaggtgtggttacggtgtctccctgcagggcccagccttgccgttaatagactggtaggttttctatctcctctctgatttctagtccatcaagacatagacctatgttctggaaagccttctccaccatgatggattataaacctgaaacaatgagccaaacaaccccccttaagctgtgtttgctctgttactctgttgtgtgagcagaaaaacaaccgccatgcagagcctccctgatgttactcttaggttggttggttgtttctctttttcatccacaactgaatcaatttgtagccaatgagtgcttgacctagaaacaaaactaaagatgctgtcatctctccaatggctcctgtgaagagaggaaacaggactgggtaaatgctctaagccttaactgcttatttaaggaatggggtgcattgtggtcactgtgctcactcagcaaatatttactgagcatctgggatgtgccaagcaccctaagggacatttatacaagagtgaagatgaaattatatgtgcttaaaaggagcttgacctaactaacccctaggaacaacagtcatttttggaagccatgcacaaacgagcattgaagttacaaggaaagttatcactgtgcatggtgtggccaatgcttctgccatgaagactgagttccacaatcagaactaaggtataaactgaatgtttttaactacctcattgctgtatgtataaagattcctgggctggagagatggctcagaggttaagagcactggctgctcttccagaggtcctgagttcaattcccaggaaccacatggtggctcacaaccatccttaatgatatctggtgccctcttctggtgtgcagacatacatgcagacacaacttgtatacataataaataaattaactttttaaaaaagattcctaccctccaaagcacacatatgaacaaacttacggtttattgcactgtgtgttgctatgacaaaatgaacgacctgggtgttttataacaaagagagacctggttttgaagccagaggttcacgatctgaggctccatctatgtggctacaggagaggggaagtttgctgcatcctagcatgggagagaaccagaaagaaatcgatcgctgatacagaagaggctaagcatattctgatagggactaaagtgactaactcactccaggaggaaagcattaattcagtgacccaaccacctcccactaggctccacctcccactaggccccacctcccgataggctccacctcctgctaggtgccacctctcagcatcactgcactggagagcaagctgctggtacctgggtctctagaggacaaaccacatccaaactatagcacttgtatgtaaagatatctattaactacacagagcatcaggcacaggaaagcagtcttgatggggttgtattataattcagagacatcagatattttcacactaaaaaagtgttaaaatactgaagaaatacaaaaagcttacttaacaaggtttagcatttctgtgaataatattttacttacaaaaacatatatgttaattatttgtttccactatttatgcccaagtcaaatgaatgcttactgttttatccctgaaggtgtaaatttttacaattgatattattttggttaggcatccttaataagtatgtattatgacttctaaaattatggaacatttaaagctatagaaacaatcatactggcacctggggggggaatggaagaatcatgagttcaaagccaaacgctacatggtttgaaaacagttcaactatatcagaccctgtctcaaataagatgagagagagagagagagagagagagagagagagagagagagagagaaaggaatgtttaagttttccactctgtattttggttttattcacattttacacagtggccactgaaagcacactgttccttggcctgctcgttaaggacagtagctgttactctggacaataagaatgtatttacacagaccatgcttagcaggaaatggcagttgttgtcacatactgtcggttacaggttgctcatgacactctttgatgcgtttatctagtttttttttttaacaataaaaactcggagcaagaacttgaatgatcagagaagcagcagagaagccaccagtgacgtcctcttccttttaactccatccaaaaaaggccaccctctctaagccccaccctactacttcctgtctctctatttgtcctcagtcctccaaaatctctaagactaacattggtcagctagttgctagctacaccctccgattcaaagcaaattttattgacagtcttggaagcattagaatgctatcaaaatatcacatgaatttctttcttttttcaagtgtgtgtgtgtgtgtgtgtgtgtgtgtgtgtgtgtgtgtgcacgcccacagaggccagaaaatggggtcagatcccatgagctgccgtgtagatgctgggagctaaacccaggtcctctgtgggagcagccactgctctaaccactgagccatctcttcagcccctcacatgtgttcagagatagagatttaattctctcagtgttaagattaagtaatgctcttaacatggccaccaagagcaactctgttgctcatcacctgtgagtgtttcatattttcagaattgttttatattcgcagaactacactccagtagctaccatgaagaaagaggggaaaccctgactgtcatctgaaaatagggtagataacagaagatgattatgtgattggatctagaatttatttctacagtgacagttctcaaaacataaaattacactgcctcatttattagccatcccctggtgttaactgaaaagggggggggggcatctagtagactgcagctgcaaacttagaatactcacgcttgggattttcatcttttctttgagctaacaagggactttttttctttgaggttttttcaagacagggtttctctgtttagccctggctgtcctggaactcactctgtataccaggctggcctctaattcacagagatccaccagcctctgcttccagagtgctgagattaaaggcgtgggccaccaccacccagctacaacaaacgttatcaagttagactttttttttttttttttttttttttagcaaacatcattgttctctatctggtacaattccaaaggctacattgttagatttgatgtgatctacaggaagcttctagataaatctgtgacaatgtttttttaatttggcagatattctacaatgtcagcatcagcttacaacggaaggttttctaagtcttacttcctgtaccacttgactactccatatgaactggaaatgccttcttcaacagctcccttcacagttcaggcttcagacgcagtatgggaataggggctgtttctggaagtaatgaaagagctgatggtgaacttcatataactcaattctgtttaagaagtggctcactcaatagaaagcccataccatggcaactatagatatggtgtttatttctatacatgatttccaactaatattttaggttgtttcatacataaagaaagtaaaacctatgatcatgtagctgttttctctcagtgtttaccaagacacaaatgagttgaaaaaaatgggaacctctctctgggtgattcatgagatactgaaatagccacactcttctgtttaagctttgttatctctttttatttatattactgttttgttgtttttgttttggacccagttttcctattgattttgcaaatggaacactcccaaactggataacatctccacacctagattaatatcatttttttccatttttgacaaatagaaaaaaacgacaaggaaccatataaatgaggtgactcattcataaatcctaacctccaccctctcctctcactgttgcatcaaatgtagacctattgctgagcacagtaatcttcctgtgccagagattttgtttggggcaggaccagttaccaaagctcatcagtgtcttaaagtgataaatggaggcatctattacagctcactgtgaaatgttacattttgtcattagttaatctcttgctctgcctagtttataacttaaacttttccatgggtgtgtatacataagaaaacacaacacagttaccattgggtttacaaaaacatatatgttaattatttgtttccactatttatgcccaagtcaaatgaatgcttactgttttatccctggccacatagatcctgtctgtaataactctgcctaatttctgataacatacaaaaaatcatattggaatagaaaatagcgactcgccacagaaacacagaccgtcatccttactgagtatgtgttcccatcactccaatgaatcttgttagcgttcctattcatgtatatttacagagataacatactcatcaaagaaaattgaactcaggacctctgaaagagcagccagtgctcttaacctctgagccatctctccagccccaacttttctcgagttcaattcccagcaaccatatggtagctcacaaccatctgttatgagatctggtggcctcttctggaccgcagaacactgtgtatgtagtaaataaatctttaaagaaagttattaccataatctcaaggcttatgagagaggaataagattgtgataccgtagatgtacagacatgctgctgttcatgtgttgcttgcagtacatgtgggagcaggtgcaagccatgacacacgtgtggaggtcagcagaccttcgatcatgtcctagtttgctgtttgtggttgtgaaaaacaccacaaccaaaggttttttgtttttgtttttgtttttgtttgtttgtttggcctacacttccagagcatagtcaatcctgcagagaagtcaaagaactcacccgggaaccgaagcagaaaccacggaggaagacagaccacagcctcactccctctttcacttgcgcatgctcagctagctccctctaacggaccagcctgcctgcctaggaacagtgccacccacagtgggctgggccctcctacactaatgagcaatcaaaacaagttcttacaaacatgcccacagcaatctgattgatgttccttttccccaagtgactggtgtgtattgagttcataataataactaactggtacacacagtgtaggattcaggggctgaactcaggtcactaggcttgataacaatcaccttcacacactcagccatgtcgccagcctggaaatgccatccctggctgtaacattcatcctcacaccaacactgcagtttgcacatggtttgtcccccgtggacttggtttgtagttacataccccgtacagcagtgctcccatgtgaggtttgggttgtggagaccacaccctcctgaagaggtttgtgtagttcccacaggcgtggattggttatctcaaagagtaggaatggacacctgatctctttcattccctaattttcagtgtgccttctcatgctcttatttatcatggtgtctgaagccgcagaggttctctccagcagccacccaaccttagctttgtgcctctagaaccttgaatttaacagccctcattttctttaagggttacccactctcaggtgttctaattgaaatagaaatggactaagatgaccagttagaaagaaaacgatctactaattaatgcaacatgaactctcttttttgaaaagtatgtatgtatgtatgtatgtatgtatgtatgtatgtatgtatgtatgtatatgtgggtttgttcatgtgtctgcaaagtccagaagagggtaccagatccccttatgtcacagtctgctcctagataacctttcatcttagtgggaaacttgttaggacacaggatgcgcttaaggaaagtgaaacattgtatcctgcagggaagttcatttagcttagaaagcaaacaactcagaagtttcaggaagttcctaaaacagaccagattcactaggcccctccctccccatgtgtgtgagcagtaagaactcctgagagatattcttagaccagtccaccttcctggaagaggcatgtgccaactgagctgcatggaaaaaaaactctccagctattgagctgtctttgggctgtgcagtacactccatgttcccagcttgtgtgagctgttacccacaatgggataggctttgctgatgcagctatctttgagtcatttcttctcctgtaactccttactcttacttctatatggaaccccagtgaactcattggttcaccaagttggacttagtgatgtccttaccttgaactataactggtttcccatttgtagatatttgtttacgtttcctcaggaacagtgtcatatgaaacccctggaactggagtctcaggtgatttcgaactgtatgatgtggatgccgggaactgaatttgggtcctctgcgagcagtatgcacttggacctgctaagccgtctctccatcccctgcaacacggattgtaagactcagtttgagagatttctgcatggactgtgcaggattgtggaccttggcacggggcacagtaaggactgaacaggaggagagggaagcagctggagtttctgcctgcctccagtggttactgaagctgatctgggaagagctggagaccttgcctccagttggggtttttagcgtttgtagaggagataacctctccagcaatcccatgcttgagagacagcgggaaggaaatgggtgacctagtgcctgggtcatcttctcctttgttgcctagacaggaacagagtgctggtgacaagggtgagactgtgaaagtcatgcacagagaccaaggtggttcccagtgctcccagtgggcacatcttctccactcacaataaagggtacaatgacctcatcacccactaggccaggggccaaacagagaacagacccccacagaactgagaatcccatcctctcaaagccaccaggtcgcaagaccacatcctgtcaggtacaacctaaaagatcaaacctcttaccccaaaagactcggtgcttaaaaatctggtaatacaccaaacctctacctgggaagaactcaactcagctgctgccagtgagtcagaagacagaacctcgtgaaaaccagagttgtttcagacagtccaggggcctacatctcctctgcacttctgtcttagtgcagtgcggttaggattgtcagctgggctcctggtagacagagccatcgggcacacctgtaaggaattggccagttttaggttgaaatgcatgaggaggacggtcctggttgtgttatttcatgtggggaagacttgtttttattgtgagtggcacctttccctgagcagggaccctgggacatatgagggtagaagccctcggagctcactggtgtgcctgagctcattgctttttctgactgtgcatgtgatgtgatcagctcccttcagcacctgtggctataatttccccaatgtcatggactttttattcacattttacacagtggccactgaaagcacactgttccttggcctgctcgttaaggacagtagctgttactctggacaaaatattttatcacaacaacaggaagagaaactgagacaataaaggtatgggtgacctaagaggggacatggcatcttctctgctggctcagcaggtgctgctattaccttaatctccagcagactccctgattctctccaggaagcaatcacttccttttgtgaattttctcagtaggtgagctctcaaagttgtttcttttatttggttggtttgtttttattttgtttttttaagacagggtttctctgtgtagccctggatgtcctggaactcactctgtagaccaggctgccctcaaactcagacatccatctgcctctgcctccccagtgctgggattaaaggcgtgtgccacagctgcccagcttcaaaatggtttctaattggctgttgtggcccacacctgtaatcccagcactggagaggcaaatcaagaagactgccaccaggccagttagatattaaatgggtaaaggtatataccatcatgcctgatgacccaagttctgggatccacatggtggaatgggacaaccaaacccacaaattgtcctctgatctcacaccccacacacatgcaaataaataaaagtaacttgttaaaaaagattaagattgctacaggttcaaggccaccctgtcttacatagtgagtttgcaaatagccagggttgcagagcaagactctgtctcaaagagcaaaagcaaagtgttctgggtatcaacaccaggaggtcagaggtgtgaactgttggcctcagcccaaactgtagtagaaactgaacagtggggcccagaaacctgtttttgacaaattgttcaagtacttggatgcatgctgaagtttgagagcccctgatgtcccacttgtgcctcttgtaggagacctgccatgtgcattgtcatcttgtccatatatacatacaaactatatgtatgtatgtatacacacacacacacacacacacacacacttaagacagggtctcattctgtagccctggctgtcctggaactcactctgtagatcaggctggcctccaactcatagttccacctgcctctgcctcctgagtactgggctcaaaggtatactctaccatgcccaggggtctgtttcatttcaacattatggcttgagttctgctgttatacagctggactattccatgtcacagatgtgtccctgctgtacaccctggcagatccctgagacatccctctccattccctgtggcttggcctcctggctcactacaatgcttccagcacttcctgacaaggcataatactttcaattcccatatgcaagggatagtcctcatggcccagccccttactcaacctcagctcccctccctacctcagcctctcaccctcagcacagccctcatgtcagcttcccacagcttccttggtgtagggtaaaagggcagccaaaggaaccccactctggacctgacaccagagccaactctgcctctgaccaactgaaacaccctgagcaggaaaccaaccaatccctgatcaccttgactctgaacccagaacccagagccagtgaaagaaacacacccaggatctgaaccctgaaccagtgaggaacactttatccttgggcccagaaccaaagaaaggcaccctggctttgaaaccagtgccaaagaaacacactttgttcctagaatcagagccagtgaaagacataagccctggccctaaaactacagccaaacggctaaaaagggccagtgaaagaaacacagtttgccctgaaatcagagccagaactgaccctgacccactaaactaaccaatccctgagcagaaaaacctctccctgggaaaactctacccctaagaagccctatataagcccgtctgcctgttcagttgctggctctcctttctaccttggcagaggcagccactctccaggactcctccttcccaaataaatctcttgttcaaaatttgagtcttgggtggtgattttcatttgttggtacagaatagaagaaacttgctgggatattcccttagggggctgagcaaatatgtagcagaaaagtaacaacttttaccggagccataggagaatgatacatttcttgggggggggggttctcctttagcagctgaagaaggagttcttaactctgctaggacatttgtcttcgcttagagctcatctgtagtggctctctctaggagagaagcaggattgctaatatcctgtgagcagacccagcttcgggtagtcaggacacacctttccctctagggctaagctgtcctgttgcagcgctagccccagagctgtcctattgtggctctaggtagcctggcttccagacaagtcaggacaccttttcagccccagagctgtaaccctcacacttgttacattttggtcctcacattcacttatacttggtgcctgcctcctacaccatctctttctacttgtgcattctgattctgcttcccactgactgaccacgagttacaaggtgtccgcctttcccaagtcccggcttctctagtgagactggagccagtcaccacagtcacatcctttgctctgtctccattattcttatggaaaactcaaaccctggtgaaagccaattctcctctgccatagctgcatccctgactggtcttacaggaggaaatggggaagccacactgaccagtcaccctctcagctcagagctacagaattcagagtatggcactaatccatcacctcacactgtcttcctctcctccccaaaggcaaaggcatcctttccaggccttattctcattctggccataaccttgctcatgaggaaaatagaagcaatcagagcaattcttcgaatgtctgcctgtgtgagatgggctgacctggttatgctgtgcctggcttgcattctgttaggaacacatctccccagggagtctcctggaaagatctacatgtacacatttgcagtccctacttttctcctattctttcttgaaacttttgctttgcctctgcccacattgttgaaccaaaacggctctttgtgaggtcccctgtgaccttcaggggctcatgctccccaatcccattttcatgttaccccacccaccagcagtgtttgttggcatagtgggtggcttccttcttgttgccttttacatccctagcgtctaaacagtaaagtgtctgaggatgcagccttgagtgtcaaccctcactcacaagttttcagcttgagccccagagtctgtgtcacactgcctggacatccacacaggtacaacagacaccttctggcctgtggccggcagcacatacacaagatggtcccagctgtgtaggagggatcccagaagaagcagaaatgaggcaggagtactggtgaggtcacatagagctcactgtccctcaggaaacccattcacaggtccccgtggatccggaagccatagacagcgatgaatgccatagatacaatagtgttttccctcagtataaatgcttgcagtgaaatgtagagcaatgacactgtactgtcatcaaagtgacgtgaccatgtccatctatgtatcccattcacccttctccatatgatgataatacagggcctacatgaggaggcagagtgaagtgtaggaggcaggcactatgatatggtgttaggttactatgtaactcttagcagaacacagtccttgtgataacttagatggctactaagtgactaaagggaaggtagggtctattgcatagatacattggacaaagggatcatttatgcctgggcaggaaggagcaggacaaggtgggagaattcatcatgctgtttgttattggattataattaaacatttaggcattgtttatttctagaatttttctacttaatatttgtggggctgcagttacgggttggaaactaaaactgtgggaagtggtactctagataagagtgggcaggagaccacagatacgtctacaatataactcaggcacgtgaggctccagatcactgtgaaagaagggtgtagggattgtaagagccagagggacagggaggtcgaggggactgtttcctaagaatgtcagaagctacacccataacgtcttgccaacatagctgcctaaacatgagtcgaacaagacaacaatagacgtgctaacatggatagggagagcccggcaggcctcaaaccctacacccagaactatgggtaactaaggaatgttctgagtgggagaaatagtgttcccagtgaaaagctcaccaactgattattcatcatcaaatggtcaatggaaatatgtacatacaagtagcattatacagactgagcaggttgtagttgtgtatttgtgttaagttgtgttagctgggtggtggtggcacgcctttaatcctagcacttgggaggcagaggcaggtggatctctgtgagttccagaccagcctggtctacaagagctatttccaggacagcctccaaagccacagagaaacccagcctggaaaaaccaatatatatgttgttacattatacatatatgtatacacatatgtagacatacataaatatgtatgtgtatgtgacaacagttcttgaaaaagaggccatgaacttgacagcagggagggcttggaaagatgaggtggaaaggggaaatgatgtgattatattataatctcaaaaaataaaattaataatttaaaaataaatatatggaagacagaatgggcctgtgagagagatagagagagagcaatgaactgtgttgaggacatgctaggtgtgagttatgaactggctgtccaacagaaaattagccttaaaagccatggatttgaagatggaattagaatacacaggggtacaataaagagatccaagtagggccatggagatgggctcagtagcagaggcctgagaaacactgatatctatagagacccagggaacgagggcagtatagaggagaggaagggagtgactaaggaggaatccccggaagtggaaggaaagagatgtcatgaagtgcatgtctcttccctgaaactgacctctcttcattctcaccaacccacagcttcctcccacgcccaggagaggccaggcctgccgttaaagccaaggggtgagcccacctcatccaccagtaagagcaacacatatttgaagccaatgaggcaaaggtggctttggcttgctgctgcttctctctgatctctcagcattttcctctatatctgactccgggtttttattatttagaccaattaagaattccatttacaacctctagtctaaaccatacctgagttcagaagtgacatcatgatctcatgatacagctcacagagtacttccaaggacatcccccaaacagacttcagaataagacatcaggatacatcttcccaagatgacaaccttaaataaatgcgtttggctatttaaaaaaaaaaaatagtgtgtgaggaactactgttgtgtaggtaagaaacagagttgttgcaaactctgaaggtgggggtgagataatatggacacagacatgatccttggctgggagcagggagagagagagagagagagagagagagagagagagagagaggagtctcacctcagttttgaaaagtgacttgaaatgaggtgtttggaagttgctaatgtgtttcactagagtggttttgctgagatcaaggagagcgctaaagtacccagaaaacaaacgatggttctggcgtccaacgagagggttactcttctcattgtcgaccagagagttgaaaagcaccagcttacagcgaatgtatctgggctcacggtttgaggagctagagtccactatgtggagaagcgggtggcagtgagtcccgccagacagacagcaagctgagagagcccgatgctgccacgagtcttgatttctcccttgtgttcagttctcatctccagacctcctcagtgagaccaccctggaaacaccaacagacgagtctcctattctgggtgatttgaagcctcgtcacgttgacaatagcggctgaccgttacagtaggctacctccttcacggaaggagaagataaacactgggtacagacagcacaggcatgtccgtggggctctacagggagatgagggaacacaggctgctgccctttttaatctccataaaccaagatgagggagagacagagagtcagaggcacagacagaagacagcgattatgtaggggactaagacaggaagataaaagttcaagaaccacatgggctacaaggtgcattttgggccacctgggcagcttagtgagatcctgcttctaaattgaaatacagaaaggggcggagctacaggccggtggtagtggactgaggccctgcatttaatccccagggccacagaaaggaggaagaagcaagagaagggctaaatagaggaaatatgcaaagtaactgcggagactgagagagccaaacacagcagaaaacccttttgtgagcagacaccagtggatcaagcgctttcttcagaaagcagcatgtgctgagggagaggaggggtactaattaactggtccgagcatcaaatactaggctcatgttcactcagaataaatggatctgcatagtgtaggtgtgttacagaaaccccacactgtaagtataaactaaacgtaaagttttatcttgaaatgacaagatgaaatttattaccctgaaataaataggtacctattgcctttggtggaaacaataaggaaaaaattaatcnnnnnnnnnnnnnncaggaattctgctaattgtcacttcagtgacaccatttcctttctttgaaatccgtctggacgtgatcacggggcaaggaggcctttgcagacccaaagtacacaagccagttaggagacaaacagaggaaatgaaccctccataaatctgtcagccagggggagcccgttcctgcccttacaaaggccttatctgccccccggggtgctgttcctcccagcttcctcaagccagtggccagaaccactgagtgtgaggagagaggtgggcacagcttccaactgttgtgacttcacataaaccctcagaactccttgtaccaaagtctctggtggcagcgaattcagtagctcccgagggcaccacacagtggatagctcttccttcctcagacttagcctttatgctgtcccttaatgagggaagagagttccataccgaatttcctccttctgaagtccttcctaagggtttgattgcatacatgtctgattacattggagagtgtcactccagagacataacacagttatttggggacacccagataatcaccatttggactactgtattttggtaacagtatgcctactgttgacatacaatcggtgtatttagtaggtgccgtcaaagcaatctttcattcaccttgttaacgtaccagtgacaccctcacccttggcaatagcctcctgctgccagctccctgtaacaggctgaacaatggttccccgaagatgtgcgtgtcctaagccctagagaggtgttacactgttagaaagggctttgtagacacagtcaagggtcttgagaagggaacactggattagctgagggagttcacagtaatcgtgagagttctcagaaggaggcatccaatctgacggcaaaagcagagctcaggaaccagggcaaggactgggagaagcttctagaagctgagaaagacaaaacaaatgtattttcccaaaaggaccgtagccctggcatttcgtctagcctttagacatccagaagtgggaaagaagaaatgtgtgtgttatgggatattggtttgcactgacaatccaagatggacaatacagttaaaacttgaatcaaggggcggagtccacaactggatgaccagaattagccatagagattttggaggtccagatagagaggtacaggaagagataacatagggagaggcttaggaagacttttttttttttttttccaatctaggaagaaaaggaaaagtcagcccatggtttctctgcttctctcttgatctataaggtttgcaccccaatatctgactccagagttcttactgataaaagaatcattcatattaacacatattgcatgtccttttgaatcactacagtcccaataatttgttagaacaaaaatagggaacaagttactctatttagtttaataaacatcctgttcatgtatatcatagctgaacccaatgatacagtctgccctttgcctctgcaagttctaccaaccacatgtgaaatattaagaaaagaagaaaaagaaaggaaggaagagaaagagagagagagagagagagagagagagagagagagagagagagagaagaaaacatgtgtaaaatcaggcatggttacaatcccagtgaaggatgaattatgtgtctgtgaatgtaaagccagactggaataaatagaagaccttattttaaaaagctgggtggtggtggttcacatctttaatcccagaacttgggaagcagatgcaggtggatctctgtgagttcgagaccagcctggtctacagagtgagttccaggacaggctccaaagccacacagagaaaccttgtcttgaaacacacacacacacacacacacacacacacacacacaccaaaacccagagtgattgttaacgctgagattcagcaatggctgtgttctatctttttaaattacattaaaagtaaacttattctcactgtcttctcctaaagatgctcttagaatactagtacacagatacatgatgaagacagcagccaccaccaagatggtgtctagatactttcttaatcagcttttcatttctgccttgtaatatttttcttggagcaaatgttttaaatgttggtgatttggagctttatgttttttgagacaggattttttgctttataacccaatctgggctcaaacaataatcctcttgtctcagtctccaaaagtactgggaattcaggcatgcattaccaatgctttatgtcagcaacattaccattaccacgcactgaaggtctttaaaatattatccatttattgtgtgttgggagacaggtcctggcaaatgtgcagaagcctgggaacaacttttaagagtctgttctttccttccatatgtgggatcctggagatcaaacttaagtcattagacttagagttgagcactttaccccaagtcatcttcccaggctaagcattgagttttggtaaagctaattgtcaaagcttctcttccatgacatgtccgtgcactgtcttacttccttccagtaaccaagcttcaaccaaaggcttctttctggcaacactgatggcttgtccagatccaggcagctgtgaactaggctgggcactactacagttaaagaaaaaaatgttaaaaaaatataaatacatattcatttgtaatcttaacagttttctcaatttgtccccttagtggcattttgacacccagaaagacatggagcatcaaaaacaaccaatgatttgaccaagattccattggtaaacaacgaattaaccatattttcttctaaatctttgtttgtttgtttgtttgtttgttttctgagacagggtttctctgtggctttggagcctatcctggaactctttcttgtagaccaggctggtctcgaactcacagagatccgcctgcctctgcctcccaagtgctgggacctgaaggcgtgcgccaccaacgcgaggctttcttctaaatcttatcaatggaaacatcacttaggttgagttagaaaccacttttttaaagatgaaaaaaaaactgtcagtctctctccgttggtagattataaagtcagtttactgaggctggaccaccatctctaagaaaatgaagaacagacttttaatgcccgctgcacatagcaaaggaaagggctcttctgtgacattctgtgtacacgtatgtgcatagggttacagtccaggatgcttctgtggagtgtgttgcagagcgattccgtcatgagggaatgtcaccaggtatgctcagcaactaagacgtctgtggtgtcaccaagtgatgtgatatcatcctgcacacagtctctagttgaccaagacctctactcacacatgagtgtggatgtgttaccagctgcaagagaagtctgtttctcttcctggttgttgggagagacgttgggccccagcccccacgaggtctccttgagttgcttgtcagccaatcatcacaggtgcatcctgttttctagtcctggcttacagccccagccgtaccctgctggcatcaaaaacatgagctcttatacctggggtgtataaggccgctccctccctgcaaaaaagacacacatagcacaagctgccagacggctctgcctttcattaaatctccaggctttcgcctgatgctccgacttagtcgtgttgcaggcaccacaagtggacactccgttagaccaagtcgtggcgcaggagccacacctggtgatggcgaactcacacgcgctgttagtgggagtctccataaaacacactcaaggaagcgggacgcccacatactcctgccaccctaacaaacagtgggtgtataaccagagaagacacaaacagaacgtcagagaaatccgtgcttccagggctattgctccctgaacgccacggcggagacgtggaatcaacacaaagactgtcaatggagaagatgcggtccgtgtatgtgcaccacggagtgacaccaagctatgaagaaaatgagactctgtcattcggagcgacaaaggtggaactccgggcagtaaacatcaagtgagctaagtcagggcggaaaaccgagcgcacgtatgaggatgctaaaggctgatgtggttgaaacacagagtaggacagcagttatcgtaggctggaagggtgtgaagaaggaagagaggatgggcggacggtgggtatagatgcagttagagaggaggcaacacataggaaggtagagaacacattttccatgtatgtatctatggtttcatctgttttcgtgtgtgggtgcatatgtgtgtgtattttggggtgggtaagtcagagtcaacctcttgtgtcatttagttgtcatctacattttggggggacaacatctctcatgagtctggaacttcctgatgaagctaggccagctggccagcaaacccagggacctacctgtctctgcctccttggcactggaattacaacctgcaccaccaatgcctgatgtctttatgtgggttctaggtcctcatgcttgtaaagcaacactcatgactcatctccccatatggcctctttttctttaattaataatttattttgtaggttttcaagacagggtttctctgtgtagccctggttggcctggaacttgctctgtagaccaggctggcctcaaactcacggagattcacttgcctctctctctcttgaatgctgggactaaaggcgtgcgccaccacggacatgctatttatgtttttgagtcaaggtctcatatagcccagactagcctggaattcaccatgtactatgacctcttaaacctaaacctcaactgcctcagtgctgagattacaaactactctaggctacaataaatgttattaataaaaagcctaaaattactaatttataaaaaaatgtcccattagggcaattgtgccctatgtctgtgacaaataacggtactcccaataacagaatctggaagagaaactaaagatgtggtgggaaggctcagcccaggccctagcacacagcttgactgtgagttgaagcactcaccgagccttggcagctggggctgccaggtccctcactcattatttggtagcttgatacattatatggtgatctgatacattatttggtgatctgatatatggtgatctattacattatatggtgatctattacattatatggtcatctgatacattatatggtgtatctggcacctttttgtttttttaaccactaagccacatgaaaattgtgttattttccttcctctgtgcttagtctgccttgttgtggctcctggcttccactcagcctcacacttgttctttgtgggaactgttgtcagattaaggtttaaagtgtgctcagtaagcatgactcgattaattacactaattataccaagcaatacttggttataagtcaagtcgtgagccctaagtggtgccattagaatgccacatctttgacgtggaaacagcttgtctgaatattttatttctcctgactgaggtctgtgtttctagacagtcaccttttgttccatctctgctgcctcctggtgatctggagctccacacttagtctccatggactggctattctgtttttgagccctgtgctgagccctgtgtggataacaagcttttaccacccagaatgaatcccttgaccacaggccaaaaagaaacaggaaggagggggggggctctgccccacctgccaccagcccctcagtgcagcctttggactgtcccatcaggcttaccgggctctggttatcccatctccttgacttgcccttcggcctatgggtgggatgagctgcccactgctggtggttttctggcccttccccgtctaggacaggtgtgtttaaagctgcctacactgcaaacctccctctataagaggaagattaccatacacgggataggggtgtcgtaggttaattttacttgggagaaatcacttagagaaaccgataacccatgcttagcgcgctccaagcatccagtctcagctgctctccgagacccgacaggaaccccgaaagagacccttgcttcctctcctcaggcctatatcccacctttatcgcacctgtggccactcccaaatgggcgtggtcagtgccacaggtgcctagtaagacctctcccgcactttagcacatctcatggggctgtagtgagaattaaataaatgaaagggtcagcggaactcagatcaacagagggtgcaaactgagcaagatgggtgttctcatcgttacagctgctccaccggcatctcctgcttcacctgaaagataggcctgaggatggccggaatagtgatggccggacttctggaaagtcttagtgcccggaggcctcgtggccctccttccatgaagacacccacagacttggaaggaagctgtggatggccaccttcggtgggccaggcatggaatgaaagagatttggaattcagaaacccaacttccaattagctcaatttcttccaggttctaacttccaaattagaagaacttccaattctagcttcagatgatcctttagccaacaggccagtgtgcacgggagcataaagcacccaaatgcacttctgtacttcacagctggtcccaagccagcctgttgacgtccaggttctgaaggccaggtgtgagcctgaatgctgcgatgaacagatcttatcaaaaagagagccagctggtctggtgcatgctcacatttattatcctggtnnnnnnnnnnnnnnnnnnnnnnnnnnnnnnnnnnnnnnnnnnnnnnnnnnggaatggagccccctctgtctcaggggcataaaggacatagcagggacctaggggtgtgtgctgagagtggggccaccagggctctaggaacctaacaggactcagggctgctatggctcaacagtctgaactttgcatttactgtctgcaaagattatgtcagtgactgtcagagctgggtctagagcagcaggtctcaaccctcctaacaccacgaccctttaatgcagctcgtgttgtgatgacccccaaccatgaaattatttttgttgctacttcataactctcattttgcctttatgaatagtaatgtaaatatctgatacatagaatatctggtatgcaacccctgtgaaagggttgtcctaacccaggggctgagacccaccagtctagtgtcacaggctgttaacctagttcttcaggaagctgagtaaggatttaaggttcaaaattgcctgggagttcaagcctcgagaggagagcatactgagacccggtcttaagatgaaattttaaatgagctgggcatatagctcaatagtagagtgtttacccaccatgcaccagatctcactccccattcccagagctgcaaatatgacatttaattttaaaacatagtctgtccttagagttctcgtgagtgccaaataagggaaatctggagatttccatagcgtctgacttgtcccagggactcaagcttcttgtgctctttagcaacacccccattaccaagacccatcacagtacctaacgctcagctggtgagagtactacagatcaaagtcaatcaaagagaaacaggggtgtgaggaagctacaaataggtacttacagtgggtttcaaccaactcaatctcttcttttctcacaaaacccaaacccagaaaaaatgcaatgattacctaaagctcacacagagtgggtggggtgggtctgtgctcctgagcacggcaaaagagtttcaagatctaacttggagccaggcaccgtggctcatgcctgcaatcccagcttgggaagtagaggcaagaggaccagaaggctcaaggttatcctcacctacgtagtgagtttcaggccagcctgggttatgccagaccctgtctcaatcagtcaatcaataatcaaattctgaggtgagagggacagggattcaaactccagcatttcgagtccagagccctttgagcatggggcagccttattttacatagctcctttgttctcacctgtgaaggaaaagcgtggataatcatacacagttgtgaatggtaagtgagaccacacctgtcagttctccttattggtctacttccaacagaggcgggagggtttcttctggagagatggctcggtggttaaacacaccggttgttccttcggaggacctgggtttaatccccacccacttggtggctcacaaccctctttaactggagttccaggagatttgataccctcttcaggcatctgtgggctctggacaaacatatgacatatacacacgtatatacaaaataaaacttcacacagtcttagttaggtttctattgctggaagagacactatgtaactcttaaaaaggaaatcatttaatttcagtttcagaggtttagtccagtatcatctggtgagaagcaaggcgggaggcaggcagatgtggtgctgagctgagtcctcacatcttgattcacggcaacaggaagtggtctctctcactgggcatggcttgagtatatatgaaacctcaaagcccacctccacagtgacacacttcctccaacaaggccacacttcctaacagtgtcactccctttgagagccattttctttcaaaccaccacacaaacacataaaataaaaaaatcttactatttttttgcatttatttatttatttatttgttggggcataggtgggtgtaagtgtcatgcctcacttgtgaaggtcaaagggcaaaccatggcagtccattccctctgtccatctcctgaactcatgaatcaaactgacccaagagttctattctaacaggggctggagagatggctcagtggttaagagcattgactgctctcccagaggtcctgagttcaattcccagaaaccacatgttggctcacaaccatctgtaatgaaatctggtgccctcttctggtgtgcaagcatatatggaaaacactgtatatataataaataaatacaatcttaaaaaaaaaaaaagagttctaacagtaactgaaatagaactttcctcggaacaccggtggtctcatagtgatagtgcatcaggagagccacccttttaggagtggaaggtggtgctcttgtcatgtacatacatgactaaaggctctctgtcacgcaggacctgtttctacgcaaagctccttccccaaaagctaattgtggcctaaggaggctttgggcatgaacactgtttcatcagtaccctgggaattgtgaacccagggcgtatctatgatgattttatttagggtggatctgtaggtgagtgacagccatggtggaaccacacccacccaatgaccttctaggtctacatcaactttggctgtcatcttgccacagagggacaaacctggtgacaggaaagatgcagggtgggtagacacatggatgtcgtgcccggccactgcttctagttcatccccagcaaggtctgctgtgcccataggagctcagaaggtggaggcaggaggataatcacaaactcaaggcttgtcagggctacagagtgagtttaggatagcctaagcaactgagtgtggtgactgtttcaaaatgaaaagtaaaaccgggattggggcatagctccatgctagatggtagagtacttgcctaccacgtgtgtagccatgggttcaatccccagtgtggaagaaaagggagaaagagaggggaggagaaaggggagaattcatttccaaaaaaatttatggagaaggtagggagctagatcctcagcactagagacagggagggagggaagaaaggagggaaggagggattaacttcaccctaaaaaataaatgtactcacctaagaaatgaaaagtccctgcttagaataaaagcagtaagcccagggttctatattcagtcagagcagaacgttgagtctctcccctgtgtgacctgactataccctaatttctatttgttgacatttatgcataaaaatgtcaccgtgaaacccaggtctttgtattgtaaccaaaagaattaattgtaatgataataatagtttcctgtgttatggggctgtttttctttaatttactgattcttatatgtggtgttttgcctgcatgtatgcctgtgtaccgcgtgtgcctggtgcccacagaggccagaagagggcattggtcccctgaaactggaggaacagacagttgtcagctgccatgtgggtgctgggaattgaacccgggttctttggaaaggcaactgctttaatcccagcagccagaaactaggtggtggtacacacctttagtcccaggactctggattaagaggtagatggatttctgtgagtctaaagccatccagatctacacaagagtgaattagtctaaaagagaattagagctcacacctttaatcccaacattagggaagtatataaaacagaagcaaggtctcagagaagcattcactctctagccatgctgaggcgaaggttacagactgaggcttggtgaagaactcgtgtgtggatcaaccccttcagcacgagttaaaggggctggctgctttgcttttctgatattcagcttgaagtttgaaccccaatatcagtttttgggtctttttattttttcttgttacactgcatgtttcatttaacaagcaaggaaaaaattttagattttattctcaaatgccaccccaattacttctgttacagaattgatcaatagtctatgaagtaggatatttctcagtagtaatcactgctcaatatatatttgtcatagtccttctgtgtgcaccatgcccacagaggctcctgtgtatcccaggcaatgtgacctgaggatctccaccccagagagcagcaagctcaaactgggttagggcaaccttgaagccaatctctttgaagaagtgttgtaacttaaagcatttggggacaacagtggttgctcttttaagcaataaggtcaaataaacaagaaaaaggcttacttatgaaaacaggaaggctccatccagaaataaggagagggctgggggtgtggctcagggtaggcctttgtttagtccgtaaagtaccttgaatttgaccctaggcaaaggagggatggggagaaaagcaggaggatggactggggagaacagagggagggcagagaaagagagagaaggggaaaggagaaggaaagaggaaggcaggcaggcaggagggagcaaggtaaagagggagggagggacaggtaagaagggagggagagagggtggagggagggagaggaaggaaaggaatggactgagctgggagaggagagtaagcaatgccaactgcaagagaaagagtcagttaggtgaccaggctctacccacttccagctggcttgggataagtcaccatcagaaacaagatggtgtgtgtgtgtatgtatgtatgtatgtatgtatgtatgtatgtatgtatgtatgtatgtatgtatacacatatgctcgagcacgtgtatgaagatacaaactcaagggcctattctcatttgcaaacccaatgttacatggtcatctaaaggtcctgaggtatgcaactgttaaccctcagccagagtttccacgcttatttgaatacaaacaaaacacttcctgccagaccattaacaccctgccaaacaagtttctctccacccaagctaggaactgtagaaaatgctttgacattttctttcttttcttaaatttattaactttctgatgttgtaatatatttttcattttacttgtttattttaatgtaattcctaattaccaaaacattctctcactttgcttgtccctctgtccaattccttatttagggacaaaagaacctagaacccctctggagttactcactgaaccccaatacccatggatgtcactggcacccattaaactctaaagatgagcggcttctcctgcaggactatgtggtgggggaggggctgccttgtttcccagtctgtagaacgaataataaaaacccagagacagatattggggtcaagctgaagatcaaagaagcaaagtggtcatctgagagctctcaccacctctaccattgctcagacagaagggtgatccaccaaacctcagatttcatctccaaactgcactgccccccaccaaatcccagactgctcctgagacttcactgaactccttatactctctctaggtctgggattaaaggcgtaaactctgtttctcttttagactgattcactctcatgtagcccagggttgccttgaactcagagatccatctgcctctgtctcctgggattaaggtgtggccactgtccagcttctatggctgtggctagctttgcactctgatgtccaggcaagctttattagataataaacaatatatccctacaccagtctgtctccaccccttgcacacaggacacttttctatgtagctcccggcttcccccatactgcagggctgtccagcagcagtctgcagtgagtcaaagtgctgactgcttttgttttgtttgtgtggtgctaggcctcacccagtctagaagaaacagtgagctgtgtgacagataggaagtaggaggtgagagtgaggctttcctctggtgggtttttgttgttactgctcttgttttggttttaaagacaaggtctcacaatgaggccctggctcgcctagatcttgcaatgtagacccagtaggggtcaagttccatgggcaatacacaccctttatttagaactatttacagacacagacccatttgggttgtaaaaactgacctccttcagttaaactggatctgaattgtatggcagctcagtggtgaatcgattgcttagcattcaagagtctctgaggtcaaccctgagtacagagggaggggagggaggccagcagactattacataaatctctagaagtcacgtctaatccatggcctaccaaccacatgtgccccaatacttatgaatgcccaacacaaaactgttaacttatttaaaacattatgaggttttttttttttttttttttttgggggggggaatctttttttgtgaccaaatgcatagttctcaggcatgacaatatcacataaaataataaaggcagggaaacccctactagtctattaaaatatttaagctgaaaactttgctcaaagtagtaatattgttccacaaatgattggtgggacgtaagtcacaaattatggttccaagaatcccaaaccttggggctagagaaacgctcagcagtcaaaaaaaatgccccccccactgcccttcgagtcttgcaaaggacccaggtttgaacccagttcacacatgattaagcaactacaccatctttaaaggtcggacactgcaggcaaagagcaaggcatcttaaatagtaaaacatttatttttttcaagacagggtttctccgtgtagccttggaggtactggaactcacgctgtaggccaggctggcctcgaactcctatcgatccacctgcctgtttcccaatgctggaattaaaggtgtgtaccaccactaacccgagacactttttaaagtaaccaaacagaatgtttagaagtcaaaagttaaagtatgagtagacaggagtgatcacagaagaaagaaatatctacaccggaagagagaatttacaaatgggaagacagacacagaggaattctgaatatatcccatatagatgaaaatatgaatccaaagttgaaagagtgagagctagagccagcaagctggctcagggccaagtctgatgatcagagttcaatcctaaaacccactaggaggaaggagagatctgactcccacaaattgtcctctgaccttcacatgtgagcatacaaacacaaaacagtgaggtctaattatcattccagaacaaggtaatgacgtaaaggaataaggaagaaatagtattaacatgactgtgtgttagtcatgtttctattactggagtaaaatacctgaaaaaagcaatttaaaaggaggaatttccaagccgggtgttggtggcacacgcctttaatcccagcactcaggaggcagaggcaaactgatctctgtgagttcgaggccaggctaggctctaaagctacacagagaaaccccgtctcgaaaaacaaacaaacaaacaaacaaaaaaaggggggggggaatttcctgttaaaagaaagcaagaagccaggcatggtggtacagttctgcagttctagcacttgggagcttgaacttaaataaatgcttctcaaaaacaaaacaacaaaggggagcaaatgagggagggaaaggtttcctacaaatcagaggtcctaggctttctttccagccccacaacttaaatgaacaaatagcaaacgttaaagtagatactttaaaaattcaaacatttaaagctgttactctcaagataaggacaacagaccagcttccaactcaccgtcttcctaccgtagcctcccaaatgctagcttacaagcctgtcccacattctggctcactgtactgccaaggttgctttgttcctgctcctgtcagtcctgactgtatagaaacagggtggttactgtgcttgagcaattgttacagtgcatacaaagggctcccaacgacagtggacaatgacaggaccactagagactctggagaaatccagtaaacacttcattccattgatgatcagtttgattctcttcgccttttcacagtagcccaggcatttggtaacttcattaactgtgcatgaaagtcccagttttcctgccagcgctcagtagtgccagctggaagcaaccattctagtcattatgcaacccttagatcctaggaattgtttgcatgatccaaggtcatacagacttttctttttctacttcttttatagccttgttttttgcagtttttagatgtatttgcccacaactcatgcatatatattactatatatctatatattactatgatcataatccctcccaattctcttctctcccctgctnnnnnnnnnnnnnnnnnnnnnnnnnnnnnnnntgctgaacggcttcttttccccatgtcccctccatgcacatgtgcccaactgcatgtaaacagaaggtggccagaagctgtcatctcctgccatgtcccacattatttttatttctaattttttgagacagcattctctaagtcgttttggctgtccttgaactgcctgcccagtaccgggattgaagacatgccaccacacccggctcccatgttattttttcagacatttcttactgaacctggagtttactgccgtttcagctgccatttccctgtgggtgctcactgcatactcagcttttatgtggatgctggggctcatacccagtttttcatgacactgcagccatttgccctgcccttcttcaagaaactttaaaaacagagataactgtcatttgcttttcttcctcaacctaaaattcagaacatgtcctctagaaagctgcctttagcttctaaaacaatctcaatgtatttgtgaaactaccgaaccagccagctgcccccacagcagcccatggtttataaagtgcccccactcgaagcactgcagggtctgttcttctctctgcattcctccatttagtgagcgtctccatcagaagactgtgtcctctgcttacaaggtttctggtctaggagttaacatgaagaagcctctgacagagttcagtcaatacaccagcaaggttcacagaaacacaaaataaaaggtgtaagtaacacacacagtacaagggactcagtgggaccactcgaatgcttttgagagccaaattcagcttgaacactatttgggaagatgttggcaaaagctgattactgtcaatgatgggatttttgttgtttttagacaggttctcacaatgtagcccagaacagactcaaactagtcatcctcctgcctcagattctccagtgctgggactaccaatgtgtgtcagccactgccaatactcaggacatcatggaagaggcgtctaagagctacagggcagagaggagtctggtgaaacatgcttttcttgtatagtcaccgcactcatcaactcccagcagctatgggtccacctctgccccgcccccacactctcactcacacacacacacacacacacacacacacacacacacacacacacacacagagtggaggggctggggcggtggtggtgcacgcctttaatcccagcacttgggagacagaagcaggtggatctctgtgagttcgagaccagcctggtctacaagagctagttccaggacaacctccaaagccacagagaaagcctgtctcaaaaaacaaaacaaaaacgaaatgaggcaggaagcccgtatgaccaaaagacattgtacacatgtgaggctgtcaaagataaaatactacttaaaatctttaaaaaacaaaacaaagggctggagagatggctcagcagttaagagcatcggctactcttgtagaagacctggatttggttcctgcactgcttaacagttcacaaccatctgtaattatagtttcagggtacctgatataacttctggcctctagggggcagcgagcaaacacagagcatacatacatacatgaggcaaaacacttgcatacactaaaatttagatcctttttaaaaaattcactaacaatagtgaaagcccgaggctcaaaacctagctctattactttccctttatagatcacctcagtgcactgattgtaaagacaaaatgaaatgtgtagtttgcacaacacctagcgtgcagctcactctgtgacaactccccagaacttcttcccaactgaagacaacctgagtggaaactgacactcattttgaatttggggagaagggtctgtttgcaataaacatctaaattgagtgttatatctggatgcattacagaatcttcagagatatgatttaggtaagatacactttgtcttctagcaaatacaaactgttgtagctgaaatgtgattctggattgtgtctacatgctgctgaagccgagatctgtcacctgggtaaccctgtctcaaaaaacaaaacaaaaaacagaaaagatgtagaaggatatcaaactgataaatgtaacgtcacagggactgcctgaaactccctcaagtgcagacaaaggcaaagcattaaagaacaaaccaagccagtagtctccttgggaaagtactccccacacatcacacagacagataagatccaatattgaatactacaaatctcactaaattctgatgagttttatacattgttacaactgagagtaattatctttttcataaagcaacactccaatactttgcatttcatacattttaatagttttatttggcaaagaggagcctaagaattttttttaaaaaacatttccagagggaacaccttttaccataaaataaattgtgatttgggaggacaaatctcaaatgtatatattttgactctgccaatcttagaattagtacaaaaaagataatttgttgaaattctttacaaatgtaaaaacaagtccaggcaacatagctatataatcttgctgtaaaagtacttatatcaaattctgcccaaaatatttttgcaatatactaaacttagtttctccagtcactcttcactgacggctggcttttccattttctgttgtctccatcctgaaaagtttagaaggggtaaaatgagatgttaaattaaaacattcactagaaatctgtatttttttttacctacttttacccattggaactaaaatctaacctattcacaacaggagagtgtgagcactttaagaaagggattgaagttcggggtcctccagtcagtccaacctcctcactgtacacatgagagaaagcagagcctgtgaagatgaggaggcctccctaagacccccctgtgaagatgaggaggcctccctaagaccccctgtgaagatgagggggcctccctaagaccccctgatccctacaccagtctgtctccaccccttgcacacaggacacttttctatgtagctcccggcttcccccatactgcagggctgtccagcctccctaagaccccctgtgaagataagggggcctccttaagaccccccactctcccatctcctccatttagtctaacagtcctacaaaaaaaattcctttaacaatatactgtaggaggatatctccttaaaactgattaaaataacgacatctgaaatttattctattctaacactttaacatagatcccatgtgtgattccccctgaaaacaatgctataagcagcagacactttcataattatgggcctttttatgagcaccaagggtctcacaggttaaggagaaagagattagctcataatagcagtttaaagaaaaactgctgaccacgagcaagcagtttgcatttcgggactaacaatcgacaaagcagtttccacaggaaattacacaaacccattttcctccttaaggtgttgatataactcagctctgttattgacagagttcagacgtccagcaaactcctggtgctttctggaattggcagtgttgattctgttactccacaaggataataaggacattggccctggtgttagagcagaaagagaaaaagttaaatgtcagacttaactctcacttcagttgttcactttacactattcaggcactgcaccacgccagaaaagtgcacagggcacttagaagaaccagccttgagggcagtgtatccaccaggcacccagctggcttgggaggatggagggggcgagtcctccccagaacacatcaaacaggcctaaggaacgaggctgatcacaacagacacaatgacttcggttgtaacacagaatgggggccatgaaggtgggagggggacatgtggggagagagcagcagcaactggggtatgattcagatacactttatacatgtatggaactgcaaaggacaaaaaagactatctcagtttctcattctaatccagtggtctatctgacacgtgaggtctataatttgtcagtggacactgatttaaatcctaacatttctaactctggcaacagcctgaggggcagatagatggagacagacttttctcttccaccatccagttccaaaataaccacacagaaacttattaattataagtgctcagccaacagctccagcttgttactagctaattcttacattttaaattaacccacatttcttatcttcgctctgctatgtggctcggtaccttttctcagtacagcaagttctcctctccacgtctcctcgtgattctgagactaatctaagttgaatgggagtggttcctgtgatgactccagcacaaagcaaggatgggtctatagtacagaactctgcatctctcttttctgttttccatggtttgtttcttctctttatatatcaaaacttattctagtctaaattttgttaacagaagcctcaacatacatatgaagtaatagaaactataagaaatacaccccatgttgggtgccatatgtagttagacttttctttcccaccggacagttctcaaataaccacacagacttaccataaattataagtgcccggccaatagctcaggcttgttacttgctaattcttgcattttaaattagtctgtatttgttactgtatgtgctgtctcctggctcacagctcgttacctcatcttctacaggtcttgcttctcctgctcctgctccagactccagcctccctcccagttctcagactggctctcccacctgacctcttcctgcctagctactgtgcagtcagctctttattggagcaatgagagcagcacaccctcacggtgcacaaaagggtcgtcccacagcaggcagacaccagaggaccatcaaggtgacctcggagtcccaactgcaaggaaaccggggaactgaagcgtcagtgtgtcccaagcctgctcctagcaagacttgccaacagacagcacgtgaggccgccctgctcttgtccaggacacacaggcacaggcgccagagagtgacctgagcccaggtgatctccaaggacactgaggcccagaaggacatcaggaacttgagtccaagtcccatccttttagacctagaattacttcaggaggaaattaagcttctcagcctataaataagatggaaagttttatggtaaaaatatggtttataacaatatctttacttaagctcggtcaggacccatcttagtttagcactaaatgagcatcaccacactcctcgctggataccaagagctgggtggagggacgacagcacacacctttcttctcacatatacaatctacagactttttatgtgtatgtacaaacatacatgaaagtggaaggcagtgacttgggagaagagggaaccgttgaggggagagcagggacaagacagcgctgtatgtagaagagaattatgaacaacacaccatgatgtatgggaatcaagtgtcagaatcaaacccctgactttgctcatgagtggggaaaatgtaatgacaaagggctgaggggagtctgtctccgtaagcagcacctggcacttcaggctcaagtagatttaagcttctagtttttctagtttacaattcctttcctacagacttcacacaaagcatttgttttcaaagccttcactatagagaatactgttactattcttcttttcctcctccttttttttttttaaagatttatttattatacacacagtttctgtctgcatatatccctgcgcaccagaagagggcactagatctcattgcacatggttgtgagccaccatgtgggtgctgggaattgaactcgggacctctggaagagcagctggtgctcttaacctctgagccatctctccagccccctcctcctttttctttttcttttttttttttaaatgttacaaatgtcttcccttccaaggctgtgaacggagtctcctgtctggtgtctagacatcaggagctctctcacagacagtgtcaagtgatactgcacacaagagctctgctgaaaactgcctggctccgggggctatcctcacctttagacttttccatgtgtggcgtctcatccatttcaacaaggggctttttgtttggtggttctggggaatcaggtgagtcctttataacctctgcttcggccaactcttctttccctcgttctaaaatacctttcaaccttgcagagacagataatgaagccaagtttaatttacaagtctgtaaattgcccagtaagtacactatctgtatatcagttttcataaaatatctgatctcacaaaagaatctaaaactcatataaaagaatttaatgagttcaacacaactttacttccctttatagcagtcacagttcagggattagtaagataaaaaggaaaactaaaccagacaggaatttaagttaatatttaaaagttagaaacaatgtaataaccaaaagacgtttcacattttaaaaacaaggaaaagaaatgtattcaaattacaaataagattatgacttattgccatgtgtggtgtggtctatgtaatggggaatgtatttaggtttcattacttgggagcctcactctaaagttatttttttcttcaggtaagatctcactatacaggcccggctgcctgaaactcatcgcacagaccaggctgacttcaagctcacaagtgctggggttaaaggccgtactccagcttttagtaggcttcttcagtaagataagcacgtctcagacatgcacaagtcgtatgctgaaggtcagttggggccacagtagtttttttccttttcctacagttgaaactgctgagacgccaagtgttccacctgtctggtagtgagtgaatggcttccagagctactctcaatgccctttctagagagcagtggtgacggcagcagatgtgggaactggtgtgtgtgagcagaggtctgctacaagttagcaactgtgaaggcagagcccatttgtttgttatacaggtatgtgtgtttggaattttctataatgccactacaatacttacctaactgtcttgcctgattggtagcaaggagatagaaggtgatacatttatgatatgtgttaacctttaaaactttttaattgggggtggggacaataaatgcacaatggcgtgtgtgaaggtcaaaggtgagagggcagcctacaggagtcagttctcacccagggcctcaaccattcttactgcacgagccatctgctggccacattctaacattttatgactctttatggtttttataactttaaccttgatgtcactaaggggaagcagtatgcagctctggaatgatgtcagaattaggactgtgagttcatctgctccaaagggcagcctgcacctaattcctgtaagattgtgccttccacactttgctgtgaccactcaactgtggcctgtctctaacataaggcagagcattcttttaggatgggatcttgggacaaatgcctaggcaaatcactcaacataaaattatacttttgaattttacaatagtcatagtgcacactggcatcaatcgtcataataatagccaggaactagttaggaaaaattaacacagtttttgccctaaagtaaaaagatgctgtgtctaataaaagtgcaggtacagatggacaagcctgcgttggatggactgggtgtgtgtgccacggcaaaggcgccagctaacagaaccagtcacctgtctgagtctggccgcggcttctccggcccatgctccttcgccgcctgctccgacttgtcctccctgtcctccctcttcctccctcgcttcttccgctcctcttcttcggggggtttgctccgacacgccatcagacactccaggaccctctgatgcttctcggagttgctgacatgggctctgacaagcgtttctaactcgttccacatgatgcggtactgctcgtctctggaggaaaggtcggacaacgcattctcagaaccgctccttgtgttcacacacgaaacgctaacggacaaggcgttttcagaaacgctccttgtgtttacatacgaaacgctaacggacaacgcattctcagaaccgctccttgtgttcacacacgaaacgctaacggacaaggcgttctcagaaacgctccttgtgttcacacacgaaacgctaacggacaaggcgttctcagaaccgctccttgtgtttacacatccaaacgctaaagctactgaccccacctgctacggcaaaggagacagaagtagagacatgtttatttccttttacccatagttaatggtggaattccaagttatattgaagcagtgcctactttcctatgtctccatcgtacctatactatatgtacacactcatccatcccctcagacaatgtgcacatggagaatcatctgacaaaataacacccattaagtaagcatgatgtgtgaagaaaacagcactaccttttagggccctttcctctggtaccaactgtagaaataggaagggggtcatttttcctttccatatcaaccaagttgtatatcgtcttttgacagtttagcacgtcttcttctgtcaaagactctttcacaataacactggctaatggaactacctgtaaggttaaaaaaacaacaggaagaaaagagaaagaaaatctgtcttgaaaaacaagcatcaaggcgttaaggacaaagttggtttaatgctaatggttcgaggaccacaggaaggggacccataactgctgcttctgccctgagtcactaattcttcagccacaacaaacacatgctttctttcttgcttgaggaatggcaccaattacaaacttttaaaaatttttctacaaatatatttctaaatacacactaatctagaaaagagcaaaacaagactcaccgcttgcatgttgaaaatggtggtttgtgaaataatcatgggccagtaacgagtgtgcttttctaactggtcctttgcacgttccagcgggatctctagacttgcatccattttatatctggggtctagaaaaggagttaacctgttttccctcataaattcaccaaaatcctaatgataaccagataagacacaattagaaactaatctagtgttgcagcacgggttacatctgacagtcatttccctcatgtcctctgtgactgtcagcacagccctctctctaacaggggccccgcctcactgctcaccctgcccccacttcattcctaggacttcactgctttctttcagatgtgcgtgcattaatcacagcacagtttgcttatgaaaaagctgctttgatagaacgtcaaaataatgagtgttaatctttgaataatgtaattataggtaaattagggtttttgtttggtgtttagatgtttgtatgttctcagttttctctaatagatactgattggcttttagtcccttaaaaataattacccaaaaaagcctaataattaaattataaaatacttggtggtttatcaagtgtagttatatacataaattaacatttaagttccaccatcatctcaaaaactagccatgaaatatcaatatatgcaaaggaaagcactagtttaatcttccctcttctctgtaactccagtgttgcagaacccagacaattcccagtcgctgaacgtatcatacagcagagaggacacacagtgatgtcagttatggaaacaacccacttctttgagacggccttgccgtaaccttaacatgtaccaaaaactcttgctaactgactcaaaacaaagtctacagataataaagctgtacaccagggctggagagacgctcagtggctcagagcactagctgctctttcagaagacccaggttagattttagcatccacaccatggctcacaactgtctttaactccagctccagagtacccaacagcctcttctggcccccaaaggtaccatgcatgcacaaagcgcacaaacatacaaacaggccaaacacacataaaataaacatgtttccaaagtctcactgtaatccggtagtctgtcactcttcctccacagccttcactgatggaaggcggatcttctagaatggatcgagagctgctgaggacatgcagaaagatctctcctccatggctgctaagcatgtggctgatgactttggaacctgactttctcggctgctccaacaacacagagcgacctgtcagaagcaagatgaagctgttggtaacaaaattcaaacagctcacatttacctagcacggctaggctagtgtatctacacattcccaacacttagcttctgtcagaatccttaaagtttacataattatatagtttcccaaaggtaattataatggcatatttgtatgctttactcaatctcaagttcacataaaaatttcctcatagaaacttaaaataaaattctcaggttattaatgctgcaagtatttgagggaaaggcacgatctcaatgccttctacagagtgactaccttgctagcatagttgtttttaagtttctacttcacatgccaaatgctactgaatttggactttacatattctgataatcaaactgtttaacaatgaaaagaaccttccaaaaaacgacatttttaaaactcaatagttccaaaacttaagattatcttgctaccagaagagctttgaaaatttaaatttagaagacagaagttaatagttgagctgtaaataaataaaatgaaccataaattttaggtctgggtaagaatcatatggtacgatactgaaaatataatatttagatacaatgaaggtgaagcattcaaagaaacctcagttcacatacagtatgtaattcagtgggcccaaggtgaaggtctgctattccagcttccaagagcgccaagtcagactttaaaaaccaaaacttcaataaaattcttaaaaccatgttgggaaaacttaagatataatagtctggaagtcataaagaaaatccttttttctgacccttagcaaaacttgttaaggctatttccaaatgtgtgagtttaaaacaattttggcaaatagatcagagtgacactgatgactccacttaatagtaattgcaattaagacactgaatattgaaaattaccattgagaagaaaattagtgaggcaggaagaaggtctactatttacatctactggtgaaattcgatatgctccagtgcaatagtgtagttctgaaatagaagaaaacactgatttgaaagaacgtaatgaaatagcctacagttcaaaacaacaaagtttgttctgtctatgtctgtctctcctctctccctctccttccaccaacaaaattccccaattagaaagagagagagcgagcgagccagagagctcttgtcctcctggccctgtctactcaccgatgctgttggtcctgggtgtgcaccacttcagggttaccgtctctttaaatggaccttctctactgctgccacctgagtgggtatcaccttcagaaaggtcacagaaacactaactttactaaagaggtcaccaccttcagagtgacaatttttaagttttcaaaataagcttaagctctggaagagagaggagctcaagnnnnnnnnnnnnnnnnnnnnnnnnnnnnnnnnnnnnnnnnnnnnnnnnnnnnnnnnnnnnnnnnnnnnnnnnnnnnnnnnnnnnnnnnnnnnnnnnnnnnnnnnnnnnnnnnnnnnnnnnnnnnnnnnnnnnnnnnnnnnnnnnnnnnggaaaaaagtccatgtagaggatagatataaactacaattaacatcaataattaatgtcccttcaaatttttcattttattgtttcattcaccaatttaattaatttaggttgctgcttcaatagccaataaaaaaagctttacaggcctcaaacaccgcaaccctctctccgcccacaccaataaatgctaagtatagacaatgctcagaagggtgaaaagtctaagatgacacgtaaaccccagtgtgcttctcagaggaccacgatgttctgagtgaaaacctgagaagacagcgcagcacctttgccctcatggaacctgcagggcgtagggcagacttgtcagccaaacagtggacaaatctgaggtcacagagttgacaaagtgttgaagaagaggctacagggcgctacgagagcctctctagacactgtgaagaagcctccttcagatagttgggaaggtcggctaagttctcagaggacagcgagaaatgaaagagaggaagaggaagccacgtggtctgcgcaacaccagagccatgagaacacggtgcattgctctcagttcaccttcttccctgggaggccgggtgaggaaataaccggctgcagtcagggagcgactaacagcagccaagatacagtatggttgtatctgagacacatgacgaaatcaagcatgatacagttgatttaaaaagtgtcagagagacagagactgtgggagtagacaacaaataactggtctagcctgagacctgtggcattcttgagagtgggccacccttgacactgcctggaactcctagacccagaagctggctgacccagagatacaggatagaacacacaggactggcataaaaagaaaatgatgcctaatgacaccctgctacatgcatagatcagtgcctaagccaaactgtcttcagagaggcttcgtccagcaactggtgggaaccctgcacaagggggtgagaaaggactgtaggagccagaggggtcaaatacactacgagaaaacccacagaaccaactctcctgggcccacaggggctcacagagactgaactgacaaccatggaggatgcatgagactgacctaggccctctgcatatatgtgacagctgtgtagcttggtcttctggtggggcttttgggatcctattcctcatactgggctgctttgcccagcctcaatacaaggggaggtgcttagtcttactacaatttgatatgccatgttttgtccagacccatgggagtcctgcccttttctgaacaggaaggggggggtagcaggaggcagaggagaggtggagtagggactagaagaggagggaagggaaactgatgtggggatgtcaggcaattcaaagatgatcttgaggtttccgtctaacataaatgcaaaaacacctggacgaaatgtccactgaaaagtgctaagtgccagtcagagagctcaccaattgttctgggggcgctgacatcaggcagcagaatgtacagatatggagcttaagggagatagatgcctgggctaacgtacagagatcccgctcagtcccacccaagtgaggcttacctaactcccagatcataaccacatgcagcctctaagtgccacaggagcactctgcagcacgagtatgaacactgtattcacttacgcacacctctgtgtaatgtacaggcacagggctcaggtcctaatgccacaggagcactctgtacgagtatgaagactttttacttatgcacatgggacccgcctgtctctgctcctcactgtggcttttcagacatctcataggcgttggagattgaccttgggtccttttgctctcacagcaagtgctcttacccaccatgccatctccacagacaagaaatagtttcatagccaaggctatgttatacactcttctgagtcaaaataaaaaatcttaaaagctggtatcatctcatgggttcctagcaatcgccttgagttatatatttttttcttttttctttttctttttttttttttttttttttaacaaggtttctctgtggctttggagcctatcctggaactagctcttgtagaccaggctggcctcgaactcacagagatccacctgcctctgcctccccagtgctgggactaaaggcgtgcgccaccaccgcccggctgagttatattttcaacatcaagttctctacattcccttactaaacatcagcagatacattaatcacagcagtttctctctagctagtaattcaatcaccgaatctgaatatcccttagacacgcaaccagtgccccagctggctcacaatcatgcttcataatggatgcacaccactgctcaacatcaatcctataatcctatcagcatcagtctacaacgtcaaaccttacaatgtcatacagctttaggagtcaatgaaatattacgattcatgctgctgcagcatctgcaatttttaaacaaagaaagtgaagcacagaagcacagacctttactaaagctcttccctcctaccctgaagcacgtaggtacagtgatggaaaccacagcttggagatgaaagtaaactttcatctttcatttacagaatatgagttcatggtcactctcccagcttgctttctgctgctgtgataagcactgtgacctaaagagcttgggggagtaacgggctcacttccgcttgtcagttagagtccatcatcacagaagccaaagcaggagctcattaagaatctgaaggcagaaactgaggaagaggccatggaggagggctgtttcccttggcctgctaggctacctttctcagacataccccagacccacgtgcccagggaccccaaagtgggctgggccctactgcatcaattagcaattaagaaaatgccccacagacatgctgtggtagtttggatgtaattggcccccataagctgagggagtgatattatttggaggtgtgaccttgttggagcaggtgtggccgtgttggagagtgtgtctctgtggggtgggctgtaggtctcctgtgctcaagctatgcctacttcagctcactttctaaagctgcttgtggatcatgatggagcactctcagcaccatgtctgcgtgcacgccactgtgtcctgtcaccttggtaacagactaagcctctgaactgtaagccaccccaatgaaatgcttccttttacaagagttaccatggtcatggtatctcttcacagcaacaggaaccgtaactaactaagacacatgcctacagaccaatctgatgaaagcacttttccaattgagataccctcttccaggtggatctaatttgtgtcaagttgacaaaaatcatgatgttgacattgtagaggagtctggacaaagacgagctcagtctatgtgctaggctaggacacttggtcggcctcttaccacttctgaggaaatctacgtgcgcgtctttgtggtgaagtagctccacgtcgtagttggcggatgtgttggcgtgctgctcttcctttaagcaaagtgtaagacattttaataaattgggtttgctttcaaaagaatcacataaattaccatggttttttttttttatttgctaaaagtgaggtaaatacattctgccacagttaactaaataagagaatggtttgcccagtcacttatttaaagatgcaacacattccatcagtgtaataaactctagaactattagctgaacacaggcactgaggtaatgactgtttcatgttcagaactaacacaaatgattctcctagaaattttgaatctgtttaaccacaaattcattttcttgccagttgtttgtatacctaatataaaatcattgaaatatatgtaagtcaaacttaaaaagttgttagaaacagtacctaaacaatagcatctttaaatacttgcagtgagttaatgcacaccacttgtttaaaggagcaaacactagcaaacaagcgtagtagcttgtttttggcatcatccattaacagagagaacagactacagatcaagtgtcaggtccaacaagcaagctgtctctgccttcccagcatgtctcttacacacagatacaagctagggctggttacactactgtgtaacaccaaagccactctaatggctctcctagaactcctagtaaagagccagccaatgaggtcgggaggacatgaaaagtgaaaagctaagagttctctctcatccaacttagtatccatgggatgatagcaaaagaactgaaaacaaagctgggcactgtaattcacatctgtgatcccagcactatagaggctagggcaggaagagcccatgtttcaagtcagtgtagactataaagtgaaaccctgtcccaaaaaaagaagcaaaaaagaaaaaaaatgaaaccggactccaagaaagtcaccatgaattttttggtaagcgtagtaactgtatggactgaatttcagtaacgactcattcaaagctaactatgggccagtcattttgctggtcctgacaacaggaatagtgacagattcccagaaaatctacttctgaaactgagccctcatatccacggctctttacctgaggagcactacatcaactggaagccaggaggagtttttcattagtcagacctagtacttatccacaccttcacatttggatgggtaagaatgaaagcataggaaataaaagatccactcaaatatacacagtgaaatctagtaacacagctctcaggaaaagaatcacagagaaataatttaaaatatagattttggtaaaaatagtaagaacatagttcttaaaaaaatctcacatgatatgttcttattagaaacagtgacaatacaacatttgttctgtgatcctttctttctgattctcagtatttactgacctgttcaaagacactgaatgtgggctagcaaaacaaaatataatacagggagaaaaagtaaaggttcaattaaagccaataaggaacgtcaagcaaatcatcacagagcacaaaagggctgtcaagcagaccacctaccttcatgggaatgttggtgatggtggtcgaggccaagtcaaaatgctgctgcaccagaacattcagcttggtagcgaggtgccgcccagctcggacactgtggacttcactggtcaaaacgggggagagctgcaggagagcacccaggagagatgacccacagagcactcaccactccacagtagccccgtgctgagtctcgagtggctttttacaatgtgcatggggtgggggtgagtgggggaggagtgtaaaagccagccaggagaattatttcaccaatgagttgcatccgtaacatatataatctgtttactatactgtaagccaggaatgatgtgagccatgagtccaccacagcacagacagtcactgtcctcttaaaacctagacttagcacgcactcaccacatacatgctgatagttctaactgattgatatgaaaacagaagtgaaaatcacacagagatacaaactgctgataaaattaagaaggaacatgaaaatcaccacaagatctggcttcatcaccagcaggaggtctggtagcaaaaagtactgtaaagctcagcagggagagcgtggtgacctttaacctttagccccagtacccaccaggcagaggcaggccggtggactacacagagaaatcctgtctcaaaaacaaaagtacagtacactaacaaaatgttattcatgtaacagtggacatggtttaaataaaaaatgcaaaacaaaacgttagaatatgctattatacattgacgacggttaactacgtaaatggacagctttacatttctaaatacagactaccaatgaagatgtgatgtgaatatacttactaaccaacaaaattatcttttcatttacaatatctttatttctttttttaaagtaaaagttataaagtaggtttttccctgaatgtttcagttggtttctttgttatcagagggtatttcattagtatgtagttttctcaaaatgggtaaaaattcaagttactgaagtaactaaacttcacagactggaataaagagtttatagacttgcaacacattatattaaaataaatgtcgatgatgaggcaaaacagagacatgtaatgtttgtaattacaagtctattctgtattttcagactttcaagtactttcttggcaggaaaaaccagcaatgtcatcaggcaactgctgtcaccctaagtgctgctaactccagctcacaaccctgtcctctgcagtaggaacatccacacttacttcttttttaggacggtcagacacaaggctatcttcaccaaccgggtaggtgtgaatcaagaccaactcacatttttgaatctgcatgagacttaaaaaaaaaaaaaaaactttcacttaaaaggtttttttttttttttactgtgaagaattcagcaagcaaactactggacctcatcatgataaacagtgtaagcccatgagcataccaacactcccagctaagcagccacacggtacacaactgctgtacttgtataaatacccaatgaataattacacatttaaatgaaacgcaagacttttctgtgtatttaataatgcacaccctgatggtaggtgccagggccctgctttcaactgaagccactgaggcaactctactactaccgccactaaaagacattctgtggagtaagaagctgagaggtagccaactatgtgacaatctctgtatagtaaaaaatgtttaaagttaaaaagtaacaacaaagagaaaggtcttacaattttctgtaattagcacaaaaaaatgagtatctacatattgcatttctttacttttttttgaggacaaaaatcaggcaatcctaatcactacctataaatgattacttctaagaatatgagactaaaaattttctgttttttaaaattgtatttttacttatttaggaacacatgcaagtgagactaacatgggggagtctttccttctaccagaggttctgaattcctgttgtcagacttggaaccacctcaccagcccttccctagccttgtattcagaagaaaactgacagtagcatattcaacgaaaatccatgtattctacactgtacattacataattcactgttagctacatttctgttctttctgactctgaataaatgaacaaatgtttcctactcagtgtgctggtttgaatgtaactggcctccataagctcagggagtgatattatttggaggtgtggccgtgttggagagtgtgtcactgtggggtgggctttaggtctcctctgctcaagctatgcctacttcagttcactttctgttgcctgtggatcatgatggagcactctcagctccttctccagcaccatgtctgcatgcacgccaccatggtaacaaactaagcatctgaactgtaagccatcccaatgaaatgctttcctccgtaagagttactgtggtcacggtgtctctgcacagtaatagaaaccctaactgagacactgagccattctcatgtgaactgtaaaggacattactaaacacctgagaacccttctactaaggatagtttcactcctaatagcaatgcccctattccatataagaaaattagtaactgctcaatctaaactgcagtccagtacaactgctgtaaacacgcccttattggctgtaatgtaacaggtaaacatttggactactgacctagcagatgggataagagttcctgaaacccttataaagtcctaagtactatggcaccagcagtatcttccaccctttatttgatcttggatctaggttcttgaccattggttcttaaccctctggaatctcctaggtggtagcccctctgtgctaatgatctaactcttgggattctccacctgtggttcctacatgggggaagacattaacagaaagacaatgctataattagaagcttgggacctttaagccctaccctgccatccttgagaaaggaaacaggggccagaaaataaataaccagtcgtgcttgtgtgacatctccataaaagtctcagagacaaagggctcatggattgtcttactttggtttccattgctctgaagagacaccatcaccatggcaactcttataaaagaaacatttaattggggtcatttgctcacagtgcagagttcagcccattatcatcatgaagggagcacggtcaggcaagcgggatggtggctacacttggcttgtaggcaacaggaagctgactgaggcactgggcagtatcctgagcataggaaacctcatagccccctcccccacagtgacacacttccttcaacaaggccacccgcactctaacaaaccacacctcatagagccactccttatgagattacaccacagggatgtcctgtgaacacatgcaccctctgtgaaaacaggacatccatctccaagaggtgaaagctcctgcacttgggacttgccctgtttgtggtgcttcccctacttcatctgtatctttgtaacacactaacacagtctgacatgatggggttgtgggaacacctgatgactagcaagccagactgacagtggttctgaaaggatggagatgcaatgctgaggatctgagctcttaatgtgcaggtgctgtagtaactctagcgagctgatgtctcaattgaacggaagcaccccaggattggtgtcctggcagaactgtctgatgtagaaaaaaaacacccaacagttttgatcatcactaaatactgctgtgagtatcaagcaagtataaagcagtttttcaactgctattattaaaaaaataaattcacacaatgcaatgagtgaacctatttacattttgaactagtgagtaatgattaataacacccacaacttgcatattttataagttcctagcaaggtatgataatgagctctcaaaacaaatatactttataaatttgcatatcattttatcattctgagcacctttcttgtgagaagaaatattctaaaatgtaaggaaaataaaaaaaatctgatcaaacttatagctttaggctagtaagaaaaatcaaggaaatgctaccaaatacagtaaaaattattccaagcaaatatgaaatacacatcatgtgacgttaaagacagctatttcatctctgaattatactcactgatctgaatttgcagcaagcttgttatgctcatgaattgtttcttggacacagtcttcaagcatgcgtacatgactatcactgttattaaaaaaagagaaaacttagaggaacaaacagtaagaaaaaagtcaaagccactactcagctgcaggatgctgatactggcatttaaaattacttcagcagggcctggaggtgtgctcagaggtgaagagcaagtgcacctgtactcgtgtgcacaagacccacatacagacacatatgtacacagaatgccaaaaatttacttcagcaaagattgtcttaagcatattcatttataatatcaaactgttagctaaaaaaccagtgaagaaagtcttatcaatttacataataatctagacaattttcaccaagacgatttttttcagacagttttgctctgtagccctggctggcctagaactcactacttaggctacactggccttaaactcagagtgatcttctgatccctgcttctgaagtactaggattgcaggtgtgtatgagcatatgcagcttatcaagatggatttttatctagaacccaataagcctggtatcaatattcaaggcaaacaataacgggattagcagcccacctttttgcatttgtaatacagatgattcgtcctctattcccaactcgctctgcattctccatgagtaacgttcgagcctcatgttggtactcagtgattttgcacagggtctccacggctgcgacaagcccatgcagaatgctgcagcactcagggtctgcccgagggttaggggggcccacagtagccagtgctgccatgagctaagcaaagggagagacaaccatgctgacaacagtatgacatgcgagacaaaaacttcctgagaaaacaacaaaccaacacttctgaaaatgggctggagagatggctcagcagttaagagcactggctgctctcacaacagaccggggttcaattcccagcactcacaggacagttcacaatcgtctataactccagttccaagggatccacaccctcagaaataaatgacaaaacaccaatgcacataaaataaaaaacaaatcatttagatatgtacatatggatacaaactcacttaacaagatactagcaagccaaatataacaacacacacacacacacattatacatcataaccatggaagatttctgtcaagaatgaaagttaatttagtatcaagtagggaggggaggagaggaggggttatgggaggcaatatgggtggggagagacgactagaattaaggcatatttgaagggtaatatggaaacctaatacagtagaaaacttgctaaaatgcagacatatggagatgatctaagtgaaaactccaaataatggggcagacagagtcccaagtggccatctcttgtcacccagtgaagcatccaggaccaggactgagttacatctaaatgagttgtttggcaaaggggccccatgggaatccccaaacaacctgggctgttgccaagactgtaagttactctccaaaaactgacagcaaggtcccactgctgtaagcaacaacacactgcacatggatatgttgagctggtgctctcaaaacaccaagatctttcatctacaatggtatacttcttgcaagataggctagggtaatggtggcacaaagcattcgggaataaccaatcaataactgatttgacttaagacccattccatgaaatagaacccatacctgaccaagaacctgagactaagccaggcgttggttgcacacgcctttaaccccagcactcgggaggcagaggcaggtggatctttgtgagttcgaggtcagcctggtctccagagcgagtgccaggataggctccaaagccacacagagaaaccatgtctcgaaaaaccaaaaaagaacctgagactagagagtcagggacctagggtaaaaccaaatagacatatgtagtgatgaatgactcctaaatatttgccaccagctgacttcactccttattcatgaggatttctgacaactagttgtgataaggataaccaaatacaatgcactacatacacttgacacaaaagcatcttcaacatcagtgactttcgagagtggcccttacagtggagtttcctcatgacatactcaaaacttcagagtattgaaagaggtattaaagaagggttcctcccaacactggatactcacgtaatttgcttgactgagaatgttgggtttgggtttttgagacagcatctgctgtagcacaggctaccctcaaccttactatgtatgtagtctagactgaccttgaactcctgacactccctgcccattccttctgaatgctggggtttaaggactgtgctatcaggcccagcaacttttcacagtcatatgctattagatagaccgcagtagtgcagaaaagggagatgtgtgcacatatgtgttgactgttttgttttgttttttgagacggggtttctaacacatagaccacagagcacagcagagcacaaggacaggccctgggctagccctgcccagcagagtgtcatcaaatgtcctgtcccatctatcttcctgtggcttactaagcacagacacacggcaaaggctgcaaaagagccatggtttaaattttacatcaccacacaaagctggaactattctcagatagctaagtgctacattaaaagtagcaagattagccgggcggtgatgccgcacgcctttaatcccagcactcaggaggcagaggcaagcggatctctgtgagttcgagaccagcctggtctacaagagctagttccagggcagcctccaaagccacagggaaaccttgtctcgaaagaaaagaaaaaaaaaagccaaccccccccccaaaaaagtagcaagattaactccaccttctgagtccacctgtgagtggcagaacttgacagtgaagttcacagcacataggagaccttgggggtggggggttccaaagagaccatctggtgactgtgacattttgaggttccttcagaaaaacaactggcttataccacagtgaagcccacaactgagggtcttctaacccaatggtcagtgccgtgctgataggcaagactgcacagccaaaagtcagcaggcatgcaagtaaaacctcaacatgaaaagaactctggaaacagagatcaaaactgatcctcaaataaacccttaactacctcagttgtaaaatacatatacaaccataaaacaagactgacaaaaaggatatagagtacaagaacaagctcttagaaattaaaatagtcaaataaaaacttccaaatagatagataacacaggttcaaatagataaataaagaaaaatgactttaacccagaaagtccaatatcctactaatagatattctagaaagacacagaatacagacacaagaacaagatcaaacatacaactcagaatttcccacctagcaaatcagaaaagacccgctaaggaacatcattgaaaatgttcagaatataaacgaggaaagaaaagactcttaaagccttcggaatttaaataaactgacactggacttcttcagcagcgtcagcggaagtctggacatagcggtgtttgagaaaatactacttttatgttcaaactatggatacaaagacccacgttccatgaacggcagaggccatcctccagcagacaaagaccacacagaggaaacgctgccatgagaaagcacaagaggatgctgaggcgcagagggtggggactgtgcttcaggaaactgctgaagtaactgatacatttgtggtaaaagaaatacggagaagctttgagagacgtgagcaacaacaggtatgtaagtaggaaaaggaaatggggagttctaaaataaatagtcataaatactatttggcatagcagtgagcaacacttttatggatatacatattctatatacacagaattctaaacagaaattctgatagaatgattagaaaaaaatgagggaaaggcatgagccaggaagggtcttggtaaatcatcactaacaataaggataaagtttaaattaagaatgcaataaataaaacgtggtacgcagtcattatgcttaacatgtaaattaagaaccagaagctagagctgagatttgcttggaacggaaagagcagtttttctttccatgcaacctgggattttaactttgcaaagatacagaaattcttagaaaaaaaaaattaatcattcttctaagtttgaccacatttaggtaattttcaaaacccaggcatacctcctgtaagttctggtcttcttgagtccaagaattcagaacatgtgccccggagtcactcacaatgaaattcacctaacagatatcaaagagacaaatcagtattcaactctcacactgtaaaataacaccaattcctaacactggcaactatctgatccatgttctctaagtgtgaatgcccagggcatgtagctgctattcaggcactgagtatacatacgggaatgtagtcatagatcagacagttctgcacagcatggagaatgtctgcgtgggcaatgaggtaatgcagtgaaagaaaacacagcaaacaaatgagcaggagaatctcagagaatagtaaatgttgtgagaaacaacttggttcactagtcggatcaggcggtgagagacggacgggctctccacagaagcagcgactgagagaactccaaattgactattgaacaggtcacacaataagccagggacagataatttcaagtacggcaaacagaagacgaaatggtctttaaatttaaatgcaaacccaaaaaggcaaaaatccctaaaaaagcagagggtttggagagaagcctgaagaaacaggaggaactctgaaggccatacaaggaactgacagccaaataatggacatcaactacactccttccttttccctcggtaaaatacagatttaaaaactgctataagggatgaaaatgcagtccagtgctgtagtgcttcctggcatgcagtgtgaggctggaacctagcaccacaaaacaaagccctgtcaggtatgaggaggacctctgctgggtcccagctcaggctgctgcatttaagaagaccagcacttgccatctaacatttaaaatactgaaacctaaaggtggctttaatatttggaatttctgtcaaatgtctatgtctcttcttactaattaacacacagacacacacacagagagactttttagctttttggaactgggaaggtggtgcatgtctttaatcccaccacttgagaggcagaaggaggcagatctctgagtctgaggccagcctggtctatccagagtgagctctagggacggctaggcatacaaaataaaaacccctcaaccttccttccacgtgagacaccagtagttctctaaatctagtgcctgttccaaacttgctgcgtacctgtgtacatagtatgcatagtatgcatagcatgcatagtactcacctccttggactgtttatagccagtacacataaagtgtaagtacaaatagaaagcgctttgtaacccacctacaactcttaagtgtgcagaacccatcagcatcgtactgctggtcatacttaaatgcccatacggtaataatcaaaggggcagttaagtttgcatagacagctacagatctacagcaatgtctcgtcactatctacacaattaaacagttttctgacactcaccagcttcttgaaagggaatatatcatacattatcctacaatattccatggaagactccactgagcaagtccacagggacttggagatgggagccaaggggatgatccctggggtcctgttcttcaccagcatgtcaaactccacatgctgtctgcatgactctgccatgtacgggcagtgatccacaacaaacaccgtcttgtgagactcagaaaaaatcctcattgtgcttcaatctgtaaaagggtaaacatactagtcaaatgtttgatacataacacacatcacttaggtgtgtcttcctcgacatttggtggtgagcctgacttaagtcccgagaattctgttcaagcaagggcaagggttatggtgcccagttccaagggatgagctacagcgtcctatatatgcagtcagtttaccagacaaaacgaatccttaactctttttttttccccttttacaaagtacttaaaacagagagagagagagagagagagagagagagggatacatttgacgctgaccctcgctaggggctcaggggtaaaaaaaatcccacaggagaagacggacagcaaaaatacaacccaaaatccagacacacatcttccgaggtaactgcatactcggggggggggggagtcttccccacacggagcccaaaccctcatcctccccatgcaacttgcaacagagcgcagtggattcaccgcggtccttcaaacaaaccgatgcccgggaggaaacgctcctgaaactttttccttacagacacagaacaggcggtgcactccccccgccctcacccccaccagcctgcaaaacgtggtacgcagtcattatgcttaacatgtaaattaagaaccagaagctagagctgagatttgcttggaacggaaagagcagtttttctttccatgcaacctgggattttaactttgcaaagatacagaaattcttagaaaaaaaaaattaatcattcttctaagtttgaccacatttaggtaattttctcgcgatgcatgcatgcacgcacgcccagcaatgcatgcaatgcacacgcctgcctgcctgcctgcaacggggtgggatgcaagcaacgcacacagctggctgcaatggttgtgcggggtgcaaggtgcgcggacccgggggaagccctgggccgcgaggcgcgcttactttcgtgcctggtcctgcagcaaacgcacggaggccgcgggagaagcccggcgagggcggcgggcnnnnnnnnnnnnnnnnnnnnnnnnnnnnnnnnnnnnnnnnnnnnnnnnnnnnnnnnnnnnnnnnnnnnnnnnnnnnnnnnnnnnnnnnnnnnnnnnnnnnnnnnnnnnnnnnnnnnnnnnnnnnnnnnnnnnnnnnnnnnnnnnnnnnnnnnnnnnnnnnnnnnnnnnnnnnnnnnnnnnnnnnnnnnnnnnnnnnnnnnnnnnnnnnnnnnnnnnnnnnnnnnnnnnnnnnnnnnnnnnnnnnnnnnnnnnnnnnnnnnnnnnnnnnnnnnnnnnnnnnnnnnnnnnnnnnnnnnnnnnnnnnnnnnnnnnnnnnnnnnnnnnnnnnnnnnnnnnnnnnnnnnnnnnnnnnnnnnnnnnnnnnnncggcggggggtgggcgccgccggcgggtttcccccgcgctcaggggcggccggcaccgttccgagcccgcggcgcccgacccggtccggctccggtggaggaaccggtttccttccgagagagcttcgagtgcgcgtgccccggctccccagcagtgcgggtccccgctttcagggcgatgtgtgagtgtgtgtgtgcacagaagctgtgtgtgtgtgcacagaagctgtgtgtgtgtgtgtgcacaagcttaggtgcgtgtgcacaagctgtgtgtgtgtgtgtgcacagaagctgtgtgtgtgtgcacagaagctgtctgtgcacaagctgtgtgtgtgtgcacagaagctgtgtgtgtgtgtgcacaagcttaggtgcgtgtgcacaagctgtgtgtgtgtgtgtgtgcacaagcagtgcgtgtatgtgtgtgtgcacagaagctgtgtgtgtgtacacaagcttaggtgtgtgtgtttacaagctgtgtgtgtgcacagaagcggtgtgtgtgtgtgcacaagcttaggtgcgtgtttgtgtgtgtgtatgtgtgtgtgcacaagcttaggtgtgtgtgtcggagctgcccaggctcccttctgtgttccactcacagtgcaccgggttgcttctactttctctgtgattattacagttaccctccctccgccccagacccgtgtccctgtcactgtgaaacgcattatctctcctgaaagttttccagttctaatttaagcgtattgattcatcagagccttttaccaggctacctcacatcgtattttaccttcttagtgtcaccatccacccgggccaggctgctgggtgttttccccagaagagcctctggacgcccactgggttatttggttttcctgctgtttcaccgtctatcaaaacccactccatagatcattcattttagactccctgtgagtgacattgataatgcagtgagctcctagaggaattgacatagttctgcagtatttattaggatgtattatttgttcaattatttgtctttcctgccagtttgaacttgagtctggaatcatgtcttattcatctttaaaacaaaagctagttccatgttggcatagcaagcattatttacacaaacatatagacatatttataatgcaatcattccgaagaatctgctataaaaatctcattcccttaaaaatcagaatattaaaaccgaaagggacctttctattttaggtaaatgtgcttaacctgttttgaatatgagcaaccccattttcctaacaaatgtgatggagatgtcgtgtgataggaaatgcatgtatatgcacacacctcatgcattccagtgatgttatatttgacaagcaggactttatatgatgtctttgacagggctcagcatatatgcatttctgcaaagatcactgactcgttggcccgtatgtttgaaataactggtttaggttaggttacttcttttgggggttgttaaacacacacacacacagaggctagccacagctctagggagcatgtaagttggttttgatgtaccaatgctcttttcttcaaatttttttttttaacttttaagaatggattttcttcataaagctccaggtgtagtcatattcttggagtagaaattatctgtgcattcaaacagtgtactcatctatgcaagatgctcattttcatgtgttgtgtcttgttgtgggatattcgtacactgtgtgaaggtatattgctgtaatcagtgtaataaaaagtggaacagccagtagctaggcaggaggtataggtgggacttcctcagagagaaaggaaatagaggacatgaaaggagacagaaagcaaggtgggcagagtgtgtgacagaccgtagatgaatagaaatatattaatttaagttataagaactagttagaaacaagcctaagctacggccaagctttcataaataataaatctctgctggcaacccaaaggaagaaatctaactacagtttatatatatattttttgttttgtttttgagactgggtctctctagatagtcctggctattctagaactcactatgtagatcaggctggcggcctccctagtgctgggattaaaggtgagcaccaccgcactggctacaaacattcttgagctcttaaaatctttctctgaaagacttgaaacacatttttactttgctatttccatgagttagctaatacaatattatctaactactaacattaaaggtacctacctgagcaataacaacttttaaagtaaatttttgacatctgtcatatgtcataccatgtttgtatatcttcaacaatcggataattggtagatttgtttataaaagaagcaagagttacttgaactttagatttttcttaactaaaagctaaaagtaaacttctggcagttgctgttgtgggtaggtggtggtttctcttgaatcaccgacaagatgttctagaccatctgtgagactctgcaaacgcgttagttgtggagtgggtgaaaatgtggctaacgcaggaagcaaaaccctgtttctggaaagcatacctctgttatttgtaggtaataaatatattatgaccagttaagacaagcactgagaaaataggcaggtaaatttgaaaatattcctttttaaattggagtctgttttttaagatgcataacagaatgtgaagaacagtatatctcccacgttacttactagccagaaagggagagaaagagcctttcagaaaggaagtcaaagcaaactcatattataaaatagttttaagtcttttgaggttttgcaaacaggaaatgagtatacagatttacagaagctgtgtcaccgtttatctgaaatgttaataaaattgggtgttgagttgtctgcataattttttgtgtgtagatgggtttttatgcttctaaaatatgaaaatgtagtttactttcttagtctctatgcagcctagagaacacttttaaagtaattctctctcaaggcccaccatatccattgcttaattttaatatatacttaaaatgattgctggatttgtatagttatgtgaaaaaatattcaaaattttggttttttttttattgttcttcctatgcatcttccttggctgacttgaaatgaaaagttttaaaccttttaggagctgcacttgtggagttggggaatttgttctccccacctcaggatgctaagacagtgtttgcataacatgaagcaaacagggccctctggttcagcctggctgtggaggtccggtctcggccaaacctggctgtcactcagctcctgcatttggagtccttgaggacttgtcccattgtctagatggcaagataaggtggtgttcttaggtccatagagctgccactttgaattaaacctgacaacccgagtctgaggtctgagccccacccataaggtgggggcggggagcctattctaagttgtgttacctagcaatttgagttagggttgtgatggacatcatcatcgtttcctttaaatttctttaatgacagtaaacatcttttagggcaagtattaaaagtctttgggccggggctggcaagatggctcagaggttaagagcactgtctgttctaccagaggtcctgagttcaattcccagcaaccacatggtggcttacaaccatctgtaatgagatctggtgcccttttctgtcatgtaggcataacactgtaaacataataaatctgatttaaaaaaaatctttcggccatttttaaaattagacttattcttgctatgagtgattcatcagaagtacaacttggaacatgcttcctcgaggtctagcttgtttcccacactgtcttggctgtctgatagtcctcccccacccccatctggatgaaacctggtttatcagcagttttttatgtttcatgcttttggtatcatgcctaaaaaactttgaccatctccagattacagagattttctttgctcttttttcccccttataataatagcatttttcattttgtattaaaatttgtgctccatttgggaaaagctttctataaaccatagagctttatataaaccaagtaagaactgtgttgggattactttctggcatataggtgttgagttccatttgttgaaaaaatgctgaccttagcaaaaaagaaaaaaaaaatgtacacagatgtgcaggcactcttgatgaccagaagagggcttcagattgaagctcaggttagtgacacttgtgaatgcctgacgagggtcttggtgtctgaagtgccatccttatagctgagcagccagcactgttagccactgggccggtctttctagtgcctgacattctttgacctttgcaccttgctactttgtcttttgactctgtgtagcccaagctggccttgaactcaccccaccacactcagctccctttgcacattttcagaaataaattggttaccttcctgtgggcctatttctgggtctctgttctgtctcagtgtatcacagccatcttgttgctatgctttatgtaaagcaagtcttatatcgtacactttgttatctttgcaagagagttccagtggttctagtttccttgctttctgtaggaattaattataaaatcagcttgtcagcttctagctgcattagactggaaatctcttggctttgttatattgtgtctataaagccttgagcacagtattttctccacacacttagatactatgttttctgttgacgtgtagttcccagcatatagatcctgtatatatttgattatgcccgagaatttcatttatctattatgtctattataatgtatatgtaattataaatgtagctattttaaatagttctaggactattattagacgctcatttcttcttgtgactttttggcattggtgggttttgaggagttaatccatgtaatatacattatgtaatttttgtatatgtaattctgtttccaagttgtcattgctagcttatggaagaacagttggtctcttggatcctttgggcttgtacttgtatcttatggacatgctaaaatcatggattgtaggaactttatgttttacatttttagtctttgaaatttcatagactgtattttgattttattcacccccagctcctcccagatctccccacctcctgcccacccacgtttgtgttctatgtgcagctcacttgactcctgtctccttttaaaacacacagagagaaattgtttttcttctttgggattttcaatgcagcaacatggactacaaactacagttttcttgtatgtatcccagttgacattttcccccctgtccttattgctctggtaattcaacaagattggtatttggagcatccttaccttgttataattttagtgaggaaagtatttagtcttttactaaattcatgagaaattttgctctatggtttattttgtttttctcattccttttatagggtaatgttaagatcttttaaatgctgaattgctttatgaatctaaaagtttttggtttttttcttctctttcctcttattcttatttatgtgtttgtttatttgagatagggtctctctttgtagaccagactggcctgaagctcacgagatccatctgcctctgctctggcgtgctgagattacaggtgtggaccaccatgccctgccccccatataagtgttctaatctccttaaagagactgtatatccctgtttgtctttgttttctgagatagggcctctattgaccggcctgacccctggaccagacactgattttacctgtctcgtgttctgttttgtttaacgtgtgtgtgtgtgtgtgtgtgtgtgtgtgtgtgccccaggtgcatgcctagtgcccatgggttcacaaaatggtgtcatgtgccctgggactagaggtggggatggttgtgagccacccacggtgctcacgatacaggagcagcagtgagtgctgagccctgtctccggctctggtgtattttaagacttgccactgaagctctctcggtctggagccttttgtgcagaatatttttaactccagtttctttactatttaaacttgttagaaaatagctgtagaaatgtggttatgtaactccagtggctataatagttacaggtctattgctggttattcatttcttcttgtaggactttatgtcatttgtgtgttttgaagaactaatcttagttaggtttctgatgctgtgaagagacataagcacggcaatgcttataaaggaagcgtttaattggagtggctcacttgcagcttcaaaggttcagtccattatcgtcatgtcagggagcatgacagcagacgtggtgttggagctgacagtccttagattttgactcagaggcacaggaagttgactgattgtcacactgagaggaacttgagcaagagacctcaaagcccgccccacagtgacacactcctccaacaaggccacacctcctaatgtgcctctacctttgggggccattttctttgaaaccaccacagatgtgtttaatctaaattatctaattcatgtatatgagatgttagagtgaagtatggctctgcagtggtttctcttggtctttaagggcgtgggagttgagacagattgtgtgacccagggtggactccttcttttgatgccctgccgcagcacagactcttgggtactgggattgcaattatgggccatcaccactggctcttcatttgttctctctccttggttattcagtctctcttggtatctgtctctaccccccataaacactcacacaccctctttgctttaaagaacggacctttagttttactgtgtttactttctttgcttctatttacttggggtttattctgctcttttcctactttctctaggttaggacttggacaattgatttcagatcttagattctaacacaaacaagatttctctttagttctttttcagggtcttcgctgtgtgctccataattctaacatcactcaactttgtattttcttagatccattgggctgtttgctcttagtttttatgtacatgtgtgtgtctgtctgtgtgggtgtgcacacatgcattggagtgtctgcctaccagctgtgaactaaactacagtcctctgcaagaacagcaaacttaaccactaaaccgtctcgcagtcccaaactgagctttttaaatttttatttgtttattatttgagacagggtctcactgtgtagtctggctgccctgtaactcactgtgtagaccaggcaggccttgaactcacagagatccacccagcttttctgaattctatatctggcatttcttcccccccacccccctgttacagggagggacccttgttttttcagttttctgttatgctttggagatcagcacagcctgtcagtcggcctccactgagaccacggttgggtgtcaggttatgcttctcaacagctgtgctctcggggatgctggaactcttgttcgccccatcttgcagtggggaggcttgccctctgtcctgtggcaccatgcagcagatgcccagttgttgtgtcaatgctgctgcactgctgccccagcctgggctcctcaaggctccctctctcttgctgctgttaagcattgcccttgacgactcctgcagaatgcagctgagcacctcctgcttctcttccacattcagccacctcagcatccccttcagtgcctctttcaagcccattgaaagttgcctgtagtggccaataatattctttgtggaaactgcaggaattgagatgatggtgccactttacataagacgccatagctcatcccggaggaggctcagacttggacagagcagggagaattcttacagtcagatttgcatttaagcccatagtatcccaacagccagaacacgatatttgtaaatgcctttctctctaaatcatggacaatgttaggggaagcttaagaagggcatctgtgataatgtggagctaaggtgactttaagccctggtcttaacttatttactgttactcctttagaaatgagctgcacgattgagaaggcacttgctgacgccaaagcccttgtggagaggctgagggaccatgatgatgcagcagagtctctcatcgagcagaccacggccctcagcaagcgagtggaagcgatgaagcaggtttgactcttcttgctggcttcaccgacatttgagtaaacttaagtcatgaatgtcttagtcagtgttccatcgctgtgaagagacaccctgaccacggcagctcttataaaagaaagcatttagttggggctggcttacagttttcatcacggctgagagcatgtcaacacagagctagagaagtaactgagagttctacattcagatccactggcaacaggaagaaagaggctttgggctgggaatgaaaccgcaaagcccacgcccagtgacacatttcccccaataaagccacacctcctaatcctctcaaataatgtcacttcctggtgaccaagtgttcaaatctgtgagcatcccaacagccagaacacgatatttgtaaatgcctttctctaaataatggacaatcttaggggaagcttaagaagggcatctgatgatgtggagcggatgggagccattctcattcaaaccacagtaaacaatcagataatttctaattgcagtcttcacatagcatcacttgtgtgtttgcttcactgtggactagggtatattaatcgtgttcactaacaagtacataggtttattttaaaatctatgaatttcatccctcttctgacagaattgcatatttgagttaaataagtgaaactgttaaatctaaatacatttgataaggatcagacaacacgtttcactagtactggcacacattagatatttgctgtattatataatgttgagatgtttatactttcctttataaaagtacttgggtgttactttgttttttgtttgtttgtttggttggttttggttttttgagacagtttctttgtagctttggaggctgtcctggaactctctgtagaccaagctggccttgaactcacagagatccgcctgcctctgcttcttgagtgctgttcaaaggcgtgcaccaccaacgcccagcaaccaaataagtttttttaaatgatgtaaagaagtatctaattttcatcctgtgcggttatttcaagttcttttttttgctagcatgttttaaatttgtcatttacaataggaattaagtaggttttacttcttgctactggcatgtagaggaaactcccagtagatgattgagttcagctactgtataagctgtccccccagaaagacttccaactcttaaggaagcagccctaggcaggcagtggtggcagacaactttattcccagcacttgggaggcagacacaagtccgagttcaaggccaacataggctacacagagaaaccctgtctcaagagggtagggggagaacctgaactaaggctccttaaaagttaccagaaatactggagcaagtccacttactctgttttatacctgcatctccctaaagtggtctgctccttgaccatccgtccagatgacagtaagcataaacctggtagtgatgtgttttacaatcggactttgacacctgcagttaagaaccaggagtgttactgtaaatatattcccagctatccagtaagaatgcctccagaaaaaagaataattctaaaattaagattcctgctttttttaaaaaaaattcaaaatccagccagctgttgtggtgcacacctttaatcccagcacttggtaggcagaagtaggtggatctctgtgagtttgaggccagcctggtctacatattgagttacagaacagccagagctacataatagactttatctcaaacctacccccaccgccccttgcagtgctagggatggaacctggggccttgctcatgctaagcaaattctatgccggtcaggtcagtgtgtttctggcttcccaccctctctactcccactgacctctctcccagtggatttgcctgttcgagacctgtagacactttgtgtgcgtaggacatgagctgtgtggcttttgtgattggcctattgacatgttttaaatttcatctggtttctcgtatgtgtcagtctttaggggatacagcatgtcttgtttcttctctcttgggtcagggtgtgggtactctaattcctctttttttcctattatgagtattggtactacggatgttttcttttccctaaggaaggaatgttgggtcatgtaatgcctctgtttcactcttaaagggtctgttcatttatatccatatagcaggtaaaaatttgcaaatattgacttcctatgtgttctttttttttttttttttaatcttctcattagtatcaggaagaaatccaagaactcaatgaagtggcaagacaccggccgaggtccacgctagttatgggaatccagcaagaaaacagacagatcagagaattgcaacaggagaacaaaggcaagatagattgtcgtgaaaaagacctttagtcttccattgtggtactagtttgggactaataagtatattcacaaatcggagaggggctggagagatggctcagtggttaagagcactgttgcagaggatccaggttcagtacccagcacccacgtcaggcagtcctggctgcccatcattccttctccagaggatctgacacccccttctggggcgcaggcatgtatgtggtgcacagacaatgtaggtactcacacatgcacgtgaaatcaaatagaatcctcttttaagtggggaaatagtgagctgaagtcctcctttctatttaatctccttctttggtctgtgtgacgaggaggcgctctctctgtgctctgccctgcttatcctcttctcagctgcttctcacatctggtttacaccattttgttacctgtgaagaactgaactccactccctgccgtgtcccagtgtggctgctcatatgctctgctgtacctggagactttcactgtcagctttctctccatccttcaacacaagcccaagtccaaactccccagaataaatgtggccatgatgcccttgcttaaaatcttctgttttgattttatttccttgtcagttgctggtctctcttctgcccacttcacacagctctcctccacactgtttgttttgcctttctacctcagtctcctaacatagccttcactttcatgctccttgctgaagattctcgttcctttagctagcgttcaccataagagctcaagttcattgcagtgtgataattctgtggaactttccccagtccagcctcatagctctgaaatgatttttaagaaacagttttaaatgaacactttaaaaagctaatgagagatgtctccaaggattaagggcacttgccaccaagcctgtcagcctgtgttccatccttggaacccgatggaacccctggaggaagacaaaagtcaattgcaaattgtcctctgacctctgcatgtgccatggcgtgtgtgtgtacacacaacacacacatacacacacatacccacacacatatacacacatgcacacacacacagcataaacctttatttcaataaaaagtggtgaggggcttctttgctgcacggtctcttttaagatgtcatgtatgtcagtgttttggtaaatatgatttgggagagtataatcttagctcatttcaataaagcacattgttctcgatagaactgcgaacatccttggaagagcaccagtctgccttggaactgataatgagcaagtaccgagagcagatgttcagattgctaatggccagcaaaaaagacgacccaggtataataatgaagttaaaagagcaacactcaaaggtaatcaatccagtctacgaatttgacttgaaatgaaaattggggccattggttaatcgatgtttagagtttaaacaatgaaaaaaaaatctaaaattggtgtgatatgatatataattacatccccttctcccccccccctttttttttttttgggtttccctgtgtagccctggctgctgtcctggaactcaactctgtagaccaggctagccttgaactcttgatctttctgcctctgcctcctgagtgctggaactaaaggcatgtgtcaccatagccagaaatacctcacatttttaattgacattttctttcatcgtcaccaccctgccccctatttcttgttacatattgtattctccttggcttattcttgtaactcacattactccttattaacagggtctcactgtgtagctctggctatccaggaactcactgtgtagaccaggctagcctcaaattcagagatccatctgtgtctgcctccctattggtgtccttagtaactttaaaatggtgtgtctgtgtgtgtggtgtctgtgtatgtgcagtaataaactattgtaaaaataaaggtgtgtttagtttaaaattactctgtgagattctctgcttttaagtagaattttccagtgaatctgtagtgctacctgtaacacaagcagaaaatggaaactttaaaagtctgtgcactgctgagtgccgattgtttccctgaagagtccagtcttcatgagaagccatggggttggggatccttcatgtagatgacatcatttgagaagcaaagccgaagtagttagagcacttttgcagttgcttgaattgcggccatttgggggcagttgtcaagacaagcaaaatagttgttgctgtttacattaaactgaattttaactgccagtggaaaatgaaaatattaaactagattggatgactggctttggataatggtgaaataaactacttacaactaatactatttaagaaatagtggtagttataagatacatatatttctcagttatattttggaatctttaaaatatttcttccacattggcgtttatatctaattatcctgtcagaattagataactagtagtattctttgggtgacagttatacatattacggactgtaatagcaacctcatgttgattactaagagaataaaggagtaaagttgggtttagtgttacctatttataataatcatgccctaacaaaatggaaacccttgggtatttaactggtcttttgaacataaagtctatggttaatgttagtattggttacagagtagctacttcagtgtatatcaagccatgtacagtgacacatacctctttaatcccaatacctgagaggtaaagggaggaaggtcggggttctaggccagcctggtgacatgaaattctgttttaattctaccttccctctcctaaaaataagtaaatgtgtaactaagagagttttttttttttaagtataagaattgaaattccagaaggccctcttgttttacaatttgaaaaaccaaatttttgaagttttgaaagagtgaataccaccaccaccaccccaaaaaagtgcgtagagtaaaatcttgttagtcccatatagtagtaactgtggcagagcgaatgttttctaaagcacatgaggaggtggaggcagagctccatggtagagcatgtgctgagcatacctgcagccctgggttcaaccccataaacaaacctattgggtgtccagtcatcagtgctgtcctgttaaaagtttaaacacttcctaaatagccataaaccttccgttaacatttgttgtgtagattgagatgatccaagtgctgatccttgccttccataaagtgactgttcagttatttgctattaattctaactaatacatgttaatgtttgtggttttgatttttcccaaaaaggagacactttgactaagtaaatcaaacatttattagttattggattagttgctagaggcaagagcaaggttaatgaaggaatacatcacatcactgttaagtctgccatgtaatgggaagtacaaaaacaagcataactagaacataaggtagagtgaggtaaaaatgagtcattactatagaagtaggaagagcagtattggtttccataagcagagtctgaaagaaggcagattatttaatctagccttgaatcaactacaggagtggggtatgcaaaacagagaaatgagataaaggcacagaagtgcaggactagacttggttaggctccagtgatctgatatgcctagacatagaaatacctctgccactctttgggggacacagttccatgtggctgcactttgcagcatgtgtcctgcttgaggacatagtgatacagaatttttcacttatctagagccttatgagtccatatttaaaaatcactagaaaatttaactcagtttcatccaaatacttatttttacatcattattttaacagacgcctttttggaaatcttaaaaaaacaaacattccaacggttggctaacacgcatgaactaacactcattcggtgtttaagttacggaagaattccgtattaacattataatggctctgtgctacagattgacatggtgcatcgtagcagccgcgaaggagtcttccttgatgcatctcggcgcattcttgaagcacctcagcatggactggagaggcggcacttggaagccaatcagaatgtacactaaaccacacagtcaactttggtgggggggatgagatggggtccacttaaagagttgttttatttctaattgcccttccagattagatcagcaaataaatgaaatcagttgaagaacagtgtgcttttcatggctgtgctgctgagtctaaaactctcaagtttgtcctcagggccctgtgtgtcatgcacaggatgtaagccattatagatgacctgacaggtttagagatgtttaccaaccaccttttttttagtttgttcttactagatgttgcagcagtttttgttgttataaaagagtgcatttctagacgttagatattttcttactcagaaggcagaggcagggagttctctgagtctgaaacctggtgtgtctatgtcatgagttccaggctaattagagctatgcagtgagaccctgtctaaaaaaagtaaaatacattttcttgatattaactttagtctgatattataaaaggctggtccatcaaacttaaaatttttaatttagattcttaatttgtagtcctttggtttgagttcacaaataggaatgctttcttattgtgtcttaagtgttgaaaagctgggttgttgctgcagagtaatagtaatagtaataacaaatactatttacctgttaatacattattaataatcattaattattattgataagtaagtaaataagacagacttggatgcggttagcaggacagtccatggtgatgtactgacatttggtcttcagagccaccgttccgtaagagcagtgtgattggttcttacagctagtaagtaatcgtccactggtcctgtaaagcatgctaagcatcattttgttttttcctggtgacaaacagactctatactgaaaaatcagcagcctcttttttctgccattttaaaggcaagaaattattggcttcctatatgccttttaaacctgtgctggtgtctcagtactgaccaggttacagattaagaaagctgttgttattcacacttttactgtaggccttcagtttctcagttatctgatgtgtgtcctctgtaacagggggtcttagtgacttcgaggtgctgcagagaatgacaggcgtttgccttggtaacagctttgctaccactaatccaaagctgtccaatacacttcctaaactagtgacatctgtgtgtcatgtggaaggtacttagccacatgtcaccattaagcactaaaaagtgtcactcatacatgtgagagacagaatcactaattttttttaacatagtttctttttcaactatactgcatgaggcagagcaaatgttctttatggtgtcttctaaagatttctccattaagacaaagggttagaggtgtagccctggattcagtccccagaaccaaaaacatataaggacctacatctttttctttaaggttattaaatgggactaggggtgtagctcagcgatgggatgtttgcctagtctaaactcttggaaacacatagacacatattaaatacagttagcaagggcagtgctgttgtcccccatgtcctccagtttaatagtcatggggttctctaaggtctgaatcagatccttcctacagctattcagctgcctgaaagacatgtgttcatttagggattttgtcattggatttcaaatgtttttgtcttaatgtattaagttgtgttgccaatgaagagtgatcaatagaaactatgagaagacgatgatgcttgggcctgtgttggtcggctcttaggcccctttgtctccctcactgagcagagcttgtgaggtcagggaagataacttcagaggaattgtgcttctgttgtctggcttagtgcctgacacatgtcatcaaggaatgatatagaatttgtaaaactgataaacatgggtgtctatagcatgtagaaattagttctattttcatcaaaaaaaattcatgttttaatactgcaaagcaattagttcattttgccgaataacttttattccacaaacaatacactttctgttctcgaggaggattatgtctagaaagtctcttggtagacttgggaccggcttataggcattaatactctagaggagacttcaggaagaaaaatcaccgcatgtgccggcaggttttcatctttcccattgctttaaccatagtgctcgcagccatgagaaagaaaatcttcttggtcattgtgatacctgtgaaatgaataagtattttgctatagagttgagttatgttgtgatctgtatccttaattatattttctgtcagtttgggggggaaggggattctctcaatgtagtcccagctcttctggaactccctatgtagaccaggctggcctcaaactcagagagatcctcctgcccctttaactctattcttagcacctgatgtccacccagctttgttatgattcctgttacaaagcaacataaggataccacacttttgtgtggcagtgtggttctgtcaaaagcgatttcaaaattaaacgagtaaagtctttttcacatttccgtgtctaccgtttcttccaggagttgcaagcccatgctgaccagatcaccgagatggcagcagtgatgagaaaagctattgaaattgatgaacagcagggttgcaaggaacaggagcgaatatttcaacttgaagtgagttttaaacttcaaatacagggtggtggagggcggggtgctgtatatccctgcaaccactcaaccagagaacattcctagtctttaacatacccacactctttgagttggtggtaatgattcctgaatctgaatgctagtgtgaaatactccattgggtagtaaggcaagaatctgggagcatcagtgacacatgaatccatcagtagttgagaaagtttgtttttaaaacaggtttggtggcacacacctttaatcccaacactcaggaggcagaggcaggcagatctctgaatttgaggccagcctggtctccagagtaagttcccagacagccagggctacccagggaaacctgtcttgaaaagaaaagagaaattttagttttgattctgtgttgttttttcgtgtgtgcgtgcatgcgtgtgaattttctggtttcataatctttaagatgcggttctttggtagagatcatggtgatgcagaatgtttttatgatgcacagacagtgctgtttctttcatcctatcactgcattgggaggcagcggcaggaggatcagggatttaagatcacctcaggctccaatgagttttaggccatcccagactacatgaggtcctgtctcagaaagagggctggacccgtgggtaacggttactgactctggatccccagctcctgtgtaaaagccagacacatggatgtccaaacagtaagttcagtaagaccctatctcaaaacatgaagtggagtgcaagaaagcaggactcctggtgtcagcgttttgcctcctcgtgtacacacagggaacacatagcaccccaaaaaataaaatttaaaatgctttgcttaaaatcatgatcagaaaatttcttacggatggccataaaacctatttctgtctctgagcatacagtatgctcccatttgtaaaataagggtaggtcaactttttcgacaaaggaccagaaagttaagtcctttgattttgcaaactgaacagctgatactcagtgtcattgtggttatgtcaaagcagccacaaacaaaaacagatgggcaggactgtgttgagaaaccaaccccaggccaggacattgagacctagaaagtgaggccaaagacagctgtagagaatgggttggcaaaattgcttacataatatcagataatcatttacatttctttttgaaaaataatacctcagctagttttgctgatctcacattttgctaagggaaaaatacagtaactaccactgagtgatgaaatctatctcaaggtattattcatgtagatttataactagtattagtttatatgggtgttactcatctccagtctgtttgcaaaacaagctaatttctgcctctttacctgttctgtctgcacatattaagacttgcagctctgtggaggttgagtactgactctatgtctttaacagcatttgaaatctggtttttgtttttgagagtctcactgtgtaaccctggctggcctaaaacttactatgtttaccaggatatagagatccccttgcctctgcctcccaactgatgagattaaaggtgggtgtcaccacacccagctttgaaatctgttttgattcaggttaacagcctgtagcacacagtgcatttatccatttatgtgatcacagagcctgcttttcatgctacgccttcatacgtctggcctttaaaatacgttcctcttagaggtgccgtgtacaaatcttcctgtctctgcacaaaggtgctctccctttgcgttgggtgtaagccatctgcagttttacttgtctccttacagcaagaaaacaaaggcttgagagagattcttcagataactcgagagtcctttctgaacctacgaaaggatgatgcatcagagagtacatctttgtctgcattagtgaccaacagtgacctgagtctgaggaagagctgagtggctttctgcgtgggcccatccaagtgagtggatgaatgaacataaaacccaacttcagtcagccttttttcctctatagtttgcacaagtacactggcaaagagaacagaagaatgtatcatcaatggtcacactcgatcccagcgagtaaaagacagagaagctgagccgctgggtgaatcgtgagcaagcaccctcaaggtgctgctgaagggctgttggctccctggatgacacatgggtcaccctgaacaccccaataaacatttggaaatcctaaactatcccagctttaaatgttaagttttgctgtggttttctgaatggaagactttgttctaggtcttacctttcctgttgagtgtcagaacagcttatgtatgaggcttcccatttgttcagtctctgtcagacagttagactttaaaggctttaagaatgtgttacttgcaccataaacagaaggcatatactcatactatacctagttcccatgacttgtagatagccgttatccatgacttgcttgagtgtgtgcagtaccatctcaggaaggaaagagaaggaatactactttctaagaaagactgccatatatagacacatttagtaggttaaactactttgacagaaaatgttttggttctgggttaacagtgaaactgccctcctctctacttgctgcttaaggataggagacagttcactagtggacagttgacatagttaatgtaacaagatgggtatggtcctctccaagtaaatctggaattcctttgtttttatttaagaaattactcttcaaatccttaaaaagtagattcatgttccaaaaacaaagttctggatccgagtctatgttccatttgtctcttgnnnnnnnnnnnnnnnnnnnnnnnnnnnnnnnnnnnnnnnnnnnnnnnnnnnnnnnnnnnnnnnnncaatgagtgagggcccacagacattttcctttgtatttaaaaacatttacacccggccagtggtggcgcatgcctttaatcccagcactcgggaggcagacgctggaggatctctgtgagttcaaggccagcctggtctacagagcaaattccagggcagccaaagctgttatccaaaaaaaccctgtctcaaaaaaaaaaagaaaacacaaaaatatcatatttacagtctgaaaagcttttgaaggccacaagatacagaagtgtgctttaacaccaattgaaacctacattgttcttactatgtagtgatcagaataaagggataaaagattgtgaaatgattaaaaatatacttgtgtgtcgagtgcatattaaaattagcacaaatagaaagttctacttttgagtatatcatttgttaaatattgctttgctttgtaatttgacatgcagtttcatgtattggcaaaattcaaaggacttttcacttgagaaattttcagtctgaagtttgaggtgagtggggtcccagggctgttaggaaagggccagtgccctagatgttagacagttcacattcggaggccttaattttttatacataagtgaatttatttttaagattttcctattggtttttggagagtactccttaatttaatggtacatttgttcatgtagttttatcccaggccggaattttaaaaaggaaggctgcactgttgagacaagtcagagacaatgcattgagcagctctattgtaaaatgttatttgagaagtgattatttttgtaaaaaagtatttatcctttgtcttgagtataattttaagtttgtaagtactgaaatacatttgctttgtttttagcaagttttccacccatccccacccccacccctcgccattacccccaaaaaaacaacttaaagcttacatctcagagtgtgtgttgaagaggagccctattttatcaataaagatgagtgtttaaagctggggtggcctcagggttaatttcaaaacaaagcttgcatttcttaaatacaatttgtttttgaagctgcttctctttgcaggaggggagggtgacactgtgtgtactgtgtatgccctttgtgtacaccgtgtatgtgccctgtgtgcactgtgtgtgtgtactgtgtgcgcgctctgtgtgtaccgtgtatgccctctgtgtgcactgtatgtgctctgccactaagctgtatgctcagccctatggcatgttctttggtgtgtgtgtggggggactattaaggagggagggggagaaagggagaaggggatagcatcttgcaatctcatcccttgcaaatttccatttcagcaaaataaaccagctagcccactttttcaaacagccgaagccctcagcaagtaccagcagttaaccctgtcctcaggatagaattactaatcctgacacacaggccattcttttcaaggagcatgagcaggaagactgcatggaggacttttggagtacaagcaggaaagctagcagcctggggtctcagctcccctacagagtgtggcctcagacttagcactttcttctgtgatgcctttaaagtagaggtatcctgtctgttcctgctctcaaattacagcaggactctggtcatagcccagtgctatcccaccagcttctcaaataccagcttgctctagaggggtttatgttaacacctattgtcaagacaaaatgaagtgctaatccccatatagtcaggctgtgagcatcgggagcctgaccaccatgattagcctgccttaggccaagctagtctcaaacaacttggttatcctcagctacatagcaagcttaaggccagagtgggccacatgaaaccatatctcaaaaattaaatacatttagggactgaagagatgattcagcagttaagagcactggctgctcttctagaagacccaggttcaattcccagtacccacatgacagctcacaactgtctataactccagttgcaggctccaacaccctcacacagacatgcatgcaggcaaaacactaatgtacatatatatgtaaactatatcaccctggatttccttcacttcctgttagccttaagctgagattttaaaacaactgtattttccagattgaataatattgtttgtaaaagcacaaacaggaccagtataaacttctcgagacatcacaataaggaggccttaagcatttttcaaaatgggtgtttattacaaagattacacaaatggaattattaaaagttattatgaaaatttaaaaacaattagtcttttccctccaagaaagcatattctgcctttcacagctctgactggcagagtgttctaacaggacagagaattgctcttcaacattccacgaaactaaaatacaggcatgtgacagaagccggagtccctatagttaatttttgttttcaaacaacttcattgctaagccagacagtaataacagtaagaattttttgaaacaaaaggtttcatttggttcattttataaatttttcattgttttctcttcaaaacattttaaaaaccaaaactgaagactcctcccattacctgaaatttcagtagctgactattaaaaaacaccatcaaggaagcagcggtaatgagcacaccacagccacagcgtaattccactgacagcagcactgcatcagggaatccagctcacaactcacaaccctggaggcgtgcagcccagggcacctggcactttcttgtgaaaagggggagttaaagtgagaggcccaccttacagaacccagggcagccctcaggagcagctccattccagctgattccctctgagctccagagctcagtagcagtcactgggaacaactccacagggcactaacacagctgcttcacacagcacagagtacaaaggtttcatgtccttagtgacctgtcctgacaaaatagtccactcatcaactaatgcaactcaaaagaaaggtcacaggtcaccatttgggctatgacttatctattatctttaataaacagctattttcaattacagaaataatttatttaaattaccactttaaccctaagaggcaaaacaatagggaatttatgttaattaattttaggatagttggccatagtttttaaaataaattttttaaatattgaaagaaatgaagggttctgtttaaaatatgagatgcagccaagtaatcaaactgctttaatgaaaagcaggagttactttccccttaatcataacattcaagggcaaagaatcaaacctatacacacaaagcaggtacccactgccagcctccccctccacaggttcagactgagtcaaaactgtccaaggacatgtaaaaaaaaaaaaaaaaaaataccagggctttaaggagaactgacacttttattttctggcatattttataaaacacgaattgtatttgtaaacaaaggaaacttgtaaagattgtggaaaatgagccaaagcatctacaaccagccatctggggatttttctcaccgtcacctcggatgctctaactccactactgtactgcgggacctcagcagagacatcaccccatcactggccgcagctgatcccacactgaccaagctctcagccttctacagcagcaggggtgtgcgctctccagctggctgttccttctgaaagagctctctgatctgagtcaatcggccatacagccgctctctcaggggagggatatggtggctggggtccagaatgtttgtcactcttctttctctctcttgcttccacagcttgtagggatggggagggaaaggcgcctgtcctctttctcttcgaatttgcagcgtaattccactgacagccaacatcccccacacggccaggacaaggaagtctgagggaaagaagtacttgtgtactcatgggtttggtgttgtggcttgttttatttttgagacaaagtctcaatctatatctcagactatacttaaactttggcaatccctggataccaagattatagacatgagccaccaagtccagatattgtttttaattgtacttgaaataaaaaaaattgtagccaggtagtggtggtgcacgccttttaatcctagcactctggaggcagaggcaggcagatctctgtgagtttgaggccagcctggtctacagagtgaattccaagacagccagggctacacagagaaaccctgtctcaagaaaacaaacaaacaaatggtgtatgtatgctatgcgcagattcatgtgtgttcaagcctaagtgggtggcaggtgtctttctctgttgctcgacaccttattgtttggacagcctctcccattaaacgtgatctggctgagcaagccccaccatgcacagccatgcttggctttttatgtgggtttatgactgtttatgacttgtgtctttgaacgtttctgtaactgtgtagcgcatcacttgttttctttgaaagcttaccaaaggtcactgtgtgttggggttcacccctgtcatctttgttaggctagagacaggagaatcactgtgagcttgaggctagcctcggctacagagtgagaccctgtctcaaagacaagatagaaaatcagtaatggacaaaatcttgtgactaaggcaacaacatgatcactaactgaaaataaactgaatcttcattaaagtaaggaaacaaaggagtacattttgaattaaactagggtaccaatctcattccttatctgcccctccccaagggggcggcttcctgatctgagaatggacaggtgagtccatagagtccacttagatgtttgaaggagacgggaacccttcactcatgcagcactctgacagcagcttccggcccctggcgatgcctgcgagctcctggcaggcaggctagtgggcacgcccacttgcacatcactctgatttctggagtcttacctttagtctggaaaggcactccaatgaaagccgctcggaagtctgtgttgagtgctctcctgaggacattcagagtcatgtaggagaggctggagaagatgtaactgtcaatagccagcaccacagagtaggaacccacagctccacacgccaggatgttcagctgtgggagagcagaggagacaggcatcacccacacagcaggaccagccccagctctcaccactgcctgatgtgacagaaaaatcagaggacagtccaccccaggccaccagaaacagtttgcaatcccaaccctcgggggttgagatgggttcagtgtcccctccacactggtgtggtgtccatgtgtgtatggggtgtgtgtcccctccacactggtgtgtttctctgtgtgtgtgtatggggtgtgtgtcccctccacacgtgtgtgtgggggggaggggtgtcccctccacactggtgtgtgtgtatgggttgtgtgtcccctccacactggtgtgtgtgtgtgtgtgtgtgtgtgtgtgtgtgtgtgtatggggtgtgtgtcccctccacacatgtgtgtgtgtatggggtgtgtgtgtgtgtgtgtgtgtgtatggggtgtgtgtcccctccacactggtgttgtgtctgtgtgtgtgtgtatggggtgtgtatctcctccacactggtgtggtgtctgtgtgtgtgtgtgtgtatatggggtgtgtgtcccttccacactggtgtggtgtctgtgtgtgtgtatggggtgtgtgtcccttccatactggtgtggtgtctctgtgtgtgtatggggttgccccctccacactggtgtgtgtacacagtgtgtgtgtaagcgctttccttctcaataaaacttgctaagcatgtgacttctttcctgtcttttaattcttaaatgggtagagaaagcaaacctgacttgagacccccaggtagcaatcctgaagaaaaacaaggataaacacaggtgacaatcacagaacttcctgagcccagataaccacagagccctcccctccctagtgaatagaattcatgaaggattcaatgggtgactctggaaggctggaagggtgtaactggggacccagctgaactgcaacactcactattcttaggcagcccatgaagatgactgggacgagcagagtgatgcaagagaaggtcacccagaacactccatcgtctcgaaacacatttagatttcctggaacagcagagaaataagaataaacaagatgtccatcaagttaaatttctccgtcttggtgtctgtccacaaacacaaggcttaagtgacagccagggaatgagctggcatctggctcactcggttttctttaacggtcagcataaatcacacacacacaatttgtagacagggtttctctgtagcactagctgtcctggaactcagatctgcctcctgcctctgcctccccagtgcagggattaaaggagtgtgctgccttacctaactgacacaatctgtttttaaggctgtgctctagaaggtgtgaggggacctagaggatgacctgaagaggctgacatagaccctgccctcctactcctcagcgctatggttctgattcctacccacaaagtgcgatgactagataatactggtgtgtgtgggggggggggggtcctagtctcccctccagctccaagctttcatcaccttctgtaagggggacccacagacaacagtcaaagttaagcagtggactcatcatgaattgatttgaatcactaacctaattcctgctcatgaagaactaactcctggatggactggagccggccactaacgtgcttcacgcactctgctgttacagtctagtgggcaacacaccttgggggacctacagctacatgaggtcctctcttacaaactaggttttaaaaaaatgtgcatgtaagccgagcgttggtggcgcacgcctttaatcccagcactcgggaggcagaggcaggcggatctctgtgagttcgaggccagcctggtctctagagcgagtgccgggataggctccaaagccacacagagaaaccctgtcttgaaaaactaaacaacaacaaaaaaaatgtgcatgtggtgacagacaccggtactgccagatcctcgggaggccgaggtgggtgtgtctgtgcactcaagaggcagaggcaggagactctctggagtcaagatggtctagtgtgccagtgtggttggtctacacagagttccaagctagtcaaactacacagtgcaatcctgtcctcaaagggaaaaacgtaagtaattgaaaaatgtgggaatgtgggtcctccagccccaatcagacttttgtagctgatgcaacttcaacctagaaggaaccagcctcggtgagcccgagacctgtctgaggaacacttgggggatggagacggccaagggagagagagtaaagagaacactggacacagtactaggttccaagcccactgcccatcagagcaggaccctgttcatctgtgagacacactggccatctccttatgactcaagttagactccaagggcttaaactgatctaaagtaactggctgtaccgtggctcacacctgtaacctcaggaatcaggaagcagaaacaaaggatggctgtgagttgaagccagcctggactgcaaaggaagaccttgttccaaaatttaaagtaaaatttaaaaacaaaatctctgttctgccctatgcgccctgttacccaccttacctgtaacagaagctaggaggtgtggcacgcacctttaatcccagtactcaggaggcaaaggcaggtggatatgaatttgagtgaggccattctagtctataaaagcaagttctaggacagccagggctacataaagaaaccctgtctttgaaacaaaacaaaaaactactggggctggcaagatggttcaatggtaggatacctgacatcaagtctgattatctgagttcaagccttgggacatacataggtatacacacaccacacacacgtgcgcacacgcacacacacacagacacacacaccagcatgaaagccagcatctcctacccagaggagtgaagaatgtcccagaagagacgaggaagcccagcacgagtccaacacacagcatacagagcatgagggtcccaaatcgccaccaggaggccaccaggaggatgccaccgatgctgccagctacagcggtgaggaccaggcggactgcacaagggagaaggcacaggaagacggatcagcatgtgccaacctcaacttcagcctgcatgtccttcaaggcactgtcctccagggctggggacaggccagctttgtcagtaagagagcaaggggtcagtcaaccaatcttaaatgtgattcggggagggtatggagggtgaggagtccagaggggaggggcccggagggggaggctgaggatgtgtttccctggatgggttccatccccagcactgcattaatctggaaggatcacaaactcaagtcatcgtctgcttgctacacagtgagttctaggccagcttgagttaatcagacgctgtctcaagaaataaatgaaggtggggagaagagtgtttgagctattttccccccagtggggagtgtgagctattctggggcattcattgccttactctgtagcccaggctgaccttaaactcaagctgaccctctgtctctgcctcatacatactggagtaacaggtataccaccacacacagatttatctgtttctgtggcactgggatctaaccagttagacaaaagctttgatgctgagccactcccagctggtgccttgtgttttgtttttgtttgatttttgtttctttgtttttatttattctgagacaaggtttctctgtgtagccctggctgccctggaacttgctctgtagaccaggctggccttgaactcagagatctttctgcctctgcctcccaagtgctggaattaaaggcgtgtgacaccaccaccccagtttttgttttttgactcaaggtttcactatgtaggactgctctcagacatttaatcctcctgcctcagcttcctgggcattggtattacagctgtgtgccctggccttacctcctggctgcacacggaaaagtaagcccagatgcggctgcacccagatgcggcagcggcgcagggccccgggcacaggttggccgtcatctcatactcggtgcacatggcacccagcacaggttacacagcggacggcgtggtaggtgtgagcccagcagctcccccgtatacccagataaacgctgtactcaccatcgtacttcagggacgtcagtctggagatcaggatgtaaaagaagaaccccaggaaaatgaagccaacgaagaataattctaggaggaaaccatcaggagacaggaaacaaacaaaaacccacgtcaggtgtctccacaacacaatggaggcatctaaggtccaagtctgtgcccaagcgtccagactcatacgccacagctattcccagagcaagcacaatctggaaggcgggacctcagcagaagtcagagaaatgtttcgctattaaacggagagcgaacctacaaggctacagcatcagatgctggctgcacttgcctctcacacagttcagtggttacttgctaatttcatggttcatttactacgtttctctcttctttgagaaaagggctccttcatgtagcccaggctagccctcagactagcaggctaacagaatgagtgagggtctttgtgggaaaaagtacctgttttccagaatctgtgtccaaagaaacaaatgaagatcccaagcacagcaaacacagtggagaacactttggtagatactcttccttaaaaacacataaataaataattaaaattagtgggcagctgcatcttcattactctataggcgaagcacggggtaaaggaaggtgagctggcttgagaatcatttactctgcacaagatcactgctcttaaaaatgcccttgttcccctgatgagttaatctacgcaggcgaggtcactcccagtggttgctttctgtaacaaggagaaccaggcaacgcatgctccccacacccatggtgtttctttaggagggtgtggcagaacatgtgtctaaaacatgcctgtatcttcaacaaataaaactgcagggagaaaagtggggtgactcagaaaattcataagacacgagaactaaacacagatctcatctacaacctggctcatcccactggggtgatgcctgcctgtctccccagcccggggaggctgagacaggaggatcactgcatattcacggctaactgctacacagtcagttccaagacaaccctcgagaaagagtgaggcctgtctcaaaaaataaataaataagtaaataaataaataaataaataaaataaaagaacagtaggggctggagagaactcagggggttagcgcaattgtcaattcccagcacctacagggtggctcacaaccagctgtgactccagctccacaggatccagtgccttcttctggcactacactcagagtgcacaggccacgtgcaagcaaagcctccacatacataaaataaaagtaaataaatcactctattgttttaaaaaagatagcccttatcaagagaaaacactgcccaccagattcaccttccttggaaacccttcaaaatgagcataaggaaataatccttgaagaaaagcagattcaaaacgcccacacacactgaaagacttacaagctggccacaaattcaaatgcatcagttgcttaacagcgtccagtggggagagcatgaggcacacatttaagcaacaaatgagcggtgtaagaccagagtctgaatcatggtagacacacagatccgccctgagaacaagactgccggatgattgaatgaaagacaaaagtgcatattccgtcaccgaaatcacggagctggcccagtgttctgccttgattttcttcacattaaaaacgtgggggctgggaaaacagcttagttggtaaatgccttccaagccctaggacgtgagctcagatcctcagccacataaaaagttgggtgtggcagtgactgactccaagtgagggttcctggggcgtgctggccagccagtccagccaaacaagagagctccaggtacagtgagagactgtctcaacagatgatgttgagagtggcgtaggaagacatccaacaccaacctctggcttccacgtgcacacatgtgcacacacgcatgaacactgtcttactgttctatcgctgtgaagagacaccatgactaaggcagtgtataaaataaagcatgtaattaggggctggcttacagtttcagaggggaatcatggtggaaggaaggaagcagcctggcatggctctgcagcaggagccgggagtttacatcttatccaaaagctggagctggagagagcgggactgggccccgtgtgggcttttgagaccgctgctctcatggccctgcttcaaacctccaggcaggtgtccagaagcagggctcagcatggctgtcctctctgcacagtgcccgggtatgctcctgcctgcaaggcctcaccagccacgtttcctccaagtattctctcatcgacatgcaactgttccccttcctggtacccgctggcttctcaaatgctattatacactgtgtgtgtgtgtgtgtgtgtgtgtgtgtgtgtgtgtgtgtgttataaacacagcatagccatcttatctccctcactacacacacacacacacacacacacacacacacacacacacaaatacacatacacacatatgcacagacacacaggcacatacacacacatgttaacacatatacataaataggcatgcacacacacacacacacacacacacacacacacacacaatgtacacagtggggaaactgacccccagtaaatgttcaatgctctgggtttgcctattgttgtctcggtgctctagttttgcactgatacactttgctgcctttcacagagtatagtaatatggcacctattttctcagatttatttactttatgtgttgggtgtcttgcttacatgggcatctatgcaccatgtacatgcctggttctcacagagctcagcagagagcatcagattccttggaactggacttacggatgattgtgacttgccatgtgggtgctgctaattgaacctggatcctctgcaagaacaagtactcttaacccgtgagccattccttcagccctcatgtggggtcttacaaacggtaactggcagatgagtgaacaaaagctaggcaaagcatttgtgaacagtcttaagctcttcactagtggcaatggatctgcaaagccaaggaagaatctgtccaggttcaagtccacatactcaccaggagaggcacagttaccgtccacggactcaaagctgcaagcgtatgtgtgtacaggaacataggcagccgaagtattgagggacgggtccgaaacgatgacattataaacaactccttgtccccaaagggaagagaaggacacagttgttttatcgtctgatgtcagggtaaccacctaaagccaaaacagcaagtggtgtgtgtacatgacttttaaaagctgtggtcactgcggttacctgcacaaaccaagccagtctacactccagtgtggagtctccaggagctactaacagctgatggcttctgggacgggaaagtcagtttcctttttcacaagactttatttttaagtgcatatgcttgagtgtgtgcattgtgtgcaatcctgcgtgtgaatgcacacttgtgagtgtgggggggtgtcagatcccctggagctggggtgagcctcagtcctgagcctccttgtggtgataatatgatttatgatctaataaagcaactggagctaaaaatactaagctagccacagccacagaaccatggtcagtggtcagtggtggccacacctttaatcccaggactcgggagacagaggcagatgtatctgttagttcaaggccaccctgggctacatgaaattgatccagtctaagagaaaaacagctcacacaaaggtgatctcagaacttgggatcccacactttcaatcccagcactagggaggtggagacaggagctcagagactgcagcccaaggcgtggtggagaacagcgcagtctaccttgcactctgaggattcgtggggacaggatcacccaggatggtctgaggtagatgtaagagctagtggccggctgctttgcttatctgatcttcagctttaaccccaatatctgtctctgggtgtttattattcttgctacaccgcctgaagtgagtgctgggaactgaatccaagtcctctgctagggcagccagtgctgtcaacagctgagccagctctccagcctgacagttttctttaagagtgtacagcccagtaggttggcccttctccactggatggtcatacccatgagtatatgcgcagcacaaactggactcagtgggttatttgaaacaaacaaaaagacacaaagttgggagggagttgggggtggaactgggaggagttagagggaggagttgggagtaaatatgatggaaacacatggcattcatgtatgaaattctccaagaatcagtaaaatgtgttaaaatattaatgccaatgtgtatatccttcagtggtttctcagtttttaagacatctccccttacacttgccagaagctcttacctaagttactgaagtgtacagaaattcatcacctacttcttctcccaccaggatgatgaggtcacgatacggctgccatcaaaagagagctgactggcttctcctcaaaggctaacaacatcacataagagcaccggacccagccacataggcaagaaccagactcaccttgaccgcactggccttcacctgtgacacctgggccatcctctgcagatgctggagtagtgaggcctcggtgaggtcgccctcggggagaaagtactggtagacatcataccgcagcctccacctggactcctggcccgtgctcacatcgcagggcggaggctccgcacctctaaagccaaccaacaagactgggcatcagtctcttgtggctcaagtccttctgcagacactattccactttcacagctgtgagtctaagtggtactctggagaaaagcagtacacagcgatgggctgggctggtgttgcccctccctgcctccagtgtgacggtactgaggctggctttggggagataattagatcttgaagtcctcctgagtgggactggtgtccttgtaggtaggtgaggcccctcacagctcccaggcactcttccctcctcctgtggattcaataagaaatctgcaacctgcaggaggcccccgccagagcccaaaagtgccagcctcagaagttcgagaaggacacttctgggtgtagtgcacagctgtaacctgggaggcaggaggagcatcagtgcaagatcaagtcaagcctggtctacacggaaagttccaaaccagccagggacacattgaagcaaataaacaaatgcctacaaataacaagtaaatttctgttgttcagaatgcacccatgagtttatggtacagactgctgatcctcagtctaaggatctgaaacctggactccgtgggctccaccgtttctgttggtattctgggttctcagattagggatgttcaaccatcaaggtccatgcaagtttcaagcacttctggccccaaatgtttcagataagggattcttaaccgattctttatgatatcagctctctctctctctctctctctctctctctctctctctctctcacacacacacacacacacacacacacacacacacacacaagcacatgcactgatatgaagtgggttggcacagagcaatgacacttttgctctctgaccatgtaggtcaagtgtgtgtgtggtagggagagagggaaaaggctctgcggtagaacactgatagagagaaaaggattaaaataagagctaagatagggccaagcatttataactaatagttaagtctctgtgtcatgatttgggagccgcttggtggcctaaaggaaagcctgctacaccagggcacccagtacctctggcctttatagggacctgtacttatgtgcacatatccacacagacacacatacatacacacacttaaaaataataaaaataaatctgtaagtggggcgttggtggtgcacgcctttgatcccagcactcaggaggcagaggcaggtggatctctgagttcaatgtcagcctggtgcacagagtgagtgccaggacagtctccacagcaataccaagaaaccccatctcgaacaaaaaacaacaagaaatctttaaaaaaagaaaactaagatgtacttccaagctcacatcacacctgtctcttcaagtaaagaactcagaagtgttgagatgattcagtataaacaatagctcaaatattagcactgacctttaaattatgccaacaccgccccaaacaaacaaaaaagacagtccaacttcagcatagcaaacatgagctgaggcagctggctgggcctgctctatgtcatgagtgccctaagaggggtttcagcctaagaggggaatcggcggccataccttgcatagcccaggttagctggtgcaaacttgatagttgtttcaaaaaaattatagtccaagtaaatgttgggatcaatatctaggtcaaactccaaattacagcctccaggaatgggatctgggtgggaaacggtgagattaataacccaaggattcttaccatgcgccaggaagcgtccttcccgagaacctcctactcagcgtgcagcacccatcatcgctgctgtgtcacgactgatgtttgcaagtgtacagttcccttactccctttccttcagaatgcctttgtcaaacccagggctgtgtgctctccaccacagagctgtccccaggcccactccccaacagtctgcgtttcctcaccctatgctgttgaaagaactccctgactgactaccgctctgtcactcagacactgctggtcacctctctggacttttctggaacttactatgcaccatcctggctcaggtgttcctcctacccccagaggtctcctcagcactgtgcctatacctctgtagttatcactgttgagggcgtatcctttcagaaccccaaggacaggacagtacagatgcctgaacactaacaacaccaccccaatacagtgcttgacatgtactcaagaatcaaatttccccgggtgtctcagttcctgtttgaacaatcctatgcatggccttggctttaacaccagctgtctctctcatctttctttaccccaggtcagtattctaactgccaactctgaccttccaatcaggtgtcctacaagcacctcagactcactgtgtcccttacagaagtcactactgactccatgccacccctaaaagacccaggtccccgaacagccccatatctaaacctgtgtgaacagccccatatctaaacctgtgtgaacagccccatatctaaacctgtgtgaacagccccatatctaaacctgtgtgaacagccccatatctaaacctgtgtgaacagccccatatctaaacctgtgtgaacagccccatatctaaacctgtgtgaacagcacctgtgtaaacagccccatatctaaccctgtgtgaacagccccatatctaaacctgtgtgaacagccccatatctaagcctgtgtgaacagccccatatctaagcctgtgtgtagcacaatctcagctatgtcccctctctgatgacgtgcagtctctgcaccggttccccaggcctggctcaggacctgtgttcagactatcatccttacaggtgtacccagtcctgactcccctctttcttcctcatgtagctcaggctggcttcaacctgccacggagcatactctgaactctgagtcctcttgcctccacctgccctgtgctggattacaggcaaatggcaggggccagttctctggacatggagcccagggtatcacgtatgctgggcaaacactgaccaaccaagctacatcatcaggccctctatggtcagctttctaaagaagaatagacgacagcagccctctgcccaaactcgccacgcttcctctgagccctccttagtgctgcatgcaaactctcaaggctctttgctctccggctctagacacatccatagctctccagacccgcacctccgttaggatgagcacactgccatctctagatataacacatagctacgaagggctggttctgatgctgctttctctgcctctcttactctgaaacactcctattaaataaactattttgccagactagttctcctcaggtttccacaaacgaagctcacattccacagatgaactgagacaggaaattacctctttctgagtaggagagtggaatggccacagtttgaacaggcttggcatctttcgtctccaaataccaagtgcacatagtctgctcaggtctaagcatgaaaaccagccctctgtcattgcctgtccccgaggtgccgggaaggagagtctgcatttggaaagcaaagccaccgtgaagacagaattgagaaatcacatacactgcagagctaacccatctgtacagccctctccaaaccgctcaaaacaaaaagaaaaaaagtctacttaaagagttttcatctctacgttcatatgtccacaccttcgcatacaggaggactccctgaatcacaccgttattaagggctgcagatgactcgacagctaagagcactggttgctcttccaaaagacctgggctccacggccagtgttcacacgatggctcacaacagtctgtaactccggttctgggggatccgataccctcttctggtctataaaggtaccaggcacatgtgtgctacacaaacaggggtgtattggcatttgtataaaataaataagtttagcaatacatactactgcctcagtcagtttgaactgctgtgatgaaatccgacaggtttcggggtttataaaaaacacagcagactgaggaaggcattcttgagggctgttttatagggacgctatcttattggtaaaggctgtctcatgagcacctcccacttatggcttctaagaatctttatgtgtatatgtgtgtgtgtgtgtgcaagtgtgaacatgtgcacatgccaaggatgtgaacacaccactggaggtcagaggttgacactggatatcaccctttgtccctcaccgatttattattttatttaatctatatattttagatttgttatttgtttcgtgttatgtgtatgagtggttcactgcatgtatgtacgtatgtgtgccatgcgtgggcttgtggccctcagaagtcaaaagagggtttcagatctcctgagactggacttggagatagatgggagatgccctgtgaatcctgggaactgacccaggtcctcttaaccgctgagccatctcgacatcccctccagcttagtttttaaggtctctccctgaacctggggctcactgattggctagacggaccagccagtgagccttgattccacctccccagtgctgggtaacaaacccataccaggcctggctggatttctgttttgtttggttttggtgggttctagagatcaaactcgggccctatagactgtgccatctccttagccctccgtttccatctcaagtgtcatggcctgggtttcattcccagcttgacgggggtggtggggtggtaaacaaaaactctaggaattgtacattgaacttttcaggttcaactgaattaagatttattctgtcaggttctgagggtagcaagacaaaacaggagccttggccccaaagagttcagtttacaaaaagcttttgttttaaagatttatttagtgagttacttattttttttgtgtgtgtatgaacatttttgccagcatgcatttctgaacaccacatgtgtgcctggtacctgtggaagccagaggagggcatcagagcctctgaaactggagttagggatggttgggagccaccatgtgggtgctgggaaccaaacccaggtcttctgcaaaagcagccattgctctttaaccactgagctatttctccagcctgccggtagacctgctcctttaagacaagggtccacgtaggccaggcaatcccagcctcatagagcagccgaagctgtccttaaacccttaatcttcctgcctccagacagagtattctcctaagttcagggaatgaaaacgggaaatgcactaggtgtgtttcaacttggcaagcctcaaagggagtggtaagagtcagtggcctcaaaggaccagttgccatgacaaccaaaaccaaacacccgagtgccactcgccattggaaggggcagagaaagaacactgcttttcacagttatttctagagccctgtgcagttcagactgtgaaccaaggtaacacagggaaccctaggcaatgagatcctgtgactaaagatgactgggccttgctggagaccaggcccacacataaatagacatcacagtctaacacacaagacttgacattacagagatgatctccttactggaataccctctgtacttaccttagtaaatgaaaccgtggtgttctgatattgtgagtgtatttggaaaagaaggaaggtcacattgcctgaaatatggcgcagaatggcctcctgtgggaggggcctgctgagcagaaggtgtgtaaatttccccacagaaaattccaggaaacctacaatggaaaaattttctcattacaatattacacctcttctatcaatttatgtaaattccattcaaaaaaacatacaatgccaatctaaccctcagaaaacccccctgagagccaggtatggtggtgcatgcctgttatctcagcacttgggaagctaaagttgagggatctatgcaagtgcaaggctagcctgggctacagatcaagaacctgttgttgtttgggtggtttgtgtggagacaaggagacacagacattgcaagcctgaattcacagcagccatggttccctgtactaggcctgtgtatgagtggccctgtcaacaatcatggataggagaggggctcggggccctannnnnnnnnnnnnnnnngctgaattataactaatgatacagtctagggtgtcactgccttcagctgtgtacccactattgagcccatcagtctccaacaggtacttccaaacccatgtgtggaaatgacaaaccatttcatttgttttttcaaacacccctctcttaagaacacaaatgtgctttctggcctgtctgctgcagtggggtccatgttcctggccctcgggcatcgctgacgtttcactgtgcaaggagctctcggctcatttctgtcctccattttctggtttcattcccaccacacacacacacacacacacacacacacacacgcactcacacacacgccctcattctctccatttggcaagtatcagcaagtacttataaaatcactctgcagctaaaacttgggccagcaaattcaatacagctcatctctcccaggcgcctgccaccatctctggcgcttgcctctaatgtgctctagaacatgttcaggtggccattgttgtttcccatggcacagactctgagccacaacagctcagaaggcctggaagagactgtagctacctctagagatatgctggtggtcaacccaatgctcttcagcccatgatttccaagacaccaacatcctagaacgacagcgaagaaccacaggccaaaggctcagcagttaagagctcttaactgtctgctcttccagacagttcccagaacccacatggcagctcacaactgcctgtatccagttggggggtccctcgtctggcccacctagagagccaggtacatatgaagtgcacagaagtacatgcaggcaaaacacctaaacacaataaaataaaatcttcagagaagacacacacaggagcacaggggagctgactgaggaacctgcctgactctattttaaagacaggaaccagatgctgtaataagtctctatttactgtgagagctgagagagctgagttgttctctgtttcctaaaacctgaccttccctaccccgtgacctggatttgtttttgagaataccccagcttccctggccctccccacccctccctaatcacagggggaacacatgactctttctaccgatttgtttgtatttccttattgccccattgcctctcttctgtaaaagtactcatgattttactccttaaaaggggcccaagagatggactcggggctgctctctttaacccagctttgtaggaagctggggccaactcttgggtgcactccaataaaaaacaagcttgcttcaaacttggttcaaattgtggtagtggtcttactctcaccgttgggattaacgctgataacttggcgaatgatgtcatcactgagagtacacgtcaaggggctttctttacattcctttttcaagtttcaaagtgttcttaattcagaaagaaatgtcataatttgacaaaagctttcagctttgacagcctcaagattcaagttctgcctgagtctacattttaaattcattaaaataacaaacaccaaaaaaaaaaaaaactatgttcaattctcattaaacaatacgggacacctgagcacatgtctactgcttcccctaatgcagacatccatgcccagttgtcactctggtacgggtatcaccatccctcagcatcctcaggatgcaggtgccaaactctctaaactaccagtccctgaccatgcctcacataaaataggtacatgcataggagatgaagagatggctcagtgggttagagcacctgttgagcaagcatggggacctgagttcaaatcccagcacccacataaaaaagccaggcacacacacttgtaattcctatgctacagagaacagagacagaaagatctctgtggttttccagccaccagtgcagctcccagttcagaaagagaccctgtctcaggggaatcaggcagagagcaattgagcaggacgcctggcaggctcctaacatctcttgctgcttgcatgcatgcacacacttgcacagacacacacatgcacgtattttgaaaatggtgttgtgacagacacacatccacatgcataatttatccgtggattatttgcatacctaacggaagtgctccatcatcacgttgttaagagaacgacgacaagaaaaaaaaaaaactgtccactttagcacagttgcactttttgttgtttgtttttggttttctttttggtttttcgagacagggtttctcactctggagaccctgtttggtaattatggtatgcatgctcaatgagatactaaatagctttaaaaggggccaggctagaattacccttccccctcagagctggcatggaacccggggcccatacctgaatcacaagtgctctgccactgcgatacggcttctgcccctgaattatcaatatctaaggcctagccagtgggctgtcagacagttacatatctctcttcttgcatgtatatggaaataaacattagacatcttgatactaagccttgaactcagagttggactccatacccacaagctttgtatcctgctgattcaatcagccggagtgaaaatagcgttttaaaagtgcatccgggcgggcgttggtggcacacacctttgatcccagcactcggcgggcagaagcaggcggatctctgtgagcttgagaccagcctggtctacacaagctaggtccatgataggctccaaagctacacagagaaaccctgtctcaagaaaaaaaaaaaaaaagtgctatgtgaactgcagatgactcagaggttaacagcactggctgctcttccagaggtcctgagttcaattcccagcaaacacacggtggctcacagccatctgtaatgagatccggtggcctattctggcctgcaggcatacatgcagaaagaacactgtataaataaataaataaataaataaatttatatataaataaatacatcttaaaaaaaaagaagagaaaaattactatgcatagcatgtatacttttaatctcggtgctcagaggtagagacaagaagagcggagtcaagattatccccagttagacagtgagtttgaggccaggctgcacaacatgagactgtctcataattccccaaaataaaataaaatagttctgtctttcaggagagtgttctaggaagcatacaggtcagatgactattgcatgtgagatttttactgctatatagtgacagacggcctttgcccttacagttaaactatacctaagttgtattcctgtctgaaaactcataaatgaaaaccaacagcccgagagactggtagggtgcaggcctgaaagtttaagctgaagtctctgccttcaagaactccacccaggcttccaggaacattgagaactcttgcatggtgtgggctgcatgtttagagatggcgcttcctggaggccccgccccccacacgcctgtgacaagaaccaggcagaagacggataatgaaggccggtggggagacactgtcaatggcatctaaaacccggtcctgttgctttaacatcggtaacattgagaacggatgccttaaattatttctcttttccaacacggctcctttgtcactattctgtagttatcagaagtatccttatcatcaggacattacaatacatcctggttgttggtgacactcatgtggaggtgatctgatgcccagactctcccataccactaaaataaaaatccctagcaatagctgcagatatgaatgtaaaaacaaacacttgttcaaacagcatggagaaggactagaactaaaactcagttgccagaggtcttgactagcaccgccaacaatgcttaagcaggtgattgttgctgtgatctccacgctggggagatgggtggagacagaaggatcagaagttcacatcatcctcagctgtgtgggtagctcaagactagcctgggctatacaagaccctgcatcaaaaaacaaaacaaagttctccaggtaactgagaactgcaaacatcatgctcggtgagtgagagagacatacacacacctctccattcttttgttttgttttggtttctcaagacagggtttctctgtagcatttggagcctgtcctggaactcagtagaccaggctggcctcaaactcacagagatccgcttgcctctgcctccagagtgctgggattaaaggcgtgctccaccaccgccccagccggctacctctccattcttaactgagctgccttgtgtgtgggaacaactggccatccaagaaccattgcacaatttgtatagaagactgcattttaacccaagcttgggtggtttccctcctagctatgcaggtctttgtcatatctcatgatccagtgtctggcactgtaccagtcgcctggcagtcaatgcttgttcaacagagactgaactacgtgacctgaggccaggtatttatttcctctgggcctgtgttctctcacagtgaaagggagggaacggggctacagtaaccactgggctgcagagaccaccagacacaatagttttacagccatcagatgctgcgcagtgggacgccgagctcccttggtttgccagtgctttggagatgcagagcctggaattaaaagagcagccaaaaatacccaggcattctcaaactggctggccttactgagaacggagcaggacgggagacgaagagatgctgggattatcataagcagcaatgaggggactcccacagagtgacaatgagagatactcagtggtggggcctgggggacagcttagtggtggatgcttgctcggggttctgagttcaagccccaacaccactgaaagaatgggggggacgacacataactgaatgaggccctgggcaggagagagggagagagagaagagagggagagagagaaagaaaagggagagagagagagagagagagagagagagagagagagagagagagagagcaggaggaggaggaaagtcaaaacagcttctacagcatacatgatagaaccgttatttaatttccttttgtttggctttgttgtatttgttttctggtacttcagaatgagcccagagccactcaagcactaagcaacagtccaccactaaaccacatgcctaggccctctttaatatgtgtatttcaaggcagggcctaagttgctcacgctgcccttgaactcactctatcgcccaaatgggccccgaagtttcagtcctgcttcagcttcccaaagagctagctgggtcaggacaagcctgagacaccagacctggctgcaaactgcatttcatctctcttcacaagagacttggcaagagaagacacccccaaaatacatcctgcagaagttaataggagcctaacttcacctccaagccatctggaaaaggagtcaccagaagcgtttggcaggcataattacatcttatgactgggggtgggaagaagacatcaaagggccttacagccaagatggcgaggttactcacactgcactctgtgcctctgcttttgtctgacattttaaaaaacaccccaactgctgcccgaatagaaggagctggttttctattttcacgcacactttccatccttaatcggataattttttccttccactaactccatcctagaaagaccttccactcctaatctcttcctccttcccaagaggattttatttatttattatgtatacaacaatctgcttccatgtatatctgcacaccagaagagggcaccaggtctcatatcggatggttgtgagccaccatgtggttactgagaattgaactcaggacctctggaggagcagtcagtgctcttaacctctgagccatctctccaggccctcagatccctatcttaaaaccacacaactcctccctttgctctggtactaaaatgaacctctgacttctctccttatctatccgacatacaacagtcaactttaggagcgctgacaaagcctagctttcctaattcttctgtccaaacactctgagcaaaaatgacccagctacttcagcggactgacattcaattgtcccttaccatttttatttgcttgtgagttgttggtttgttttgaggcagggccttgttatgtatcctacacaacaagggtcctgtcctcaattccacaaagtaaatgtataaattaaaaggacacacaacaatgaacacatggccttccgtgtggaaggaagtcaccacgtccatctgtactgggcccatagccctactcaaagccctttccaaggtactcaagtcttaaaggctgggtttccaggtgagcaactgggtgtgaatctaaaacaaaaatgaaggcatgtgggcgagcagagcatgggactccaagagaggggtgtctgcttggacatgcagattactcctccccagcttgtccagcaagcagcttcttcagccaacccagaagctccatctctctcccaaccctcactaagcatcaagccacgagctgggtcctcggtcccctcatccccccgaggtctggtagatccttctaaattacagtggtcgtccagctgtatcataacaacccagttgtgtctccgtgccagccaggcgtagggaattccagcgtttatttgagctgctgagctccctgggtcccatccctctccttcacaaaactatactaaccaagggcagaaagaacagcacacagccacagtactaattttcaacttaatacttttctttcttgatttttgtgtaaaaaaaattctagatattaagtactgaaactccaaactagaaataaaacaagagtctggcacccagccctctccagactcagaggctctagatcaaccccaaacgcaagcgctgcactctctcacctcctcctgcagaaggttgtttcagagacaaggattcacagaaaaactacatataaaccctattgctgtgaaagttctttttaagatggggtctcatgtagcccaggatggcctcatattccatatgtatttgaatctgactttgaactccaccttctgaatgctggggttctgggctcgtacccccacaccaggtgcctgtgggctgggggcggaatcaggacttcttagataccaggcaagcattctaccaactgagccgcatctccagtctccctgagcaaggtaaccctttccagaaagtggctttgctaaagtataagggccctgaaatttgctgggagccacacgggtgttggtgtcactacctactcctgcgtgaacatcttgagcctccagcggagataattatctcccggggctttgagtgttggagtactcagccgaggaagaccacctagcacactgccagaggaacacttctcttcaaggaaatagtgtgtgtgtgtgtgtgtgtgtgtgtgtgtgtgtgtgtgtgagagagagagagagagagagagagagagagagagagagagagcacgcgcgctcgcacgttctacacacgcatatctgcagttttcaacactagccttggctgcaggaaaagttcctaaagtgcagcctacccaaggcttttcagagataagcatctatcccgtccatcacccagaagactattgttagcactggtctcaagctcaagaccaggaatgtacttaacttcaccaggaaaaaaaaaaaaaaaaagcaagtgaccaccgcctggcacgggtagagctttccccatttcccattatcgcccacccgaccggagcagtcgtgaaacccgctcctcccggcacacgacctaggattcccagcccctctccaactgcaaaatccgcccgtttggagaagcatctagatcttggagtgtggaagccacctgctgcttggcacgcctcggttcctcgacagacgcggcggtgctgtgccttggccgaggcgctaggctttagctttagtctgtctgggccggactctgacgccccaggctggcctcgaactcctactactgcctcagtcagtttgaactgctgtgatgaaatccgacaggtttcggggtttataaaaaacacagcagactgaggaaggcattcttgagggctgttttatagggacgctatcttattggtaaaggctgtctcatgagcacctcccacttatggcttctaagaatctttatgtgtatatgtgtgtgtgtgtgtgcaagtgtgaacatgtgcacatgccaaggatgtgaacacaccactggaggtcagaggttgacactggatatcaccctttgtccctcaccgatttattattttatttaatctatatatttttctctctctctcctctctctctctttctgtcccccctctctctctctctccctccctctctctctctctctcctccctctttctccctctctctttttctccctctcctctctttctgtcctctctctctctccctccctccctccctccccctctctctctttctctgtctttctccctctctctttttctccctctcctctctttctgtcctctctctctctttctctctctctctttctctctctctcctctctctctctttctgtcccctctctctgtctctccctccctccctcccaccctccctctttctctctctctttcttgggttttacagacagggtttccctgtgtagccctggctctcctggaactcactctgtagacccggctgttctctaactcagtaatccccctgcctctgcttcctgccatcgctgccaggtctcctgtgtctttctaacggtgcaaattaacttttcttcttgggatcaggtctcatgtagccggtggcctggaacttctgacctctggctgcctccctcccaaggaagataaacttgtatcttcactgatgaattttattttgttgagacgggggtcttgctatgtagcccacattggtctggaactgaccacagtcctgcctcagcctccccagtgtgcaattgtgaaatggagtacaatcgaggcaaggtgctcctagccacaaacaggccgttcactgttttaagaagcagttacgacgctgggcggtggtggtgcttgcctttaatcaactgtggtgtataggcaatcacccccaccccgcaaacacaccaaataagtaaataaataagatgtaaaaataaaattttaaaccggtatcaagaaatgctccaagtgttgtttgtaacaaaggataagcacttggcattagtcattggccagataacctgttagagccaaataaccccatgtggccctcagcagtgcttcaggaagtaactgactcatttgacgtgtttgggaaaaaggctattaatttatgaagcaacgtacacatggggttttcttccccttaaaatatgcatttatggttcagttcatagaaagataggcttcagatataccacgtgtagtcaatgtttaaaatactagcaagtagttgaattaatgatttttctctgcatatgtctatattaaaatgctacatttaggatctgcatctgttgaataagaatttgatttttaagagataggtttaatttttaaagtttgcttatccgacggcattgtcaacccaacctaaacccgaagattctccaaagaccgctgtttctttggggaggacagagcattgtcataggaacagatactgcagcaggactgcacaggacatcgtagaccaagggcataagaaggcggaggaaggggaagttattaaagacaaaattaggaggattacagcaggcgttttgaaacaggagccctttgccacaacgattaacaagaagagtggtgaccgtttgaagtgtcgttctgaggtgggacagtttctgggcctatgtccttgcataagggtgcttttgaaagctcaagtgtgtgtgtgtgagtgtgtgtgtgtgtgcgcgcgcgggagcacgcatgtctgctcgggtgtgtgtgtgtgtaagccagaggcaaatcgtggatgctgttcctcggaagaccatgttggtttttaattatttttaaattttgttttgttttgttttttccagacagagtttctctgtgtagttctgactgtcctagatccagctctgtagactaggctgggctcgaactcactgagatctatctgctcaaggcgtgtgccaccactgcctggcctggttttccattttttaaaatggagtctctcacaggcctggaactcagccatttggctagggtgtctggacagcctcaaagatctccacagcctcagaaagttcatggtttcagttaaaatgtatgcaaacattaactgggcagtggtggtacacaccttaatcccagcactcaggaggcagagggaagcagatttcatgggctacagagctcctaattctagcacaggcagtgctacacagagaaaccctttctcaagagcaaacatgtatgtaaacatttgagtcttgtctggaggagaggctcttactatagcttggattttaggagtctcccactagtccacatgccacagacatttcctcagaatgttactgccagaaagtgacaaaagctttaagaggtgtattttaggaggggtcactttaggtaactgtggtggcccttaaagggggtactggagtctgggtctcttctcctctctctccttttgtgttctgaccatagaatgagttccaccattacaatctgctgccacttgggccaaactaataggcccatcaataacaggcagaacctctaaaaccatgagtaaggtgtcttttgttgactggctgattatctcaaatcatattgtagtatcaaaaagctaacacagacccacagccttaacaggactcttcaaatagcgcacagataagtcaggaaagccaggggttgtcggggaggggctgaagttgatgtgcctagtagaagagtcttaggtatgactaaactctggccaagaatctttggccattgcaacgtgggttgtcttgaggtggcctctgtactgcagacactcaagttctctcccactgggctgaaaaactcagaactctgtattaagcccatttaagtgataaagtgattaaacccacttaaacagtgatacgctacagcctaccaacagatcacagtctgttttaacatttccttcagaaatgcttaaccaagctggaaagatggctcagcctgtaaagtgtttgctgcacaagcccgacagcctgagatcaatccctgggactcactgaaatccctgactccactttgaccttcacatgcatgttgtggcatttgcacacctatgtatcacacacgcacataatgtatacatacaaaaataattttagaatgcttttgtttttgtccccactcttaatttttgcttttgtataattaaaaaaaacttttaaaatttattttatatgtttgggggttttgtctacatgcatgtctgggcacaaacccagagatcttcctgcctctgcctttcgagtgctgggattaaaggcatgtgccatcatcacccagctaactttttgttttattagacatgctctggttatgtagcgctggctgtcctggaaattggtatgtaggccagtctgatctcaaactcagagatctatactgggtttaaaggcaagccttaccacacctgaccattaatttcatttataagaggaagtacaacacgaatggaggttcccagtttgtccacaaaggtaaaatgtctgttggtggaaatgaagagagctgcaaaaaggaagtaggattttctagaaatgggtgggataaatcctagaagttgagatactcaaaaatgatttcctcaatatgactgcaaaacgcccttcaaattgttggaattttaaatccccaaagtcacatgttaatagaatttaagaggggagaccttcagaaggtgatagggtcctgtatagtttggatcttcagagccccttaaaggcccatcagtgtattaatgggctacaatgtgattaaagtgttcttttgggcactctggttctgccttgtaacaggccccaggtctcaacacaactgattatgacggaagtaccatttgggtcatttatgaattttaactcagcatgtagacagcaccacctgccaaacaaagacctaatcaatccatcaaagtccagagtttggggaaagtctctgaatgttctcacttgctctttggcttctgtagttaaacttctggctaactgttaattgaagtatgtctagccggggagtggtggcacagacctttaatcccagcactcaggaggcagaggcaggaagatctctgtgagtttgaggccagcctggactaaagagcgagttccaggacttgttccatagttgctgagaaactctgtcttaaaaaacaaaaacaagactacaatcaacaaaacaaaacaaaacactgaagtatgtcaacccaggatgtggattctggtgcttaaaagctcaccctgaggaaggcttggtgctacagtgggatcctgaacacccagtgcagtcgctggctagctaataaagacttcctattggcttaaacccatgtctgagccgtcttctctagtggatccctgcaacagtctcactgtgttacacctttctctgttggattcatcaagatctcagcaccttgatagtggacttcccagcctccagaatgctgaagtaaatcaagtgtgctctgtaattacccatctgtgttcttcagttatagcaacagaaaacaggctaacacacccacccacctccaacagcaggaggataaccaggaagagtcagtctgctaactatgataaagagtttgtgggaaacccaggaaccaggcatttgcagattacacccaaactaacagaaataaccttcctgctactttttctttgggccgccagatcacaaataacaacacagtgacattgttaattaattaggaaagttcagccttaatttaggcttgttcctaactatttatttatttatttttattttatattggtgtttttgccatgaatgtcaggttccctggaatggagttacagacagttgtgagctgccatgtggttgttgggaattgaaccccggtcctctggaagagcagtcagtgctcttaaccactgagctatctctccagccccaaattagttcttataatttaaatggacctgccctccccccagggtttctctgtgtaactttggaagctgtcccggaactcgctctgtagaccaggagggcctggaactcagagatctcctgcctctccctcctgagtgctgagattaaaggtgtgtgccaccatgcagggcaacccatgttttttaatttgcttgcttttatgtaacttgttacctttacttatctttacttagttttttattacaccaatcacagccatacatcttcccagtgcgcatcacacagtatcactcttcgcatgtaaaactatcaaagatctcaattctaaatctaaattctgaacctgcctaacttgcttattttcctggaacctctcttctggccccagggcccttccctttcctctgaagccttctcttcctcacagctacagaggactgtgtagttaactgtgctgactacacacctcttatctccaaatgcccatctccaaatgcctttcacctccaaaggtgaaaacctttgcctgtcattcctcaccacggcacagtttaacgcttagtttcccacgcttcccatttctgctgtgtcagtttccccactcaagaattaaagcacgaatctagcctacagttgggcaagcacctcttggcccaatccaacaagacacctaactaactcttgatttcctggcgaatgataatctgctgggtttaaccatttgtgaagggttcgccgtgtggtccacctggaaagcacaagtgaaggaaaacaagtgttccagatgacgcccaaaacagaaccccggagccacacgcaagcaaaacacaccgcgggcccgccannnnnnnnnnnnnnnnnnnnnnnnnnnnnnnnnnnnnnnnnnnnnnnnnnnnnnnnnnnnnnnnnnnnnnnnnnnnnnnnnnnnnnnnnnnncccccggctccgccctccagacccgcctcccagacccgcctccccggatccgcccgctccgcccgcctccccggccccggtgagccgcgggatagccccgccctccgccgcagcgtgcgtccttggccacgccccctggaagggagccctgtgattggcccagagccgccataaattacccaatcgccgctgagcggggagcttcggcgtcgctgcgtacgcgggaacatggcggatcgcctcacgcagctgcaggacgcggtgaactcggtgaggctcccgccttagtcggcctgtccttcccgttcttcccgttcttcccgtccttcccctccttcccgtccttcccggggaggggacgagaggagaggagaggagggccggggagaggagggcaggagggccggggagaggagggcaggagggcaggagggccgcgtcgagcggatgttcacaagggcgatttttgttttgtgttgagagagtctcccgcgtacccccctggctgacctggaaatcactgtggagaccaggttgtcagttaaaactaacaaaaaacaactggggagtcataaaatctaaacaacagaagctcctgaaaactgctgccttccataaccttgtcccttctggctgttactctttttggtttttgtttgtttgtttttttgggacagggtttctctgtgtagctttggaggttgtcctggtactcgctctggagaccaggctggcctcgaactcacagagatcctcctgcctctgcctccggtgtattgggattaaaggcgtgccccactaacgccctgcctctgagccacatttttaatcccattaatcccagccctctggaggcagaagcaggcaaatctgagtttgaggccagccccaaagttagttccaggacagccagagcagtgtagagagagaccctgactccaaaaaataaaataaaaaatgtttctgcttattaccattaagagcacaacacttttccactggtagttaaaaatgtccgtgtcatcctggttgtagtttgttctaggtaaagtgcctgtagagtgtctgcctactggaaaaaaacaaaacccagtccctggcctgtgtttttcttacagaaaggtcataacttggcttcttggtaatacatcacttttagagattgtgaatctacttgtgggaaaactgcctactctgtaaataaagtagtttttaaattgaggggctatccctaaatgttggtgaactcaccaagctaaaatgtaaagatttccctgggctgccagccattctctcccaagaaagtactcctttgaggttttaaaaatctcttaatgcagtgtaggagcttatctcagaatttcgtcttcgtgtaggtcctgtagctagggtggtaaggatgctatatggtcttgactcatgttaggaatactgttaatttagctaacttggatgcctactgtgtcaataggcaatgtgtttacaaagagctacccctgggggagcttagaaagatgccatgaactcaagagactttcagatgtgaaaccccgttcatggctagggagttagagtaaactgctttcagttcttcagtgctaaagtagattggaacatagagcagtgttaacatttgttctaccatctggaaacatgttcatctctataatatttatatatagtacttgccatggggttcatttttcaataaatatgtttttgaacagatgaacaatgggtcttgaaagcatttgcaggacagaatacataactactgttctgaataagtttcatttgggtttttctttgtcttaagacagtgttgcaaaatggaatgctgcaacttaaaataaagtcacccaggttagcttttaatgacagctcagatttttgtcattgaaataatgacagcaaaataatagaaacaatagaaatgctgtttcctgattggaagattggaaataatagttgaggttccagggattagtgagaagttgggtgatgggttatacatgtgtttagtttgcagatggtgtgaacttgtgttttcaaattacttgactacattggttttttttttagttctgccttttttgagagagtctcttatgtaactatggctggcctctgcctcccaagtgctaggatggaagttgtgcactgccgtgccccaacaacaaatacattctgagcagtaagattacaattggagtcttgtagaattacagttctgataacttacagtaagaaatttcttcatgtagtacagactggcctggaacttcctgtgtagttgagggtgaccttgaacttgggttcttgcctcctgattaccagaattacatgtttgcgatgttactcctaggtttctgtttcagtgctgagggtccacttcgaggcttcaccatgctaggctagcagtctcccagctgagcttatccccaatacgcccactatttgtttatatttggtagctgctctgcacagacaagagatcatgtgctttgtacaccccaattttgaacctcaggaaagaacagacaatcattcttgcaattagaatagaatgtgttatctaccagttcgactactttggtatcttaggatttgtttatagagttatgatttgaaagagtcttttttttttttttttttttttttttttttttttttttttttattttaagtattcctgtgtacctcatgggcgcctgggacccatggagaccagaagaggctatcaaatcccttgggattagagttacagttgtgagctgtggattcaaatcccttgggattagagttatagttgggagctgtggattctgggagttgaacccagattctctgcaaaagcagccagtactcttaagcatgactctttctgtattgcaatttctgcatctgctaggatggatacccataaacattcgaagagaggaaaacaatcacttcagctactttaggctacattgataccaaatttaatttcacctagactgataccaaacttaagtttaaaccatttaattcaggctagatgtaaatagattgctggtgagagtgtacgattagtgtatgaactccattgtttgtaataactggctcattttatctaaaaatattcctttctgtgagtttgcttagagatcattattatgaagaaattgttgccatatctcataaaatccataaaattgacaactctttttgtaaccttgattttttttcttttttttttcaagcttgcagatcagttttgtaacgccattggagtattacagcaatgtggtcctcctgcctcttttagtaacattcaaacagcaattaataaagaccaacccgccaatcccacagaaggtgaggtctccttagtttgactaacattccttctacaatttatagctcctttgtaaaactgtgactgtggttgaagtgcattgctctatgtttttccataaatgattttttagcatttatttacttggtgtgtatgtgggcaggcctgctatagtatgcttataagaggtcataggttccagacctgttctctcctttcaccatgtggattctggggatcacactgtggtccttagacttggtagcaatgtgggaggtccttctgtatgctatgaataagtgttgctttttttggttgatgaataaagctgttttggccagtgaccaggcagaatataactaggtgggaaatccaaacaaagatgcagagagagggggccggagagatggctcagaggttaggagtactggctgctcttccagtggtcctgagttcaattcccagcaatcacatgatggctcataaccatttgtaatgaggcatgccagaacactgtatacataataagtaaataaatcttaaatgatacatagattagtaaaaatgggttaatttatatgtaaaaagcctggcattggtagcacacgcctttaatcctagcactggggaggcagaggcaggtacatctctatgagttcaaagccaacctggtctacagagccagttccaggatagccttcaaagcaatacagagaaacccagtctcaagaaagaaagaaagaaaaggaaggaaggaaggaaggaaaagaaaggaaagaaaggccagtaagaagtctgagttatcagccaaacaattataaactggcgggtgagacagaaaacatgcaactacatgcccttatctgcaaagctatctcattggtcaaggaatgagtttatcagctcaattcatgtgcctcatgattctattcacttcaataaaagattgttactcccttagaggagagcttatgaagactgaatttctgtttcacctggtcccccagccctttagtcccaaataaacacattgaggcttatattaattataaactgtatagattgaactgagttttgcttgtatgaccttagtaaaaaaaaggatctcatttatgggttcatttgctcaaggtaccaaaatgttgtcctagtatataaaatgacattctatgctaattcccagtttgaattaatgttaagggtataaatagtactgatatactaaaattatactttcaccattaggattatattagaaagctgaacttttctagttttattaatttataatttgtgcttgtgaaaatgtaaggttttgctaatttaacttaatgttgtttttttttttttttcagagtatgcccagctttttgcagcactgattgcacgaacagcgaaagatattgatgttttgatagattccttacccagcgaagagtcgacagctgctttacaggtgaaaactcctttcttttcataaaagtagtagtgatagagaactttgaattaaaggaggtatggcattcaaattaggactaaagtttaattggaaggtattttgggttttgtttgattgtggttggttttttgcttgttttgtggtcaaatctagggtctcacatagcaggcaaacactctataattgtgaactaaaacagcctctgaagattgtgctgaatagttgtccagttttgacctaaaagatcagatcatgtgtattcgaggcagtattgacactgagcaatttaatcttaggcagaagtctcctaatgcccttactgaaagtggagcaaagtaacgtctacaagcaatgtacaagcaaacacctatatattctgattgaaaattagtcttcagggctggagagatggctcagaggttaagagcactgactgttcttccagaggtcctgagttcaattcctagcaaccacatggtggctcacacaatctgtaatgagatctggtgccctcttctgacctgcagggatacatgcaggcagaacactgtatacataatgaatacatgcatctttttaaaaaaaaagaaagaaagaaaattagtcttctaataagtcatagagaaaaattaaataggtatttagaattatctgttactaaagataaaaaaatgattggaaaaccattctgattttaaaataaatacttgtactttagtttctctgcatttcatctctgagcatattaaaattcatgtcttatgaaggctgctagcttatataagctagaagaagaaaatcatgaagctgctacatgtctggaggatgttgtttatcggggagacatgcttctggaaaagatccaaagtgcgcttgccgacattgcacagtcacaactgaagaccagaagtgtcacccgtagccagtcgcttccagattcctagcaacaacagaaacaggtgactgagaaaataactgtttgaagggcactaagaataccgcctcagatatgggcttaagtccctccaacagctggggggcatcatacgctgtgactgtttccttttttactagttttcactctcgatattaaaaagctttaagattgcgattgcaattgagtcatcctcaaacatcatgtcatttttttatctatctgactagaattttcaaggtagatactgtactaatgttcatgctataattaaaaagctatacaatacagctctctgatgttttgcatgtgttgtttttcttgttttgtgcagtacagaatggaatccaggccttgtgtatgctaggtaagcactttgtcactaggccatattccccggttctgacagacattgtatgattgcagcccatccacaggtcagcatagccttaaaggccatgatatgggacatttcaatttagatagtgtccccctccttaaagatggcaccatgtaagtttatatctttgagcaaaagtttctgaaagtctttttaagaaactattagagcagataggaaatagacagtcacctgaaagctttcttcttcagagtgtcacacattctagtgtaacacaattaataaaaacccagagactgatattggggttcaagctgaagatcagagaaagtagccggccactagctctcacctctacctcaggtgaaagggctgatcctcgagctccccaccaagcctcagactgccgcctctcctcactgaggatagagaataaatctccagatgaggccctttgctttttccttttgtacctcctcagtgctgggatttaaggtatgtgatcccaagtggtgagatcacctttgtgtgagctgtacctctttaggactgggtcaaattcatgtatctcagtgtggccttgagcaaacagagatccatctgcctgtctcctgagtcctgggattaaagggcgtgccacccctttctggttctatggcttgtggctgactttgctttctgtctcctcaggcaagcttcaataaatcataaataatatatcaccaaattatagtttgtctctgcctttgtcttcacaagtctttactgcccacagttctcttgtgagagtttttcatcccaaatcatgttcaaataattttaatttccctgtattcttaatttccatgtcttcatagtgaggtacatttcttgaattgtttattctttctcattctctttacctgaaggaacttctgcttttttttctttaattttattatgctgatacattttacatgctctgcctgaatttctacatgtgttgggtgccctcagaagtcagaaaaggatgccagatcccctggaaacagagttgcaagtatttgcaccataaacttggtattggaaatagaaacctagttctctgtaagaacaagtgtgctttttttttttaatttatgtatttttttaggtatcagtgctctgtctgcacgtatgcctgcatgccaatagagggcgtcggatcccaccttagatggttgtgagcctccatgtggttcctgggaattgacctcaagtcctctgagccatctctttagatcttactaacatgtaatctttattgttgtttttcaattagtatacttccaccatatcagtaactcagtggtgttttctctgttacttggatttgttatggctaacatttgtgtcagcatttgcaattggtattactcatccaactcttgattctcactgttgtccaagtcttaaatttctaaagaaccctctagaaaaatatccagagtgtttccttcccaccaagctctcctgtgtttcaaagttcaggagcaccagctctagctacaaaagttacaatagtttattggttaagcctagacatttttgaacttttttgttgttgtgacagttatttattatcagatcttaaaaaacctgtcacctccccgccaagaaaaccaacgacctaaatgttctgctctttcagaggggcagtcagtctttccatctgtgctggtcgtctggggtcggctcttttcagagaccactccttacccgaggaggcaatgcatcccactgtccatgtccccttcagatcttgcttctgttgcttgtaatcgtgactggcttcttacactgctcctgctgtgttcttagtaactggaacagaacttgacgtcaacagcaggcgaatgcctgtttctgtgatcaaatcataaaaggaagtaaaagattagccagtgtattctaactagtatgttttgttgacagggcatagctaatcttactgaaagcagggaaaagagtgctggattcattcaaggccctaagtattgtataacaaatggtgtaccccttatcactttttagcataaatgaaaaccataaaggaggtatcagcagatcaaaccatgagttctattaaataggggctggagatatggctcagtggttaatagcccttggtgataaatcattgagaacggaagtttggattcaagcacccatgtagcaggctgggcaccgtagcaggctgagcaccgtaaacatcttaactctagagggttggatgccctcctctggcctacaaatcacacatgtgcatacactcatagacaggaataaaattaaaataattttctttcagttatgtaatgataactctgccagcctcctgagttcccccaccatgatagggcccccaaataacacacagagattaatattagttacaatgctgctggccaaagactaggatttatttgctagctcagtcttaagtatcagccataaccattaatctatatattttataaatacttatcaaggacaccagcggtatgtgtcctctcttccccggggatcacatggagactctcctctttattatgtttcccagaatcctcctcctctcatagtccacctatcttgcttccctcttggccaacagtgttttattcattaaccaataagacaaacatacacacagaaggacttcccccatcatctcttttctgtctaaataaaaagaagggttttaacattaacatagtaaaatatataacaaaacagttatcaagtaagaactatagttataatatttaattcattaacatttaggaagattttaaaatctatctttgtgagtctaaagtagcttatcttataataactaaagaaaactataaccataactatctgtcttcaactccatcaaagaccatggaaggataatataaaaactctagaactgacagagacatctcgctgcctggacagtcccccaatgttcctctgtaacattgggcatccatattcagcccataagccacagtgtgtcttggtgacttctcagtgaagcaggaaatttcaaactctcatctgtattggcagtttatcagtcatttttctctgtgtcctgtagattatctggcagactcttccatgaagcagaaacattttaggactgtccatcttgttttgtatgttcagaaatcactttcctgtgggtcctgcatgtccagtttatcaaacactccaggcaagagcagtttcttgcccaaatgactaatcttgctggttgaaggcaaactccatattgagtttcttcaatgcccaccctcctttctgacgtatttggtgtgccaggagcaattgtgtctcactgtcatgaaaaaccctaaaccatttaaatgccaaatattctgtaggtctttgaaaggtttgaagaatatccatctcaaatacatctctgtatatctagaaaacctactaacctaattataagttctgactattataagtaattgtaaatctgtatttaattatgcattacattttaaaagatcagtataaacacaatacctaactaaacgagatttcaaatacatatcacaaaattgacctcaaatttgttatcaataaatgaaaatccattccaatacaaagtattcatttctatatcctattcccctttttttcctttaaagagattgactgtaatcattaccatttatataaccccatttaagtgatgatggggggatggggaatgtccttctgtgtatgtttatcttattggttgttgagtaaagtactgttggccaatgaagaagcaagttaggcaggactaggaatcaaggaggattctgggaaatgtagtaaagaagtgttgtgatccagacaggaagtgacatagcagggagactcagaatataagcagggacaaagaggaaatcgtcctcttcctcttccttctgctctcttctctacagagtctccatgtgatcccggggaggggacaccagcggaagatgtcctcgataagataagtcttataaagtacatagatttatgataattaagactgagctagcatataagaaatcctagtcattggccagcagcattgtaaataatataagactctgtatgttattctgggtgcccacatggcagaggggcttgggcagatggagtaaagacttattgttacaaatatttataagcaatatttgggaatttgggcattgttcattccaaactgcttcctgctggttgggggcgatgtccataccatggggatcatgataaaacacagaaacctggccaggtccttgtttttgtagtctgtaaggctgtatcatctcagctgatttagatgttggatcacctgggacactgtttgaggggtcttcatgaaaccatattagtctggaaggaatccatagctttacattttctgtggaaacataagcagaaactcttttcccaagtaacctgtccttatttttaaatttaaaagtcacagcatttttaaaatatgtaagttggattaatttagcagcacctataatcacatgtattttagcagctgtagctctttccacggcaatcaaacaatttaaagacaacagtataacatatagtatcagactctctatttttcatttttacctggctttttactttttattattctatttctttttttttttttttttttttttttttttttttggtttttggtttttggagacagggtttctctgtgtagctttggagcctgtcctggtactcgctgtggagaccaggctggcctccaactcacagagatccgcaagcctctgcctcctgagtgctgggattaaaggtgtgtgccaccaacgcctggcttattctatttcttttacttgcttttttttcttttttcctgagacagggtttctctgtggaaacccacctgcacctgcttttggagtgctgggattaaaggtgtgtgtcagtatacacagctactcattttttattttctctcccaaacctatgtatatttttctttaatgtaaatctgtatcttttcctaatcacatgagtcttatgtgctcactaacagctgaggttttgaccactatgcaaatgaggaagctgctcttaaaaggagttgcggtggtgtgtctcttaaagcctgggaaacattgctcagttaggatctcactgtatagctctgcctggtctagaacaacgtgtagacaagactggcctcaaacccggagatctgcctatctctacctcctaagtgctacgattaaatcatgtactgctatgcctagttacaattttgggggtgctctctgcttcctgaccagatgcaatgtgaccagctgccccaaattcttgccaccatgactcccctgctgtaatggtctgtacccttgaactgtgagccaaaataaaccctttgaagggagaattctcactggtgggctggctccagctagcacctagctctaatccatcttttgtttagcagttactttttgtttctcttgatgccctctctgtaaatcttgactgagtgtttcccaagggtacaaagcctaagcaaaacttggttggggctgggtattggtggtgcacgcctttaatcccagcactcaggaggcagaggcaggtggatctctgtgagtttgaggccagcctggtctacagagccagttccaggacagcctccagagccacagagaaaccctgtctggaaaaaccaaaacaaacaaacaaacaaacaaacaaacttggttggggggcaacctggaaaactgtggtacctccttaatctagaatttgcacttggcattgtcccattataagcttttggcaggatattttgagaatatggaaatcagcttgctaaggtgtaaattggagaatgataaaaggagccctgttgaagggaaagccattggttcagtcctgagaggagaatccaccctgcagctgggaaagttagattcattcttaaggtgcctctcagtctcttctccatgggcctgagtgaacccacacccaatgggcaacaacccattgttgtgcccaaattctgaaccccaaaagcaccaagagacccattctgagacaaaagcaagagttcttaattttaacaagtttaactgtattgactcatcctccatccatgttacatagcgtgtggagtgagaaggacccagaatttattgggtagagcaaggggagtgtctaggggtatgcaatagtctcaggattggtgcacttcctggcttgagcaacctgtcctgtgttgattggtccacaggttgctatggcctataggccctcccagggtgattgctatgctctgtagccactgttaccttaaagaatatccagagccgaccactaacttctgattgcttccttgccacacagagggtatctgacctcctagtgactggggcaggtctggcaaggtcagaaggctggaaactcagcaacttgtgctgagtcagaggcctacatcttgctgggtcttttctgtagcctgtcatggctgcaaaagcaggctgggtgagggtctggtcccttaaaaaattttggtttggcttggtttgatttttgaaacagcatcttgggcaacccccaaacaggtcacgaccccctggttgagaaccactgagcttgggaaacaatacaacctcttggtcagggagctagacattaaccctttcccttttctcactgtgatcccttggagaaattccagttccctggaaaccattgttttaatagtctaatagctgaagaggaactgtagggagacaccataaccacgcctcctaagggctggctacaggtgtgcccaaccatgcccaacagggtttggtcaaggtgatgtcagggtgaagtggtaaaggtttaaagaaatagggaacgcacatggtagctctcttttctctgctgctttggctggctctggtttcctcctgttggttggcatttacttattaaagatatcctgaccattaacagactacatattagttattcaccgtaataaggaacactgtagggagaaatcctgattagaggtaccgctgaccacatgcacttgggcgtggtcagagttatgtaacaagggtttaagacggatggaggcacacacgaggctctctttcacctggctgagctgactgggaagcatttctgggtccatcctgctcaggtgcaaacctggtcactggctcccttgcgtgagtgttttcccccagtaaactaccatttatcaaccaatctgtgactccactttgtaaacatcaatagaacaaagtgttccaatttactgtatcttcagtcctgttacagaatagttagtgccagccagaggagggatggtctcccaggaagagattccacagccctgataacatcagaaccttgctagagaaaatggagcctagacttcgatgggtcagggatgggcaggaccacattgtgatggaaactgcttagttattgccctcaggaagatggattgaggggtgggggggccactggtcctcatttgttcttcccactgcatttcactgctatttgtctctttgcttggtcttttggggatgggtagccaagcctggctggctgctgttgttaaggtcagtgcgctgactaggaactgttaacactgagaagcacaaacacctcaggtcagtaagagtataagagaaaacaatggggtccagagcttaatgaaataaacgtgtgtccagctaagacagcattttatgtcaaaagtctaagattcactgccacaaacctgcagaattatacagtgagagttcagcacatacttcagagatcgcttatctcctgaaggacaggcctcatttagcaaggagatgaatattgttacatcgatgcccatctcattaaccttttatgcaagccactaaggaatactgagtgtgccagctgtgctcatcgcagatttgtgcgaagagctctccccttagattacagattggagatttttcccacaacactacagtgagttaattgtttactggacacaatttcccctatgcactggtgtatttggatgactccccacaacaattcgtgattccagcaagaatgcaatcacaatcaataccctcactctctcaaacagatctttgagtaaactcagaagtctgcccctcgcagttatcttgcttgtcagacagctggtcagtgtccaggcaaaagagacctctattgagacattcacagatgcccaagcacaagaattatggcatgcctagacttgtcaagccataactctcagagagatagagaacaattgtgtcctggattctctctgcctgctgatagggaagtgctgccccaagctaacctcaaagtcaatcttcaactctttgtacttatttttactttggtccattacctagtgacatttaagaaaatagcaaaagcacgcatattcccttcttaggtttcctgttttgttttgttttgttgtttgagacaggatttctctggctttggaggctgtcctagaactagctcttgtagagcaggctggtacagccctgactgtcctggaactcactctgaacaccaggctggccttgaactcacagagattcgcctacatctgccatccaagtgctgggattaaaggtgtgccccactaccacctggcactctctcaattaatgtctttccctttaagaagttcttggaggctttaagcactttccccttgagccatagagaaaagctgacagttacccctttgtgtaaatcttttatccatttctatgaccctgaaaaactctagccttgcaccaggctagctagggctggagagactgggagagctgagacgagagaggcagtagctgagggagaagctggcagaaacgtaagaggataagaatgtagggaagaaggaaactagattagatcagattggagggtcagagacaactaacgaaactagattagatcagattggagggtcagagacaactaacgaaactagattagatcagattggagggtcagagacaactaacgaaactagattagatcagattggagggtcagagacaactaacgaaactagattagatcagattggagggtcagagacaactaacgaaactagattagatcagattggagggtcagagacaactaacgaaactgaattagatcagattggagggtcagagacaactaacgaaactgaattagatcagattggagggtcagagacaactaacgaaactgaattagatcagattggagggtcagagacaactaacgaaactagattagatcagattggagggtcagagacaactaacgaaactagattagatcagattggagggtcagagacaactaacgaaactagattagatcagattggagggtcagagacaactaacgaaactagattagatcagattggagggtcagagacaactaacgaaactagattagatcagattggagggtcagagacaactaacgaaactagattagatcagattggagggtcagagacaactaacgaaactagattagatcagattggagggtcagagacaactaacgaaactagattagatcagattggagggtcagagacaactaacgaaactagattagatcagattggagggtcagagacaactaacgaaactagattagatcagattggagggtcagagacaactaacgaaactagattagatcagattggagggtcagagacaactaacgaaactagattagatcagattggagggtcagagacaactaacgaaactagattagatcagattggagggtcagagacaactaacgaaactagattagatcagattggagggtcagagacaactaacgaaactagattagatcagattggagggtcagagacaactaacgaaactagattagatcagattggagggtcagagacaactaacgaaactagattagatcagattggagggtcagagacaactaacgaaactagattagatcagattggagggtcagagacaactaacgaaactagattagatcagattggagggtcagagacaactaacgaaactagattagatcagattggagggtcagagacaactaacgaaactagattagatcagattggagggtcagagacaactaacgaaactagattagatcagattggagggtcagagacaactaacgaaactagattagatcagattggagggtcagagacaactaacgaaactagattagatcagattggagggttagagacaactaacgaaactagattagatcagattggagggtcagagacaactaacgaaaaactgaattagattagattggagggtcagagacaactaggacaaggaattagagcagagagcggtcaagagagaacagtaaggtgcacacagagagaaagaactcgggttgaggatagtcctttctgtagtcctcagacttagatcccatgttcattgtagtgcctccttttgaaccctgagtacttttgaggcaaagaaccttgaaagttttcggtaattcactgcactgttctcattaggaaagaagcttaattctgagctgagcttcccactgagttagagaaagaaggaagtaaaggtaacagcagagactgaaaacaaccacatggtggaggaaacaagcaccttagaatgtagaggcatagagtcagcaagcaggttggatcaagggaaaagaggagccttacataaataacattaaataaaaagccaaagcctagtattgaccttaaaaacactgaggatatttgaagttaaaggaatagaaaaataacatagcaagtagacacaagaagatatgggcataataccgttttaggctttaaagaaatttagataacaattaaaacttccctgaaaataaagcactaagctagggttttgataggttttactattcattaaaaactggtttttggggctagagaaacggctcagtaattaagagttcggtttctagcatccatatctgacagctcaaagccaccaggagatcagcacccttctctggactctgaggacctgcatcacacatgctcatgggtgcacacacatacacacatgcatacataattacatataaaataaatctagctgcacatggtgcacacacttttaatctcattacctgggaggcagaggcaggcagatctctgtgaccagaccatctggctctatatagtaagttccaggccagccagggctacatactgcaactctgtctcagataattaaatggcattttaaaaaattagtctttgaatttcagttttgcacaaaatgtgggaaaaactatagatttgataatccaattagagaattgaatatatgtttgatctcaggaatgaatgcatggcagttttacctttaaaagataacttcatatgtttgccaatttagatgttcactttttaaaactaaaattcagtgatcattttgaaatgttttgcagctaatggaatcttcgatccattaagtatgataatagattaaaatgaaaatcatacaaatccatcttagtcaggacaagcatttttaaaaatctatgtatggaaaaaaaacaagggagaaacacaaagtattttaaattgtaaaggatagggctggagagatggctcagtggttaagatcccttgctgctcttccagaggacttgagttcaattcccagcacccacatggtagctcacaaccatctgtaactgtagcctcctgagattcatgccttcttcttgtatgtatatatgcatgcagaaaaagtatccatatgcataaattatataaataagtaaatattaaaaaccataaagtatacatgtaaacctataacacacatcacacagcaaggtcagatgctttccctggcaacgtaggatccaagtaagttagcaaccaggtccatttctctttgtgcttgtggctgtcaccaagactttgaaagcacaaaacaagttaaaatggtaatgtttttgaaagtgaagcaaaactcgtgacagagggagcctggggtgaagtacacttgggaggccaaggcaggaggatttccagtgtgacgccaacttgagctacacagagaattctgagcaatcagagctatatagcaagactttagcctcaggaaacatacaaaatgttaaataaatataaaacatttacacagagaaaataaataacagtctatgggtaagttaggagacatttgacacacataaatataacagactggtagaaaaaaaatcttcagtagcattaacaacaaaaattcaaggaataccaaagctgcacagagaaaccctgtaccaaaacaacaacaaaagaaaaaaatcaaagaataagtacagtggaaatgtaagagccgggtaaatatgacaaaatgaaaaaagttacaaatcactaaaagattttaaacctaaacgagtcagtgttgtaatatagttttcttcaacaagtccaaatttaacacaattttaaattttcaacagatttctgtgtaacttaaaacgctatttccaaaaatgtacatggaaatctgaagggccagtgatactcgagataacctcgtgaggacagacaacagagtgatggagcttgatttaatcattagtgtgtagctcatgggtagaggttgctgaccacattcaaggccctgtattcaacccccagcacctgccttctagttatacagggttagatcaaatcatcaatgcaagacagcacagagataaagcagtctacacaggtgtttgaaatcggcatgtcacatgagatgttgcaagtcactgaggaaagagtaaaaacactgcatactgaaacacctgtttacgtaatacacaatgcatgtatgcaaaaataatatgcatacatatagctattgtgtatagaatgtatatttgtgcatatactactactactactactactactactacacacacacacacacacacacacacacacacacaccatacattaaagtcaatgattatggggatcagggaagttaaaatgttcaggagttaaacagtgataatagctacaaaaatctatgactatactaagaaaaacactgtatcattttaaagtgtgaattttacactgtgaaataaatgtaagaacatttaaaattcagcaaccacttcgtagttgcttaggatgtacagagcctgggcttgggctacagtattggaaacctgtctgtctgtctgtctctctgtgtgtgtgtgtatgtgtgtgtgtgtgtatgtgtgtgtctgtctatcatctacctatcgacatatcgaatctacttaactatttatccatctgtcattcataaataatatctatgccaaatgcatctaaaatgtccatgtcaagggcaatatcttagaaaaccacaagagggcagtttgaccttgagtttgggccctacacaggccctgactggagtgatgtttcctgatgctgagagagcctggtggttggtagcagtatcagaaagatgactgttccaccagctccctgggtcccgtcgccgcttcagccccaaataacacacggacaccgtattaattatgaaactgttggccaatgtctagggcttcttactggctagctctgacttaatttctaacccatttctatcaatctaagtatttccacgtgttcttctcttaccggagaaatgtctggagacatgttactcctctctgcctacctttcccagaatcctcctcatctcctagacctgcctatcgtgctgccttgttggccacagagttttattcatcaactggtaagacaaacatatacagaagacatccccatcagatgattttcctggagtccactgaaaattagtgttatgattctgtttgaacaagttattatcctacaggcagaaacgcatgtgccatgatgaaaggattctcttttaaacgtgttaactaaagtatgtaggcacatactcaacagtgaagaattataggcctgccactaggacccaatgcacttggaccaatggagcacttggcagaagttacctgtgagcacatacaacacgcacccaaacctcacacttcatctgtcactttgaggggaagggtatctggtgtggaacctgtacctctctgtcagaacggctctctgaagctttttggcaacatacgtttggaaatattttcatctctttgccatgctgttgtcaaaaacgatgtgtgctatcaataaaaatctatgtgtccactgagctctatacccactcatctcaacgtctttaaatctgaagttggctttgaactctttcatttaaagtatgaaatctttgtttttgaaacctggcaaattcaaatttgctacttaaattttagttatactgtgtgtgtgtgtgtgtgtgtgtgtgtgtgtgtgtgtgtgtatgtatgtatgtatgtatgtatgtatgtatgtattatattaataggtcttctgccaccctgccctccccacaataagtttctctgcctacacagtaagccagattgagccaaattgaaaaagtgtaacaccaggtttattgagcaaaacaactcttgggtgagttcactggtcccagagattgaggccacagaagtggcactcccgaactaaggcggaaagactttatagattgtaggcaaggggtgatgtgagtttgtgtccaagtatggccaaaagctgagcactttaggtggggacttaggtggctggtggtatccggggaggaaagctgcaatagtcgctaagaatgtggaactgggctttctggtgcctttcctttgttcagagaatctctgagaagctgaggtttggagagagacgaagacaggaatggggctttctgaaccaagcaggggcccgctggaagctccaaccaaacgtacgtgtgtgtgtgtgtgtgtgtgtgtgtgtgtgtgtgtgtgtgtgtgtacactcgcgtgcgcgcgcacacacacgctcacacacatgagtgtacacaggtgtgctcaccagaggttgacatcaggatatcttcctcacttctctacctcattttatttccctgatggcagaggcaggcagttgtctatgaatccaaagccagcctggtgtacatagcaagttccaggacagcaagggttacatagggaaaccctgtctcaaagaaaattctatttttattcttactttatgtgtatgatgagtattttgcccgcgtgtgtctatctgtgcaccatatgcctgcagtacccatgggagccaaaagagggcactagatcccctagaactggagttacagtgattgtgagccgttgtataatagggtttggaaattgaacctggatctgcaaaagcaacgcatgctcttaactgctgagccatctttacagcccccagcgttagtatttttttagcgcagtggttggcaaaattaaccaggctttagtgttagacaccaaaaccaaacttgtcattgtactcttttcttttgaaataattattttattttgatgtgtgtgtgtgtgtgtgtgtgtgtgtgtgtgtgtgtgtgtgtgttatatggtgttgtgtgtggggggttgtacctgtgagtaaaagtgcccttcgaagccagaagagggcattagatcccctgtagctggagttacaggtggttgtgagttttagtgtgaacttgcttcccctgcaagggcactcctaacccctgagccatctttccagccctgtaacatattcttcacagacacacattctcagaaaagaaaaaatacttatgttgctgagaaacccatttgatgaaccagtaaaaatctgtgcaatctggactcatgaccacacgtctttggaattctgtggaccaatcaagaagcatgcatccataaaacaataaaacacctctgctgcctgtcaagagtgatgggtcccttcacatagcagtgcgcattaacgactgacacgggctggttagtaactattaggtaacttcacacaagcaatgcagctaactaaccctgtcccttcgaggaagagttaattgttgccaacgataaaattttggcttccaagtgagaaattagagctttagaagacatgtgtcctatttatgacgttttccttatgcctagggatgtttctgataaccagccagtaatattaacaatttcggggtacggaagcattgtttaaaaccctgagcatggtggtgcatacctgttgccccagcgctgggtaggctgaagcaggctgggctttgcagtgagatctaaacaggctgggatctagagtgagaccctgtctcagaaaagggtctcaatgaaggataaggatgactgactgaagtgtctcctggccaagcatggaggcgcacgcctttaatcccagtgctcaggaggcagaggcagccggatctttgtgagtttgaggccagcctggtctacagtgcgagtgccaagacaggctccaaagccacagagaaaccctatcttgaaaaacaaacaaaaaaagattgcttctaatttaaataaaatttatttaaaaaaagaaaatgaattgtctatgtttctataggatatagcttattgtttttaagtaaattaacactgattacctctccatttccaattttggatgctggggctggaacctggagccttgactggtaaatattctagtcggaggtgggaggtccccctgtgtgttgcaaatatgtgttggcttttattggctggtaaataaagctgatttggccaataaccaggcagaatatagccaggtggcaaatccaaccaaagacacagggaaaaagaaagcggagtctgggagatgccaacagctttggagaagccagatgtgaggtaacaccacggccacatggcaatacataaaataataggaatgggttaatttaagttgtaagagctagttagtaataagcctgagctaatagtccagatggtttgtaattagcattgagcctcagagtgattattttataagcagctgctggtaccggatggacggaccatgtcaacctacaggaggagagcagccttcaccatcagaatccatcagaccgtcacaggatgaactaaagtcacagattcctctctgtggcactggggatgaagccagtgtgggtgccagacaagcactctgcctctgggctgtcttttaattttgacagggactcactgcatgatcatctgagcttgaactcatcctgtagtccaggcaagctttgaacttgtgacccgataactgggagtgggggggtatatagctgggagaacagatgtgccatctggcttagctggaagattcttcccaagtcacagctttcttcctcctgggctaaaagtgaaaggaaatctctaggtaaagggttggttatattggtggtcttctctttaggatccttagcacactgtgaaggccttgttattgaaataacaagtctgtcccaaagcaaacaaaacaaaacattagaaaacaaaaacaaaacccagtaagagttgctgtaggcattgcaactgctaaagacagccgagcatcactgtcctgacccagccgcagtctcttacacgcatgttccttccaaatgcttccaaatgtgtcacagcaacgccccgcaccccaagagtgatgcttcgagagactcccctgccatctaaagctcgctctttagcacatggattacatttaattcccgggatttgtgtgtgtcatttctaacaacagctgatgcacgggggtccaggaaggcttccaggcctaggatggaagttcactgtcagcttttttccataaagcaaagggagaatggccaaggagtgcatgctacctagaatgtgggctactcagaatgctggacttacggtgagtgatcactgatccccccacccccatggttttccgggaaatcaggcagttacagagaaaacccatataacattggctctgtgccatatgtataagtttcgattatgaagggtgggacttacctatgtcctcctgttatctttttactttagatgggtcccccgggtggcagaccttaggcaggagctctatctataggacatctagctacagagctcccagggtcagtttagatggaagaagagatccccagggcaagtgtgtgtggggggagggcaattagtgccatttccccaggagccagaatctcctgtaacaacctcagagccccagctcctgccatcaccacaagtgcagcccagctaatgcagtcccggctctcaggaagctaacagcctggcttcactccccatttataatgcatttataatgctccccgcccccagcctgccagatgcaatccccaatcagaccattttaagtgcaagcaaagctgatgagaggcgttcatctcatcatgttgtaaccaggtccagaggcaccaaggtgagaagttagccggaggactagctgtgggctggtgagttctttacccggaggcgcccacgctagcaggagtgattatgctacacatatgtgttggtttcttttctgttgccaccaccataagacacctatttgagttgtaaaataccatgccgtttcatacggtgcaaaagtactgttttgtgagtacaactttttcttaacctagtctcactgcctaatgaaatgtcattatagtataaagaataaaaagcctccaggtggtggtggcgcacgcctttaatcccagcactcaggaggcagaggcagctagatcccagtgagttcgaggccattctggtttacagagtgagttctagaacagccagggctacatagggaaaccctgtctcgaaaaacaagcaaacgaacaaacaaacaaaaaagaaaaaaggaaggaaggaaggaaggaaggaaggaaggaaggccacattggaacttgcagtactcagagatggtagataaccaggagagagactttgcttggttttaatctctgtggttctgggatctccatagattcttggtttgtagattttctaaataaaatctttgacttcttttataccacattttcaatacttctttttaaaaatcccccctcccagtatcttaaaacttgtaaaaaaaaatactgtaaaatctctactatggtggaacaaaattttcactcactctggaaactggtcatctttgtttgattccctttcatcccaaatctgagaacacatccagggaatcgtagaaagtcttctgcagcacagtgaggaatgatgcatcaggacaaaagaagcatggtagctgacaggccggccacacggcttttagcaaggcctaaacagatatttttagtgtttaccagtgagggtcagcacttggatcaacagcgtagagaccggcctctcaggtctgctggattaccatggcccactgacttcctcagctctgtttgctccgtctatctgcttgttggctcttcgactctgtgctgcctcatctgccgcagggagagaagggagccctacccccatggtggaaaacagggcgaaatggcgtttcccaaagatttcacatcagccacggatgagattagaagaagccaactctgagtctgaagagaaagacatgctggagagtgaaagctggagcacccgggcataaagcctccccagtgacaaaagttgagagatgtcacgtgccacacaccttcatcctagcactccccgctttcattgacaatagattcttttctcatacagtctgtcttgactacagcttcccattcctctactcctcccagttcctccccacgtcccctcccctccggatccactccctttgtgtctctcattagaaaagaacgggttccttctaaaaggtaacaaccaaacatgacaaaataatactccagctcttgacaattcatctgacttaagtggtcatctatcttgcctcatgggtcattctctacaagattttgtttttgctatttactaaattgaagaaaaaaacataattaagagttatttttatctgcctaatgtctacttccgtcctcagatttagcatgtcaagcagtttctgaagtgtggttgacttaggtgctgggtatggaggctgaggttggagagaattggggtctgacctgggatatagagcaagatcctgcttcaaaacgtaaatgggagggctggagagatggctcagcaggtaagagcactggctgctcttccagagaaccctggttctattcccagcacccacatggcagctcacacgtctgtgtaactccagttccaggggacctggcatccttacaccaacgcacattaaataaattatttaaaaatacataaatgggggtggcgttcagatagctacacggataaaggagacagcaccaagcctgatgccctgagttcaatccctgggaaccactgggcgaaggtgagcactgattctccacgttgtcgtctgactctcgtatgtatgctatgtaccacattcatccatccatcacacacacaaaacacataaatgtagagagggttttgtaagtacggctattgctacggtttggatatgaaatgtccccaataggcatatgtttttgaaaacttggtccataactggctggtggcattatcctgggggctgtggagagggctttgaaggtggtacccagctctggtgtgggccgagcctgcttcctgatcagccaaggtgtgagcaattctcagtccctgatactgattattgtgtgggtcctgcatgctgtccatgccacggtgcctgcacccctgccactatgagccaaaaggagccataatttctttctgccaaggactttgtcacggtgacaagaaaagcaaataatacagttagatagaagaaagcaacattaaactagttcttcacaagccacataaaactgaggacaaagggctggagagagggctcagcaggtaagagcactggcaggtctcgctgagaatgcaggtttggttcccagcccacatggtggctcaaaaccatctgtgactccagttcctgctctctaagcatgattttattaataatattagattttattaatttatggtaaattttcttagagatgatgtaaaagatctagctttctagctttcttctttttttttaaaaaaagaagacagcagaaaccatttgttattccacgatttcaaaataggtattgtaaatattttggtatctgttcacagccctttagtcttctgtgagagccccgcccactgctgcagtgagagcccagccagcaggaagacaggtgttggggtcccatgatgagggatcagttgttctgaagaagacaaatgtcctttcaccatggctccttatgaactgttacggtttggggacctggctctggaaaattgtccccatggtgtgcacatgcacgcacgcaggcacgcaggcacgcaggcacgcacacgcatgcacgcaggcactctaattctgcagagttcggttaacaagcccggttccacgctactttgtcctagggagcagggagactggcgactctccaaccacacacacaaagttgtgagtgtgcccagcttacaggagacccagggttgacggacacacagccacccctgcctaaaggacacctcggcagaaacaaggtttgtatcaatttttattttttaaagacatttatattttatgtatatggatgttttgcctgcctatatgtcaaattcagttcccagcacccaagtcaggcggctctctaggggatctgacaccctcctttggcccctgcacacacgtgacttatacacacacacacacacacacacacacacacacacacacacacacacacgagtgcacaagcatgcacacacacatgaaaataaaacagtcttttgttctcttttcctctttttctttcttattttggatttgattggggctttttgtatttgcttttttaaaaaaaacgtactagccgggagttggtggtgcacgcctttaatcccagcactcaggaggcagaggcaggtggatctctgtgagttcgagaccagcctggtctacaagaactagttccaggacagcctccaaagccacagagaaaccctgtctcgaaaaaccaataaataaataaataaaataaaaaaacgtactaagctgattgtgtgtgtgtgtgtgtgagagagagacagagacagagagacagagacagagagagaagagagacagaggagagagaaagagacaggagagagagagagacagagacagacagagagagagagagagagagagagagagagagagagagagagagagttcaaatgagcatttgccactcatgaaggcggaggtcagaggagggtgccggtcctcaccgtccatcttgtgtgaatatgccaggctagctggtctgctggtctccagagtgtcctgcctgtctcctgcccccctgtagggtgctagaatcgcagtgcacatggcaacactctgttctacatgggggatctgagctcaagtcttcatgcctgcatgctaagagctttactccctgagcctggcccccggctccctccctcataaaccaatctcagtatcaccggatccacattctctgccctagcgacatatagtggcaatcctagttggaggctgaggcagaaaagttgccatgatgttaagctagcctgggatgcacagagagttccgtgccagcccgggctacaatggaagatcctgtccccaaagaaacaagcaaacaaaaaacaagatggaaagttcagtggtgtgtgtgtgtgtgtgtgtgtgtgtgtgtgtgtgtgtgtgtaaggcctgggtttagtccccagcaccaaaaaagatggcttcaggaacagcaagatgcaggacattatccaggaaaaagtaagagcttgtctccctgatgtcttgagctccccactagacagtcctgacagaggccactcttgcaggtgaccttcccggcaggtaacagacctagagctgcgctcacctggctgccgtacccagacctggtccatcaggcttgagctgagccaggcatattttcaagtaaccgtttatttcactgaacaaaattaaagcttatagatgtgcattataacgtattcccaggctctgtttaatctaggagaagaaatttactaaataacacccttgtgctttagaaggactgactcaacttaactaagtgagccatttgttcggggagcagttagactctgacatcttgatgctcacgcatggaagctacctgccctgggagacaactggggatagaaagcttggacctggccaggcggtggtggcgcacgcctttaatcccagtactccagaggcagaggcagggggatctctgtgagtttgaggccagcctggtctacagagtgagttccaggacagccagggctacacagagaaaccctgtgtcaagccaaaccaaaaaaaaaaaaaaaaaaaaaaaaaaaaaaaaaaaaaaaaaaatgaaccaccctgaaccacctcctgccaccagtttaatgatggaagagagctctgacacaaaaatataaataagctaagctccaccccctgaaggttccacaacctaaacaacgccatcagctggggaccaagtttgttcacgccctgaacaggcactgtgcagggtggagaaactggagatgtgctgcccagccggtggagcagaaggttgaaatgctgctacacagaccatcgaagaaaacctaggagaaaacaaggaagagcctcctaaaagtgatcttcagaattcaaggactggtgagaccagcacaggcagacagggtggggggagctggttaacagccccagcaactgtagatagttccagaaaaacaaaccagaaatctactggattgagcaaccgaaccactctagtgactcctctgagagaacaaacagggtgggaaccagttcccgtgtcaggcatgggaaaatgtttgtcatgtgccagaaatctgaggagaagcagaagccactgtggcctctctctcaaggagagcagcgttcaggcaaactaacgggaagcctgagaaacaggaactgaaaatgtctagtcccccaaaccagacagacaagaaacatctgcagagtgatgtcactccacctccttgggtgatgtcactttgcccctcagatgctaacccagactgcattagtcggcatctatatttggacataaagggaaccaccttctctgccgtgtgccagttcagaagtatgtcattgcgagtctggtttagccctgcctaattatctcaggctatgatttcgccaacagcccccggtagtcagtctgtttaataccacacagtttgaatcccagcacattcatgctcctgtacatcatcgtcattgggctgttccctcatgaatttggaacaccctaacatcacattcacagcatatttttaaaaggcagagtggaaattccagaagtgatcatatatccaagagcttagtagatgtatcttagccatctaattttttattaggaggtaaatgttaccaaatgcaatttgttgatgaaactgatcagtgaatgacttcaacttctactacagggcagaaaaataggagagaggaagcccaccccaaggagctcatcctggagggaaaggccaagtttcaaaagacatcaattcttgtaagttgtaaggtcttaactctttgagctgtgatggtcctttcttagtttaaatcctaataaggatgctgaaagttttactcctagactccctgcaatggccagaatcacacatacagtacttgggaaagagaatgaaccagcagcatttggcaggcacctgtccctaccctgtatgtggcagatggtcagtaaagatgaaggagttgaggctgctctctcctagccattgtgctggctctgtaggcgtagatttacaaggacaacccgaaggcttaaaaaaggagtgaagctgcagaaggaaccatggacagagccaagtgttgggcgtgactagagtggtgattgcatccatgagttaagtgctcggacatttgccagccagtcttcatagacttacatagtggcatggggtcctaagtagaagccgaggactaagtgggggcaggattcggagcagtgagggtatggtgttcgatactgccgtggggctatttccccgtgagactcccccgtggaatgaattgttttggaaaggtcacaaacaccagatagctaacgttcttcagtgtccaaatagttcttgaagcattaatttagaaggaagaggagcgctggggtgggtttcgaggcagggtttctctgtggctttggaggctgtcctggacctagcttgtgtagaacaggttggtctcgaacacacagagatccacctgcctctgcctcccgagtgctgggatcaaaggcgtgcaccaccaacgcctggctgacacatttattttcaatatggccagggcttgctaggcacagctcagctccattctacttcgtgtcatcttggtttttcaattgctcctgaagatggaggggccactgtcagaaaagccaagtcatacgctattgaattggtgctagacaccgacctgtggacaggggctggcaaagctgaaggttctcccaggaggacgttccgaggctgtgtgggatttgcagagcatagctactcagttgcaagaggaaggagttagtgttgccaggagtatcaatgactggcccggaattagcactcggtcacctgttccaccctctggtggccgtcagctcatgctcatccagactcaaggtacagtgaaacgtgacagagttggcgtccatctttaatccaggcattcattatttaatcacccactccctttttagtgcactttaaattttgtgtcagactttaatgtgaggatccattcagttcccattccatccattcccatttgtggggacccattaaaagctgaataaaaactgtttttttttttttcctcttctgagttgatagctcagtcagggaggcagatgcagaaagacaatgggatggagccacacaggggggactttggggtttagagggagcacagagaacaaaggccttcccgccttagctgggggtccgggtcagcagagttcctgtctgtgtcaaatgacagggctagccagaagagagaacaggtggcagatgggacactccacggggagacactccttagcaggagcacagattgcagagatggcaccgtgcgggagggggcgaggagctggggagagactggaggacaaaataaaggtggagggaagggaaaaaaagaaaggcagggaagagagctggagtttggttttattttctttaattataaacagtggacgcctctgtcactcatctacggtaaatgccgaccctcctcttcacagggctacacaggctccccagatcacttttcacctaacaggcgctcactgtagagaaggggagcactccgggtttgtgtagctacctcttaatcctgagtcctaggattaaaggtgtgcaccaccccctcctagcttctggctgctgggattaaaggtgtgtgcctggcttccatggcttgtggctgactttgctttctgaatcctcaggcaaactttaataaatcataagtaataaatcaccatgctcatgtctccacttcctgcctgtggacacaatcagccagctgactcacaccttgctaccagctttggctgctctcactcttgctgctgtgagggactggaccctcaaatggtgagccagaatagactagtccttccttaagtcgctttagtcaggggttttgtcactgttacgagaaagtaccttgtatggagcggaagcccctcatacagtatcagctcttccctggttggtgacctttggaatcagacctgaaaacagtgatccagaaagccctgggcatccacagcgactcaccagactcagcttcccccagttactgtccatgtatttccaggaaatctgggctttggtctgagttctatgggacaacactgcagctcttggcggccttggaacctgcccgcactgcttaattcttgtcaggttgcttttgtcaggagatcaactcctctccttgttctccttctagcaggtggcgttcttctaggctgggatgctctccatcagcctatctttgagtctagccaaccacaggactcttgtatggcacgttgccttccagaggggaccaaggcccaagccaagtccaagttagcccaaggccatgaagggtttcaaaactcctgttgtttcctctccctctgtttcattttgccgtggggctcaacatctttgtgattaagtctgagttgtgccatcactacccagaatgccctgggtttattggcaattgaacacatatttatctgttctttcttctttgctcatggtctgagtattgcctgttcatacaacaaaagtttcccaagagcccaacatgtgccagacaccgttctgagtgtcgaggaaacactggtggacgaaacaggagcctgagctaagcccttccactttgtgtgatgcaagctagtgtgatgcaagctagtgggccctctgcgcagtggacataaatctgcttcctgagtttgagttttcaaggcaaaggcacccaggcattgcctccagtccatgctgctcacctccccctgtggactgtttccaagctactgtgctgacagcctgacatcaccccacaatgactgggcacagcttacaaactgcagctgataagcgagtttcagcttggagttgtctgagccaactttcctctctttaagactttaaccaggctgtgtaaggaaacacaaatacagtttctgctctaattagaacttataacaacacggatccctgctggtcaaacacacctttatttcttctgccaacagtttattgtgtttcgtttctgtcccccccccaactatgtggggtctatgcccctgaacatatgtgtaatgaactgttcagtttctctctctctctctctctctctctctctctctctctctctctctctctctctcacacacacacacacacacacacacacacactgtggggtctatgcccctgaacatatgtgtgtactgaactattcagtttctcacacacacacacacacacacagtgtggggtctatgcccctaaacatatatgtactgaactattcagtttctcacacacacacacacacacacacagtgtggggtctatgcccctgaacatatgtatagcttcttgggtgctgagatttgaggcatgcaccaccacacctttggcgacagctgttgtcctccatctcattctgtctcaagagttcccctgtggactcttacagttaaaagcaaaccaatgttgactgtcaaaagcgattactagtcaggtgtgtctgcgaatgtctgggaggtacatgtctgggaggctcgggccgggaggtgcatggctgcgatcccaacactgggcatatgaaggaaggaatcatgaatttgatgccagccagggctacacagcaagatcctttatcaaaacaaaacaaaggatagcaacaagcaaagaaaagaaggagtgttaagcagcacctagccaggagccggggtgagcagtgtcctctggccttcagatggatactgtcccacaggtcagctgaggaccagaaagtctgaggtcaggacggtgccctgtgcacacaggaatgtcccagtgatgtaagacagactaagcctggtgtcagacaggaggggagggtaactggccatgtggcatgatcagacacattcccaaaaaaggagctagatggaaaaggcccctcctgcaacggacaggcctgtggttattgtgaccatgtgaggtcagcctcacacttctactcctaccggcctgtgtctggtatcaccggaccagttacaaatccagggaggagctatcctggtcccagatgaaatccgacttctctctttccatccttgctttccccaaacattaggagtgccttctaagagcagagcactgtgttcaatactgacaggttagagccaagtaacacacacttcccttctctcagaatctgatagaaacaaagattcaaaacatgcaaatgagggagccagcaagattgcttagagggtaaaggtggttgctgccacgcctgtcaaacggtcagttcctgggactcacagggtggaaggagagaactgacttcaacttgttgccctctgacttctacatgcaaaccgcagaacacacatatgtgtaagtgtgcacatatacacaaaacaacgaatgtaatcaaaaaaagatacggagatgaggggattgacttgaggcaatcctcctgcctcagctcctgagtgctgggcccgtaggcagaagcaaccacacaggcttcagttctgtgccttcacagcagtggcggtttatgggtctgcatgattagatggcagaacagtaacattgtttcaatgtcaacttcctggttgtgatactactgcagttatgtaaaatgtgaccaccgggggaaaccggatggaaagtacagggaccattatgcactaactttgtacgtttccgaacccagtgattatttcaaaataaagtcgatcaaagtggcagaatttagtgtgtgacagccagcaggagacaggggcagcagccatttggtcccctaagtcagtctcccctgtgcttatatgctggctgctttagctttctgcctctactcacgttgtcattgacgctgtttgtacgtctccgtcattccccactagcggtcgaggcctgcagaaacactcagatttctccctagagctccagacttggatgctttagtttaattcacacactcaaccctgccaccttgatcaagtcattaagctgtgttcctgggaaatgaacacacctaccacttccgtcggcttaaagcacagctttattttgaaataatcactgggtctggaaacttacaaagttagtacagaatggtccctgtacttttcatcccattttccccgatggtcacatttcacataactgcactgtcacccccaaggatagccgttgaccacagtacttagcaatgaacaagaggagagagactgggatacgagtctctcggatacgagttctccaaaaaactctgttgtgtccaggagagggaccagtgtcattggggtgggagacgggtgacaggaaggatgtctggatgctgagataggagagaaagtttccagacataaaatgttagctggagagctaacaagcagaggaaagacggacaggcactttagcctgagggagggcgggacagagacactgacactgcggtggggagaaaggtaggatggcggtcacctgtggagttcatttccgagctgtttagtgtttccgtgtgcaaatggggaggccaggtcattagtgaccatgaaaggacagtgaagaccagcggaggcttgggtgacaccggtgagggtctgaagtggcagtggaagctgtctgcagggacatggcacgctgtggctgatgcccccggcagcctggagtgacaggggtctgcagggggcggggcattggcagctgggctccaggcagcctcccaggtcccctctgcagtggaacccagttccagcttctccaaggtctaataagcagctcagtggttcaccccaagaacgctgtctctggtccctcccccccccattattttctcatctctctcccatttactcgagtatttgggattcaaatccttgcctcaggctctgcctttgtgggaactgaacccaggacaagatctgaattgaaattggtgaccatgcacctgtctgccaaggtgttaagttggaggtgcagggggaaaccctgtagcccctgccacgagaacagtggggccaggtgttcacggtgttggcaggaggacattttcagctggcgactgtgaagtctaagatcagcaggggtggatcagagaaaggaggtgatgagtgcctgagagagtgtggagtgagctccctggatccaccattgtggagatggggctttgcacacagtatgtctgtgggtggagatggactttgcacagagtgtgtctgtgggtggagatggactttgcacagagtgtgtctgtgggtggagatggactttgcacacagtgtgtctgtgtgtggagatggactttgcacagagtgtgtctgtgggtggagatggactttgcacagagtgtgtctgtgggtggagatgggctttgcacacggtgtgtctgtgggtggagaggggctttgcacacagtgtggctgtgtcactcccctgtgtttcactgaaagtaaggaattttttaagacctgtggtggctgctgctggaaacacagcttagttggcatagtgcttgcctagggtgtagaaacccctgggttcagttccatgacatcaaacagctgtggtgccacatgcctgcagtcccagtatgtgggaggtagaggcaggagaatatagttctaggccagcttaggctacataacgagttcaagaccagcttgggatctgggatacatgagatcctgtatcagaaaagaaaggtagaggacacagtggcatgcgctggttagttttatatgtcagcttgacacaagctggagtcattggagaagggagacccatttgagaaatgactgaattgactcattgaccaggctgggaaaccatttctatatcgtagaaatgatctttataagatcaggctgtaggcaagcctgaaggcattttttaaattagtgactgatgtggcagggccccgcccattgagcttgctgaacaagccatgtggagcaagccagtaagcagcaccctccatggcctctgcatcagttcctacctcaggttcctgtcttgcttgagttcctgtcctgacttccatcagtgatggactaggaagtgtaagtctaagccaaacaaacctttttctataccagttgttttatttgtttgtttgggttttgttttttgtttttggttttcaatacaggttttctctgtagctttggagggtgtcctggaactcactttgtagaccaggctggcctcgaactcagagagatttgcctgcctctgcctcccaagtgctgggattaaaggcatgtgccaccaccatgtagtgacatcttgttcctccagtggactcgcagtggtggccacatcttaagggtgtggcttcaggtgtgcagacagcttccttataaggaagctcactttcttgggcagcagtcggaactctgggagggcagattgcaccttcaggagcaggaagaccgcagcggttatttattattaattgtgtaagtgcttccctgataaatacctgttaatcatttatcttgggtcttatggactcatttaaaccctgccttcaccgccacccgattaccagctgtttttggatatggtgtttatcatagaagcagtaaccctaagataggaagaaagaaggaaggaagggagaaaaggaagaaaaaagaaaaggaggggaaattcccgaggctggaatagactggcttgtcacaatctgtcaccctggatgctggtaggtagccaggtgccatcaagttcatgcatgactataccacccctatggtttaatcctactggatcgccagattgttttttttcccccctaggattttctaaagaagagagatgtaagattttagaaaagaaagcagttgtatgtggtcagggttccttcctggaacagaaggtgggtttacagagaaaattagtgagcagctggagagaagcagagatcccaagggcaaagaggggcctggcagacttccattcctggctcccattgttttctgagccccagcagaccccaagtcccccagcatttagttaattatctctgtgctagttattttttctcattgttgagacaaacgacctgacaaaacaattgaggagaagaagggctgatttcgactgatggactgaaagtccgttatggcgaggaaggcatggtggagttgatggtggcaggagggtggctgtgcttgccacatcttggaggatcaggaggtagctgagactaggtgcatgccagctttgagccttccacttccccagccagccccatctcctaagggacccacagcctgcctagcagcgccttcagctggagactgagtggggacatttcacatttaatcagtgacaacttccacattgggttttgtgagccagcagcctctatcaccactctgctgattctgtttctgttactttaccaccaacagctctgcctgaatgggcgaagctgtccgtgtactttccctttctgggtggactccacggaagctgactgtgactgtcactccatgtaggtgtgtggtcatttgtcatttagatggttggagaggatttatgacctgctagtggtttacagtaaagggaacaccaggaaacaagggcagaaatactgtctgctcatagcattgttgacttcctgagagaactgcttgacgcctgataaggaatttccttgttttaagggtattgttttgttttgagcagcagcattctattatacagtgtagaattcttttttttttaagtgagacattttatgggagagagagagagagagagagagagagagagagagagagagaggatagaagagaagagggagacaggaaaagtcctgtctgcccccaagggaacagtgggaaatagctatcgtagaattcttgagacggcttcctttctgtacacacatgagcaagttagacagtgatagacaccaaataggcagtcgataaacaggtgtgtgaagagagctggacgccgctgaggctttgtccaccatgtcacatgccaacatgtcacatgaccaatgtgctttggaatctctttattctgtcaccactgagcaatacctactgagaggcactctgtggaagcggcaggttagacaagagttccttacaaagtgcatataacccccaaaagattaatacccgacaattaggatacatttgtcaaccaagagaatgaggtttcccggaactgtgaagggagcagagactaacactagagggggagcccaccgttatccatggcgaagggtgacgataccaagctcaggtcacccttttctaatgacagctttctgacaaggggacaggtctctgtttgcatgcgcatacataggacccttgaacccatatctgacccttccaaactgaggttctgtttgtgataacagccttatgtatcccaggctggccctagatcttgctacgtagctgaggataaccatgagagatgggtgtggtggtttgaatgaaagaacaagcttaaaacaagagggggggagggaggaaggaagaaaagaaagaagaaagaccaacagacagaaagaaagaaagaaagaaagaagcaaaggggacctgtgagatggctcagctggcaaggttgctcactgccaaccctggtgactaagctccatcccagctcccacatggtagaaggaggggactgacatttgcaaattgtcctctgacctccacacatgcctgtggggtcaatgcacattgacacacatgaaaaacaattgtttttttttttttaatttaaaaagaaagacagaccgtgaatattttgactgataagtccacatgaaaagcttctgacctcactaaaagtgaagacggacaggcaggccttttttggaaaggcctgatagtgtcttcagctttgtagatctcactgagcaaaggcagccccgggcagtacataagagatgagtgtgattgctccggtaaaaacagagagaaagctggccagatgctcagcaggtgagagtgtgtgctgaggacccaggtcaggtgactcacagctgctgtcactccagctctgtgggattgggtgcctgcctctgacttctgacagacacagatgcaaacaccagcacacagaaaagatacagaccaacgttttgaaattttatttgaattttgaaaagtgctaagtgggaaaagtgtacagaattggataatgagtttggtatggatttctgagagcagtggatcctctctcagcttagggaggctcaacctgttgggggcggggcagtcaacactcactcccctcagcttgagtcagcggctcttaagtgcattgtcctgtgttgattgtgaataaagacatgggcaaatgagtgaaaagttggtttgttaagtactgagaaaggctctcaagaacgccagggatcccaagagagaaaaccatcagtctgcataggggatttttataggaattatggcagaagctggacaagaactaaggccatttctattgacattggttaatttcggagcaagctaatggggctcacagaccaagctaatgggggctctcacactctgggcgtgtcctccagacctagctgggttgctggtcacacactgcccacagatcaggacactggtcaggaatccgttactcctgttcattcttttttgacccgggcttggcttgccagcagactttggctatactgctgtgtattaattacacgtgctctccctggcctcatgtttctgtacctgtagctcactacgaccctgtccttctgtacacaggaagttaactcctgccacaactgccaagatgcagctgtagctttctttggttaccttatagctagcttctcgcctttggttacctatagctagcttcctagaagaggaggaagcttcttataatctgtctttgcccacaagtctgtctgtcatgattagatacaagggctgtgaacgacacccctgcttggcagatgttcctgggttgggggcttttacaggagccagctggaacctgtggagacccgcccctcttgcctgatcagcgtaagttctcatgtttaccatccacactgttcctgctctcattattttaagcctaacgttcccttgaaggctaacatttgctttactgtgatggattggttttcataattttaatagtatatctatttgttggatttcatgggggaggattgcttgtttgggggggcaggatctcatacagcccaggctgggtttgaactcatgtcccttctacctcttactttgaagaactggtgttatatatgtaaagaactctacccagctatccatcttttttataagatatttcatttacttttaaaagactaaagagaaagtaaagtgcggccagtgcaggcagaggagtgaaatgtcatggagtggcacgagccttaactccagcgcttgggaggcagaggcagggggatctctgtgagtccaaggccagcctggtctacagagtgagtaaataagcaaaataaaacagtgcaaagctgttcatgacaaatctatgaaaaggccattcagagagacacatagtaggtgttcactcgagttcttaaagaagatttatctttatatgtgtgtgcaaatgttttgcccgcatgtatgtttgtacatcatgtgtgtgcctgatgcccatagaggtcagaagagggatcagatctcctataactggagctgcaggtggttataaactgtggagggggcgccgagaaccgcactcggatcctctggaagagcagcaagtgctcttaactgttacccatctctgaggcctggcatccacattcttacaagtttatatgtgccttgaaacatctttccaagtaacccccaactggcatcggcagccacatgttaggtaaggactgaaagcgctattagttacctggtgtcatataaggacccccctaaaatgtgtccctagagcaataatgatcacttaaaaatttcctcgattaaccctttgagcaatctgggagcagctcaggtgggtggtgctggctggagcagtggtgagctcacctgtggctggggctgaagggaccacaccatgtgttcatttaaacttctggcggtggcctgcggtggtttgagcaggtgggcctgtacatgactctccttgttgctgtgaagaaaccattttggctcacagtttcagaggatgcagccaccaccatggctgtgtcagcaggagtgtgaggctgctcacacatggaaactaacaggaagtggggttgggatctggaagttcacccccagtgacctgcttcctccagtgaggctccaccttgaaaaggtctcacggcttccaaacacagcactgtcaactggagaccaagcattcaaacacaggaacctgtgagggacattttacctcctcaccatgacagtcctccactggtctctgcatggtcattggacttctgacatggcatctgggattccagagagttggagtaacaggtccagagagacaaggccaagctgcagccagcttgcctttaataaagccacgtctgccacaatacttacaaaagtctcctgagccctccctggtgcagggtcaaaattcccattattggagactgtgcgtaagagagaatacattgacagaaactttctggaaaaatattatccactacagcatattctattcaattttgtatcatttcaaccttaatggtgaacgccttatttcagaatgagcaacgccaatgtgaaattacttcaacttaaaattctattaaaaaaaaaagaaatgaagtatttctcttatcccaccaacacgaagaaacaaaacacacattacaccctgtacatgttgtgatacagtgtttgtagtaggaagcagttctatggaaagcagaggcgattacacaccctataattatcaccgagtgatctattttaacagcgtctcaccaaagcagcaccacatgacttgatttaaaatttgatttaaaattaaatagcctctgcagtagtggttttcccagaaccatttggagctatttaaaattctgaagtcaagtaaccctggagacgcgcttgctctccattctagaattaagagtaactcagaggttctaacaggattcctaacgtgtggaaaaacccactgcttcctaccaaaaagtctgccctcccaaagactctagacaaccaagatccaaaacaaacgggataggaaaaagggtaagtggttgagacccttgggtaagaatcaagaattccaggccagctaatatttgctgtagaagttgccttgtagagatggcatgccttcatagacagatatttccaaataagcatctaaaaaccacagtgaaccatgcttaaggcccaagtgacatgaccctggagtgtatgtggctttactcctttcccaaatgtgaaactgcaattctgtgactctcacaaacagtagataagctttggtttacagtgaaaaccccccacttttctgtgtactgtagactagggttccacctcggcggctgtagcttcatccaaggactcattaggaaccatctgtgctctctcactcaagtcccttagaataaagccctttgagatgtcagaacctaccaaaagacacacaaaaattgtaaagatacataaacacaactctcttatttgagtgtgtgtgtgtgtacacacgtgtgcgcacatgcaagtttgccatagcacatgttgtgaggtcagagaacagtttgcgggagtaagctctctcttttcaccatgtgggccccagagatcacactcagggcatcaggcttgggagcaagcacccttactcactgagccatctcaccagcccacaatgctctgtgcttttaaaaagttatttatgtctttatctgtttgtttgtttattggggagtgcacacatgtgcaggtgtggaattcagatgacaacttgcaggagttggttctctccttctttcttgtaggttttaggattgaacttgggtcttcagatgctaagacaagcatttttacccactgagccatcacagtgaccacacccaggactctcctgaaaagccaggcccaggcccatgcacacacccacacttggttatgccttatcctctgcctgtatcttgctattaatcatgtggtgaaacctatgtaaaatctcttcctcgttggggctgaggagatggctcatcagatagaccatgtactgttcttgcagaagaactgagtttggttttcaggacccacgccaggtggctcatacccacctgcaactccagctccagggatcatctgaaaccctcttcatgcctcggtgggaaattctcctccgtggacaagcaaaactcctggtgtcaccaagtgagatctctggaaatcctcagggtaccgcaggccactgtggtgctgagtttttcagcctacttcccaccgatgctgacactggaaccttaaagtttctacttttcaaactaaaacggatttttttactttcagcttcacttaggtatttatctcttacgcaaagggacttctagccctggatatggagattctgagccacaggtgcaacccttatctgccttattgatgattaagacccactctgttggtgataatgactaattattttgctttcttgctaaatcactctgcctattattccaagaaggaaattcccacgccttgtcaacagtctcctccttttcattttagtggaacggatgaatcatagtatttaaaaaaactttaaatacctcatgttcgactattggtgatttgttggtgttccatgtggtatactgactccctcacaatgggtgataaagtatctggctttcctatgtcttcccccatttcctccctttcatacaatgacatcaccatttgagttccttgtttgtttccttaaaattaactacaaaaccacagtgctaagtgctgcaagggaattgagatcgaaaccagaggatgagaccagagatttagagttacctgcagagtgtagttaggaccccattgtcattgtcacctgttttgagctaaatgcttctctctgtaactgtccctcaggggaaacttcaaatacacaacgctccctattatgctgctaaaatgaagtgtgtggcattgtaaatgaggccacgtgggctggagagatggctcagaggttaagagcactgacttgctcttccagaggttctgagttcaattcccagcaaccacatggtggctcacaaccatctactatgagatctggtgccctctgctggtgtgcagatatacatggaagcagaatgttgtatacataataaataaaatctttaaaaataaataagtaaatgaggccacgtgggaggagatggctgctctaagggggaaaaaaagcttgctaatgagggatggggaagggtcctaggttagaagccgataagggctgcaaagaggactcagcagtcggagcacttgctgcactctgcaggctgctcttgcagaggacccaggtttggttcccagcacctacatggtggctcacaaacacgtgtaactgcaattctagggcatctgatgccttctcagtggacatacaaacaagaaggcagcagacacatacatattttttttaagcaccagaaagaataaaataaatatactttttctccccctttccttttattttttgacactgggtttctctgtgtaacagtcttagctgtactgaactctctgtaaaccaagctgacctccaactcactgagatctgcctgcctctgctccccaagtgctgggattaaaggcctaggtcaccactgcccagcccagaataaatattttttttaaatgatagacaaagagattaacactgaagccagcctgagtaagccagcaaaaccctgtctcaaaaccaaaacaaaacagcaacaaaaaactcaacaacaaagggggctggagagatggtccagtaattaaacgtgcttcctactctgccaggaccagaatttggttcctagcttccacttaaggcagctcacagtcagctataactcctgctccagggcatcctatgtcgtcttctggccttcgagaggatattcacccatatgctatatactcaccagagatacacttatgcatacataaaactaattaaaaaacaaaaaattaaataatggtaaataaaaagcaaacccaaattaaaagcaatagcaaaacaaaatgaaaacaagaccaatcaaaacgtctggaaaccctgaaggcagaagcagggactgcctaccctctgctcaactttgagtgagaacttccgtattgttggtcatagcaatacatcttgtcttatgaaagtattatagctatttgcttaacaaacaaaaatgctgggctctccactaagtatgcatgccaaacaaacaacgaacacttcagtctcagcattcccgagcagtatgctacctggggtccctgaaaaatatagttaccccactcctttatagatggggacaatcaaggatgtggtgttttggatgagaatgccggctaactgccagcttatagactgttgggggaagattagcaggtgtggccttgttagaggagctgtgtcaactggaggtgggcttcggggtttctgaggcccacaacagttccagagttgcactttctgcctgtgggtcaggttggacatctctcagctcctgctcaaccaccgtgcttgtctggttcctgctgcgatgctcatggaccagccctctgaaaccagtcaagctcccagttaaatattttcctttataagagttgcagaggtcatggtgtttcttcacagcaacagaacagtggctgttgtggaacaaaacctttcctggggagatacttgacatatatacctactcatcccaggtatggggcccacaacaggccaaagaacagatactacctaagttcaacttggcaaaccaatgaattgtattggggttaattacggaatatggatgaggagttacctacagcagaaatgactcaagacagttgcatcatcaaagctcactcccagcagagtgacagattacaaaacctgggaaatccggagcacactgcacagcctgcaggcagctcagtaggttggagagtgtcctttccaagtgattcggttggtccaaacctcttccaggcagcctggctggtttctgcttctagatctgccttctaagtcttctttgcagcttggcttgtctgagttttctctacagcttagctgtctgaatgtgactcttagcagctttatcacttactttgggagggaggggtctaatgaatctggtcagtttcagggacttcctgaagctttttgagttgctcattttctgattaaggagcttcctgcaggatggaatgtttcaatctcagaggaaactgttacacagtagtgactaagacagcagagccttctagtattgtcttaggaaattgtctccccaggcagatttgcacaagttgtcttctcttcccactcctgtctgcctggcatgctaacatggtgtggctgtctggtgatcctggggcaaccttgtgaacagaccctgtgtggtgggcaggacggaagacagagtggagactagtgactaccgccggcatcacagtgtaactgtgctgcctagacttaccttactggagaggaaacacatttctaacttgtggaggccagttatttgagcttatatttcaagtctttgcaacccaaatagtccaagtgtcattagaaaaggtcagaacccctcccttgtcaaaatctaccatcctcatttgaatggtgtaggaaaagtgatggctattctggttgacttgactgcatctggaattaactaaaacccaagtggctaggcacgtctgtaagggacttttttcttaattaaaatcctttgaagcagggagacccacatttaatcaggatcttctgaggtgggacatgtatcttcaatccctatcttttgaggtggaaagagcaaactgtagtcggggccacaccttccagtagcctgtgggaaggagaggaaagatggaagcttgctctctggctgcttgcttttgctgttgtcatcaagtccaactactggattcttggaccttcgtctgttattattttccttgctacttcataattgtaattttgctactgtttatgaattgtaaggtaaatatctgtgttttctgatgatcttaggtgacgcctgtgaaacggccattctacccccaaaggggtcatgacccacaggtagagaactactgctgtaagctttattcctttagagaactctaaaacagcaagctatccgcaaagggcagggtagcagaccctcagccatagactgcacagaggtctagaaacagagtctagccaggaggtcttgtggagaatggagatcaggtcatgaagtaagatggacactgaacaatcttgagtaacatacttgagtctgttgtcatatgtggaccgggcctggcttgagaaacgggtgtcgtctgtttctaaccctgaaccatgctgcctcgttgctaacagctggtcacaaacttggatggcgctgagacaaaagttttacatctacagtgaaaagagacaaaaacttgaaaactccagggtatagttgaggtattagtcacttcttttcactgggatcaagtatctggtaggcaacagcttgagggaggtagtatttattttggcttgtggtttgaggggatgccgtccatcacggggagggcgtggtggtccatgcccatcacggggagggcatggtggtccatgcccaccacggggagggcttggtggtccatgtcttcttggggagggcgtggtggtccatgcccatcacagggagggcgtggtggtccatgtcttcttggggagggcatggtggtccatgcccatctcggggagggcgtggtggtccatgtcttcacggggagggcgtggtggtccatgcccaccacggggagggcgtggtggtccatgtcttcatggggagggcatagggtccatgtctgctgcagcaagtatgtttttcctcttctttcttcttcctccatgtctatttcatttcaacaccctaagacacatcttttttatttgttttaagacagggtttctctgtgtagcactgactgtcctagaactcactctgtagaccaggctggccttgaactctgagatctgccttcctctgcacctcaagtgatgggattagtatgtgccactaccacctggcccaagacacatcttaatgtcccacagggatccatccattgctttgttggtgacaactcttcagttcctctctccccttcccgtggaccttcctaatctattctctcccttcgattcttagttcaaaaaaaccaacactggatgttaccctgcttccaacccccccttccctgttgttctctcttcacacttggttttctccagaagattccacagtggttcttggcttcagttgttctactttctttctttcttttctttcctttcctttccttttctttctttctttctttctttttgtttttttttttgtttgtttgtcttttgtttttcgagacagggtttctctgtgtagctttggagcctgtcctggcactcgctctggagaccaggctgtccttgaactcacagagatccgcctgcctctgcctcccgagtgctgggattaaaggcgtgtgccaccaacgcctggcgtcagttgttctactttcaaccaagctcctcaggggaattagtcaaccagcagcctaggcctaaatcatacccgggaaacccaccaggaacacagtgttgaggagcctagatttactccatgagtttcattgtatacgtggagagactgaaattagcccgtctcactttagcatctgtagctattttgaatccaagttaaacagaggatcagcctggggactttcgatacaagtcgtcaccgtgcaagtttagaagtaaaggctgaggctgagctggtgtttggtatcaagagaaagaaacctggagaggtggatgtcacctgacctttccaagagagctaggacaatggctgaccaaaccagtagcacatttacttggggtatttataggaacacaggcaactgacaggcagttatcccacccaggagagcacttgctccccagcagcttctgactggttggggggcagaggggtctcatgcacctgtttgccttccaggagagcccatcaggggacggtgtgagggcctcttctcttttcatattatttactatttatggtgtgtgcttatgcccacaggacagcttccaggagtcagttctcacctcctaccttgttgaggtggggtctcttgggtctgccctgtgctggctgagtaccccaggctaccccaaccccttgagcttccggatgactttcttgtctctgcctctcatctcagggtaggtgtgctcctacatctggctttttacctgatgccggggggatcaaattcaagagtcttgcctgggtagctaatacccctacctgctgagtcatgtctttggccttgtaagggcctcttgcagggaccacattggttttgctttgaagatgacaaagagttccacagcagtaaatcgtcttggagaaggctttgtgctgatggggaacttggctttaaggtgattggcatcagtgtgactcagcgtcagccagctgaaagagaaatgggactggaggacagggttaacggtagaaataaaagaatgttgagtcagttttgctttttttcttcttcttcttcttctgaagtttgcatttctctagaagtccttggcatcattaaagtttgctttgacttctgaggatctggctcactgattcctagatactaaactgggagagaacaatgatccaaccctctctcccgaggctggataacggagcagctctgtggctgatgcaaagacttaattggcactctccagggaagtctgaaacacactgagctagcaccccagggctccagtgatctcaccaccctgttcctgctggtacatagctgacagctcctgtaggtgcaatattaccagtgctctggagaaaatctccctcctcttgcaacagtgaaatccagtcagtctccatagacatagttaacagcaatgaaaacccaagctgatagtctagttgtctctttcagtgcaggagaggtgcctggctgctggctgggtctctggcctatgctcagagcctggagctgactggttaattctaagtcagtcaagtacatataaatgacatttaaaaacaggatatgtcacctaatggagaatacatttgtgtcttagctaattgaagaaaactagtgaataatgttatcctaatcgttttttaaagtctaaccaatgtttttattttattttattttaggtctagtcagtgtttgttctttacttgtagtgaagactttccaccatagctgcaccctcagaaagagaagaaagttggttgatttagaactgccagtgaggaattttattaaccttttccgataatgtttttaaggtttttttgttttgttttgttttgttttgtttttatgtgtatgggtattttgtctccgtgtttgtgcaccatgtgtgactggcgccctttgaggacagaggatcccctggaacttgatcatgggctgccatgtgggtgctgggaattgaacccaggtcctctggaagagcagccagtgctctaaccacttggttatcttgtagaaagtaaagaaaaggacaagaatgaattaagttaacattagaagggtgtctcttcaaactttttgttctgaggtagggccctactctgtagccacactggcctcttggactcacaccaatcctcctgcctcagcctcttgaacacagtgattacagatgtgagacatcacagattgttctcaatattttataatatccacacattgtttgatgggtgttggtggcacacgcctttaatcccagcactcgggaggcagaggcaggcagatctctgtgagtttgaagccagccctgagcaagttctagctcaccctccaaagccaaagagaaaccctgtcttgaaaaaacaaaaaaagaaacaaacaaaaactccacatgtgttttatgtaactgtaatacaggtaatgaataagacatgtacaaaaggttatatgtatgtgtgtgtgtgtgtatcaatggggccgtgctcaatacactgttgttatggccaagatatcttgaatcagtgaggaatggtggtgcaaacctttaaccacagcactcagaaggcagagggcagaggcagggggatttctgtgagctctgtctggtctacacagccagttccaagtgtctcagtttgacaatgatatttcgataaacacggctctttccttctaacattctttttgaggtcttatgtagactaggctggtctccagcttgctatgtagtagagcagtggttctcaaccttcccaatgctgtgatcctttaatacagttcctcatgttctggtgacccccaaccataaaattattttcattgctacttcacaactgcaattttgctattgttacgaattgtaatgtaaataccgaatatgcaggatatctgcgagacaacccctgtgaagggttcggtcaactgccaagggttgagaaccacggtagtagaggatgacctcaaacctctgaccttcctgcctctacctcttggctactgcactttcacctactaagacatcttactcaatcagcccacaagcggatatttttagatgtgctaatgatattttagctaatatcttctatataaaatagttttcccaactaataaacatcttaaattccacggtctatctttaattaccgttactctgcttttcaaaagtgttacatggctcttatactattattccatttggctaacccccaccctttgggtttctctgtgcatagattttcacttgtatatttggtgttcctggggaggaatgaacacatgtctcctgtgtctccagatagggaattgatgagacaacaaagttagtgtacccctaaagtctaacttggtggatggatgtgtttattgagtttacttacttacaggaacagaagggactcaaggacagctgcatcaataaagtccttcccggcatgggaggtggctcacaaaaactgaaaccctggtgctcaccgggtgacttgaaggcagctctacaggctggagattgccttataggaagctttggttgtctgcacctgtcccaggcagcttgatgggcttctgtttcctcagcagtctttttgcttatataatcttggaaacagggatggcccttgtgtgtctggtcagtttcaggatcttcctaagactcttacatggttaacttcctatgctggatagtttttatgccaacttgacacaagctagagtatttggagaggaaggagctgcctcagttgaggatctagctataggcaaacctgcaggacatctttttaattatgattgatgtgggagggcccagctcatggcgggtgatgctatccctgggacattggtcctgggttccataaaaactcgggctgagcaagccacggggagcaagccaatacacagcacccttccatggtctgtgcatcagctcctgcctccaggtccctgccctctttgagttcctgtcctgacttccttcagggatgaacagtgctgtagaagtgtaaatcaaaccctttcctccctaagttgctgatcatggtgtttcatagctgctcaggtctgcaagcagagcccggtgtcttcatgtctttacagcggcaggtggtgtatcctaaatattagtgagttggggagaagttgctacaaaacactaacccacaaactgaaagcagccactaggaaagtggccgtgtgattccgactccatgagaaagcgggggaggcaaaatggtggtgacaacaaagacagtggtgaattacaggaggggggcaaccaggcaagcacggagggggtgggagcactgctgggagcactgctgtgtatgctctacagtggtgcagacacgagtcattatgcaccttccaaaccctctgagggcccgccaccaacactgaagcctaatggagactggactgtgagtcatcagttggagtagttcaggtcatcactggtaacaaacgtgtcacaatgggatgggggaacccagggaaggtgggaactattgaaaaccctcgacaggcatggtggcgcactcctctaatcccagcactgggaagctgtggtacattaggagtggttggtcacactgcttccaaaggaaggagagaaggataaattctattctcgccttacctcctctctctccagtccaggaccccagctcacaggagtggtgatgtctgtccttaagttgaatctgcccttatttaaccgagacactcctaggtgattctagacgctgtcaggttaacaccccaattgtaaccaccacagagggcttttaccaggcaagggtacaggggtgatgaatccagtgcctgacggtggcaggaagacactttatcgttgagtcacactctcatcctttatggttggtaaagaaggctttgccagctacagactcagtggtttctgcagctttcccatgcaaacacacgtggtgagtggtgcaggcgggaccctttctctataaagtgaagcctgaaagccccaaaagctttcctcttagagaccacacttcccacccaaggcagactgtccatggagcagaaaccctcttcatgcagtggggcgagtcccaactggaacacacattctttccgctccaatgaggaggctgccctatgagagccaggcagccaggggctggtggggtgatgcaaggtatcccagggcaaccactcctccccaaagcagtcgaccctgcccctctgtgagccatttcctggctgttcaaacagctccacccaagccccaaatctatcttggttctgagacatcctttgggatttgagttcactgtgtggccagaaggtctggaacaaaaatatatggtccctggggtgtgactccatggcagtcccagaaagagcatgggttattttaatctggtaataaatagtccaggtctgtgccaagcatgaaacagtctcttgtctatcctgtctaaatgtgtgagcaagcacagacatcctaagatggaggggaccttaagggttgggttcttggacagattgggagtgtgcctgtctgagttccccatttgaaatgccctctcatctccttgtggaagctctttcctcccctggcaagccggccccacacatctcatctccctaactttcatttgcccaccatgatccggtatggaaaagatttgattaattcgaacaggtttggaataaatgagagctgaagtcttcctgggaaagaggatgacgagaaaaagtgtgggacaaagacatttatgaaacatttatatttagaacagaaacagaaaatttggagaagaaaacatacagttaaggcagagggtccagctggatgagcactcagagacaatggacccctgaaatctgcaggcggttgatggttggtgggtgtggagtagagggcggttcctcagcgtgggagctgctcactagcttctccatgcttctgcaagttgccctaactaaaccatgggttcaccgggctagctgagcagagtcctgtctttggtctgttgttggcatcctgtctgtttgcctccccaggaggagtttacacaatgcttgcatatctgaaaatagccctcttcctaattgatagcaaaactagacatagaattctaagctgcaactcacttccttctgagtgatgacaaccttgtcactgaggaggactcaggagcacctttgacggtggcactcatgatcacgccacaagtttgtttgcatgcaactgtatgtgtgtgcatctttacataattaaaaaatgcagcataaacaaatgaaacacacctttacacagttcgggtaatattccacagcataaacaaatgtaacacgtttccctagttaattattccacagaaggctgctcttccagaagacctaggttcaggtcccagcacctactgggtagctcacaactgcctttaatttcatttacaggacgccctcttctggctcccatgggcactgcacacacatggcgcacataaactcactcaggtttacacacatacgcattaacttcaaaaaaatcctaaaaataaaaccaaagacttcactgacagacactaaagctttttccagggcaaaattggtgatatttgaggtagactcaattagtactgtttaaatgaaatattttatgatgtttttatatttaaatactgtcgtgtgtgtgtgtgtgtgtgtgtgtgtgtgtgtgtgtgtgtgtcacacaaatgcactcacacacacacatggactcacacaccacacacacatgctgtccccagcccttcttgtgtatgtttctatttgctaattggcacactcttgcctcagagggaaatgtaggtgggaagtcctttgggaaatgtacttggtaaggaagaggatttctgtggttttataagttacctgtttccataacccttgcagcactcagccctgctgagacatactcccagtagaccagataaacatttctgttcatcaaggtacctttgtcccaaacacattatggtatacagcttaatgcttaaagctcagcctcctacagtctgttaatgtccacatggctcccctcagagtagttcacagtggcgtcagcatgtagggtagctcacactggcgtcagcatgtagggtagttcagtggctgcctattgctgttatgcgaagccaaactttgaccttcttcagagaacctgtggggtctaaccaaggaggaggaagagaaggaagaggagtcattttcagtttgagagctttggatcactcttccaggaaaccaagtcagcataaaatgcagacggttaccctttgaaggcaactgtaggagaaactgaggccagcctacccaagccgcagtccccctgcccaggtgcccaggccagcctgcatgagcatgcgtggcaagcacttcctcctaaaccaagcctaccatggtgtccagagactgctgacgaagagacacctgaccagagtcaccagtgaggaaaggaccgcgcagcagagtcagcgcctgagcagatgggaccttgggagggggtgtaaaggcagaactaacttctaacttagtaaacttctaacttagtaaacttctaacttagtaaacaggtctgcagccggctctgcactcaccgactcccagctcctgggtccttggtgctgtcttctcacccctaccccaaggggtgtcctagcagggtgactcacaacaggcaacaaccctttggagacaaatactcctcaggggttagagactgtagcagagtgtgaggtaggccctgggctctttgctctccatctttagttttaggaaaacactcagcacaaagccatcattgacactgtaaccacccatccagaaccttctacaagacttcatagttagagatttcccacatagccgtgtcccagcctgagcccctgaaagagggactaggcgcatgcctgtgaagtgaggtcatgtgtaacttcccatcttaatctcagacagtcacaagattgtgcaaagaagcaaaaccatcaaaacatgaggatgattgatgggacgtccttctgtatatacgtttctcttattggtggatgaattaaacactgtggctctatgctcactctcaggatgcacacgctaatcacatgtgtgtgcagggctcagtgttccgctctatgctcactctcaggatgcacacgctaatcacatgtgtgtgcaggacacagtgtgtggctctatgctcactctcaggatgcacacgctaatcacaggtgtgcagggcacagtgttccgctctatgctcactctcaggatgcacacactaatcacaggtgtgcgcagggctcacgtccacatctcaccaggcccctcccaggctgcggcggaaccagttctaaccagaaacggccccgggaccagggcgccggacagccgagaagcaacacaagcgccgaggccgccggaccagccagcacctccctggcgacggtgggcggggcgggactggcgttgacgccagaagaccacttccgcctggtgcgtatgacgtcaggcccgacccccttaaaagcccaggaggcaagcctcgcgagattccgggggctgnnnnnnnnnnnnnnnnnnnnnnnnnnnnnnnnnnnnnnnnnnnnnnnnnnntaaaccgggcaggtcttcttcaagtccagatctgctgctcacgaggctggcgcttgcacctcaagttgtctcgatgtctgcactcgcgcgcgcgcacacacacacatgctacacacaccacacacaaatgcactcacagacacatgcactcacacaccacacacacatgctacacacaccacacacacatgcactcacacaccacacacacatgcactcacagacacatgcactcacacactacacacaggctacacacaccacacacacatgctatacacgccacacatgcactcacacgccacacacacatgcactcatagacacatgcactcacacacgccacacacacatgctacacacacacacacacacaccacacacaaatgcactcacacacacacatggactcacacaccacacacacatgctacacacaccacacacacatgcactcacacaccacacacacatgctacacacaccacacacacatgcactcacacaccacacactcatgctacacacaccacacacaatgctacacacaccacacacacatgtactcacacaccacacactcatgctacacacaccacacacacatgtactcacacaccacacacacacacacacacacacatacattttctcttatgccccaggatatataaacaattgagtttattatactcttcccctgtggtggcctcttggagttgtgtctgagttagctgcccctgtgtctttacttggggagggaaattagttcaagatagggaagattgtgacatttattgtataagctcctagacgtacttttgtttgcaataccctgatcccaacagaagtacagtggatgaaagtctggggtgtgacctcactctgcccggtgctcttctcttgtgagaggactgagtaggtttctcatttgctggatgtgcttagactgagaagcaaattgggtcctttttgtgctcttctgaaaggccctgctgttaaggaatgaaacaaattagactcagaaaagccacatgaagtacaatactgtaagtccccgcatttatttttggagtttgcttaaaagtaagtcaaagaatagaaaccacgattgtgcaaataaagtgtgccctctgcagatttttaaaaattacttaaagcagtttttttcttttagtttaaatatattttggttgtattcttcccttccccaatcccttccagatcagctcttcctccttactcaaccagctttaagttctttctcaaaaaaaaaaaaaaaaacaaaacaaaaaaccctgaagtttttttaatgctagattttaatttcaaaaggtggaacattatagaaaaggagaaagcattagtctcagtttggcccttcttttctttagaaatgttctgctccctcaaataccagaagtatcttgttggtaaggttgggaacttgcagagtgccttctgacagctgggaaaaggcggagactccaaaccaggatttgcatcttgctgtaatatgaaatcagtttgttttatgtaagtaaatgcagggccagttaagcaagcacgttgctgcttgagaatcctagcattgcagtcaaatcaacagatggtcaagttatgactgggttagatttgacatttgcaggaagcctgcccctggattttgatgaagagcaccatgggctgtttcagtgagatggtgaagacaagcttgaggtagaaggattttatttaaaccaaaccaaacaaacagaagcccccccccccaaacctaaaacaaccaaaaaacccccaatcgtctgtctcctgactttcttccttgttcctccaaccgttggagtgttatcatacactgggtacatgggactgtctccaggtaaaggctgggaggatgttattgtttacaagctttggaaggaggggataagaggaagagagttggttgcctattatacacagatgctgctggggcctgtcctgaggtgggtggagtctcctggagagaaataggaccccacctccagtaaccagagtataaaactcatgccgaagccaaggaaggagggattcaaccagggtttcaggaggaaaagacatttgtgaaggtgatttgggtgaccagattgatcattcatcggagggtaagacagtaagaggacactttatgcaggactacttgctgccaaaacattgttttctttctggagtgtttttgttactcccccccccccatgaagtaaatgaggtgccaaggccaggtaggcaggaagtggtggggtctccttggcctgggcacctaccgttccccactgccattcaggaaggtcttgctcaggtctgcagttgcgaagagtggattttggaaaatgcatctaaattttgagattggttttctgaagaactaggtaaatgagttgtgtttgttgtttgttttgtggtctgtttggttttgagacagggtctcactctgtagctgtgtagttccaggctgtcctgtttagaccaggctggctctaactcacaaagatccacttttctgtctgccgtgctaggattaaaggtgtgtgccactgcactctgcaagtgagttatttttggcatgtaaaatattttagtctacttttggaagttgcttttggtgctaattagttgtaaccattgagtgagacttgataattttgaattactgcctgtcagcacccatgtggattgaaaaggagaaattagaagtacactaaccctttccccagtgcaatatttcaattgttgtgtattttgtcttgtgtttttaaaggttgcttggcattaaatattgtttgggttgaattatgaagttggaattgagttgatgatgtcagtctcatccctttcagtttttatttccataaatagctgttctgatgatgtctgaaataaggctttgagttcagttttgtacatgtgtaaaatgagagaagttcagccatggaaactcggcatttgggtgtcatctgagatctctgggaccgtgaagtcacaggtgttacggtaggcactgtgctccatacaggtgtgctggagaaataaacaggtgttggaagaatagtgtgtctggttttatttatggattttcgggcttaatgtttgtttctggttaacagtaaattcagttaaacttatgtggtgtgtatgagtgagcagtggtgggctctgtctatgttacccaaaggtccagtgaaatccaggctccccaccgtcattcttgctcaggttgtctctccttgttacagagaggtccaggggccagtccgtggtccagtgtagaaagtactgttctctgaatgggatcggttctgggatgcccatctccaggccagcagtttatggttcatgagcttaactcgggggaaggagtagagccgtcaacacttaaagcccatgaaatacgacaaagataggaaaaataagctgttagcatgacttcaatcaccgtttccgtttgccatcctgctggcgcttactaattccacaggtgcagtgtttacctaactacatgtctgatcactcgtgtgcaggtagcattccctcgaggtcttgcccttttcagccgtttgtacctttgacagcaattaaacccaaaatttcatagagttgcttttaagtctgcctcaatggtttgggttcaagggtttacagggatggctaagtacaggtttggttttgaaagggttcttaggataaaggggcatcagttctccctttaaagggaaagttggctctcttctgggggatacaagctcgggaaatgccttttcccacttggaacgcgtgatgcctccctcctagatgttcactgcacagatctaaggaaaaaccttgacaattacaggccctgtggcgtcctgaccgtacacattcctctgctgtgactcccagcagaactcaagtcttgctagttgcctgtgggaacttgaacctgtttgaagcttagtttaaattttttaatgtacatcgtgcaaaataggaagtttcattgtgcccttttcacaatacaaactttgaccaccttgaccctcctgtcacttttaaattcattcttcctcagttactcactgcctttgtgtttgattcaggaagggactttattcccttggttcctggtttctggagcacctttgtggtggttcctgagcagggtgaagttggtaatgtttagcccctcagatcccctgcagatacaacaggaagtgagaaacaagaaggcagcacccaggtgactgcatcattgctgatgtcatctatttttggcattcgaaatcccagcctctgctgtgtctgagagtgtagaaagttgggtctggtgcggagacacacccatagacgttgatacgcccgtccctcttggtgtggtttcatgtgtggtggcatgtgcaggagcggctagggctggggcttttgtgacttgggattggactcggatctcttggcagtcctcagtagtctggtcaaaactgtctcccagtgtgattcattgatttggttcggggttgtctgagcgttctcttcccccacacagacttcactctgcttccaccaggtctaacttgtcagtagctgttttaacgattacttagtatgtactggcacagtcctcagtagcatggctacagtgtgaatagatagtctaattggatatgctcagtgggagcccaatggattattatctgaggaaatggaagcttagaaaagtgaggtgccccagccagggatacaggggcagagaaggtagagtttgatagtgactgccaagacgtgggcttgttctctctcctgttactttatcacaaaaccttttcctttgctgtttgcttaacctctcttcctgtttttcctgacttcccttttccctcctacctcttaggagctgtttacagttttacatgccaaacataagttttcctgggacataatgggctttgttcttagatttatagtgaggggcttgctcctggagaaagcttatctcagggggtgctcgttgcaccttgtattgtgttttatggttttgttatatatgtccttgttcatttgtggatttgtagtgaggaaaggactgttacctccatttacaaagcaagagagaactcagacttaagtaacttacctgagatcttagcatagagagagccaacacctgaactaatctaacatgagcatgtacatgctagttggcttcatagattaaaagccactgtaaacagaatgtttgctgagaactctacaaaattagttgatgagacatggttcttggcctcgacaattaagccagaacaaacaatactatcagctaccttccttaattaaaaccaattagagttggctaaatattacagcacagcattttctttaacagtggcatagtttttgagcctcgagcattgcttaagctggattttctttccccatttttaatcatgaaaggctcggtcttcgtccttgaagttgctctctgctcgtccctagctcaagggcttgcttccttgctagaatagtcgtgctaaaggagaggatgaggcagaacagacagaaaatgaaataatagatctgagaatcccagccaggcttggtgagcaagggcaattttttaagtgtgtatgtatgtatgtatgtatgtatgtatgtatgtatgtatacatgcgattttgggcgggctttcactaggtatccctggctggccaggaacttgaaatgtagaccagagatctacttgcatctgcctcctgagtgctgtggttaaagatacgcacttaggcttggctatgagataccttatagtggccctgtcgtaggaaattcagtatgtattttataacatgggaagatggactctttgagagatcagaaaacctctttaacgatccacttttggaaatattatgtcgtgccagtatcttgtttcatgcaatttaatttttagaagccatgagcgtttttatttagttaagcattgacctgctgacaggccccttctatggaagtgccatgcagggtttgccctgtggctcctttgtatttgccagcaggggctggttgcctggtttgtagctctaaggagttgccctttgctgtggttttactattgagatccatttcattcatttggacagacctttcacatctagtgaggagactcttgacattcctgccgttatcaagtcaaacagaaaagacttttactatttctgtgcctggagtggaaaagttttagtactgaattgcatgtgttgccctgttggtattctcagtatgggttagcactcaaagagtcacagactcccaatgcttctaatgaggttaattgtaattcagcttcttgccaggcactgtgttaggcaagagagacatgtgacaatgtgtcgcccttccgtgtagatgggatgggttctgtcttgtgagtggtgtggtgagtgcgtacaaagaactcaagttcaaacacagaggaaccaggtgggcaggtgggcaaattaggaaagtgtctttcatggactcaactgtgaattggccattcgagagtgaagaatgtgccgggcagaggggttagcataatttgggtgtgtcccaatgacacctatgagttatatgctaattatgtaatttttttttttttttttgtccagttggatttgaggcctttgagcttagagaagggtggatttcagcatctcagcagccacacagctgggtccatttagtgctttagtaatgtcacaggggtagggatacatagtgagcaagctgagagaagggaggccagcaatgggtggaccaccaaaatgagttaggcagcttagctagaaggaactggggtggtgggtgtcgtccctgtattcagacctagggtatttcttcatgttgaggtaccggcctgtgctccaggggacatggacttagaaggtcatggtgctctcttgctgcacaggcagccagccagccaggcgtcactccgtaatggtattcataggtgtgaggctgtggtgggcgcagctgcagcagcagtgagattaaaaaggggcccctgtttaggaaccgagaggctttcccaggaaggggtagtgtttgagctgccatttgaggcttgttttattattatttttttaaggccaagtagccacagaaagacatcatacaatgatgtaggagactgaaacatttggggagggggcacaggcccctggggtttttgatgttgggacatgagcctgggcaggataagtgagccttttatttgcagagtgttttgtctggcttgaacgcctgaccttttgtaagtgtttcgttgcctcatgtaggcctgacggaagcatccttgttgagtgtccctcttcctgcatgtggagttttcagcaagcaactgcctttggcttctcttttgggaaattagacagagaaagtggcagcaccatcagctagagagaggaagaaaaaacaatctaccaaatgcctttaatgaatgcacgaacgaacctactctggttcttgtataaagagattgctgcagcaaagcacagcttcaagaccaagttgtcctgggaaggggcgttgcgggagggaagcactgttttgtcttttctccgaggcttatggaacacttagtttctgtgggataccttcaagtggtgtcaggcattctctcccccaccctgctgctggtcatgagttctgatgcacagtccacaattgcagctcgaggctcatccgtgtactctctgcagtgccggttcttcagttatgtggattgggccgaggaaacaatacatttaaaccgttctctgtggagactgcaaggaggaaatgcccattgtgtttctaggccatgggtctgcagctatgttagctttagtgccataactggctctaataaacatttacaagcaataggcatggctgtggggatgtgaacgacaaaagagcagaaggagaaaggcctgcagagcaatgggggaggcccaagttcatgccgttaggaaagaccaggtaagaaagacctttccaggtgagagttaaagtggcttaactcacagttgccgcacggtgtcccgtggggattggtagggcaaacagtggcagtgtgtgttagccctgtatttatagattcaacttaaaatgtgtctaatagagactctctagatttgagaaaatgggaaacaaaaaccaacactttaagtagtagtgaacattatagccccatttctgaaatgtagaaaacatttaggatatgaatccataggtttttttgacactggggcataagcactgttttctgatatgcccttgccacactttgtgggtaattcctgtgttatcttctttccttcagcatgtagccccagtcgggggaaggtggggggaagtgataggaatgtctgtatgtcaggcaacatccatgtgcaggctcctcagatgccagaagaaggtgttggaccccctgaaactggagttacagatggtggttagtctccacgtgggtgctgggaactgatcccaggtcctctgactgttgcaccatctacaaccccgtgttattagagttttccctagtacagaactgcagtttctagcggatggacaattaagtgctctaagaggaagatggatgggagcagatctggaacttgtgtggtcctgtccacaaaagccctgccacacacctgccccagaaaacagcccctgggttgaccaccaaggaaatcagatgccaggctttagttttcccacgataactgtaagttatttcactttggtgtggaaaggcgctctccagttcatatctagccagttccaacaggaagtctctctctgtcactgccacaaactagattctgatttctgtgtaaatatttaagctccttcggctcttatggcagctggctctctctctcttagatggttgctattctccagccttctgcctcactcgtccactccatatgctctggggttggtgattttgtgtgatctgatatctttaatgggcactgtgcaatgatgacttccagacttatatatcttaaaaaaaaaagtatttaattatgtacctgggggagtggagtatggttgcccaaagaaacccaaagcattagattccttggagctagagatataggcagctgtgaaccacctgatggatgtgggagctgggaccggaactccgatcctctacaaaagtggtccttattctttttttttttttttaatatataagttggattttttcagcagcatttatttttattttttaaagattttatttatttattatgtatacaacattctgcttccatgtatatctgcacaccagaagaggtcaccagatttcataatggatggttgtgagccaccatgaggttggtaggaattgaactcaggacctctggaagagcactcagtgctcttaacccctgagccgtatctccagcctcatcaaaccctgtgtcttgctcagccttctcttctgaacttagattcctcctacatatcaccagcctggtgtgttctacggataccttggattctgtttgcctctactttgtcttcccctgtcctgtctcttgctcatttcagggtgtgatgttattctgtcagtgcatcacagtattcttttatttttgagatgatatttcatgtctgtctgcctcagccttccaagttaatctgacctataaccctggaaattatccttggccccttccttgttggtcactggccagtcatttatgaagcgtgtcttgctgcctgccctccttcatccttgtctttgcttctcccttggtgtcattgtcttgacatcagaagagagtgagacacagcattaggagggtaggagagaaccaactccacgtgaagtcagtgtacccctcaatgaaagcatgccatttaaaatcttaatatgtccagtgattccctataacctccctgcagatattcttcccagttttggttaaatttgggagcctccaggtcatcacatccatggtttactaaagttagtggctaatttatctccgtttaatccagcctgtgtcatttctacagtgtgacttaacctcagacttgagggctttctttgaaaatgactccagggcctgagcacatgttaagcactttctccaatttacatcatgtctcatgcctgctctggccacagtgaacctggagtttttcttacgttgggccacacacacacttctatagcctttctagccctggtgggtaaccccatgtcgtctgcttaggtgtccctctttaaaggacagcttcctttcctctttcttgcagttaggtttgtgccccccccaacacaccttggcttctctaagtgttttatacatgtacctcccatgttgttttacatcctaaagcaatggtaaacaacaccctggttctttatttaccatgcatcaggcttggaacaatgttgactggaatttttttccctgtataacctagcctgttcttaccacagaattaggtaatttctcaggacagcaaaagtggtattggaggatttactcctctctttatagctaatcatctttatttcccttatgcaaatattccttcctgactgctcccctctgtctttgtttggtcagtttctgattggcatggtcataaggaagacaagacaccacagatgatgagaacctggatttggagtccatgtgtaaggcccgaactgctcgcctttccagatttgcacccgtgaagattttgttaggatctagaagtcatcaggattcggggaatgtatttaatttaccaagcgattgagagcctgatgtataaacggattgctaatgagggactctggggtgccccctacaggagaacctcttgggaaaccacagtctctaatcaggtggataatcccaacagggagtcactaaaccaggctagcctgatgtggcctctttgtaaagacgcttggcttgtgtatgtggagcacttgttcctcagacaaactgcagggcacaaagccaaacctcgcttgctaactcttgcttcctccccccagacggacagttcccctctgttgtcttagtttctgttctgtggctgtgataaaataccatgaccaagacagcctacagaagacggttcccagggctagttcatgatggcgagcaaaggcctgggggcacgcagatgagagctcacatccaagtctgcaagcaggaggcagggaaagtgcactgaggagatgggggcttctgaaacctcatgcccgtccccagggacacacgtccttcaccaggacacttcctcatccttcccatacagttccacccactggggactaagcattcaagtgcccaagacttacggggggcatctcattccaccgtatctgttaacacagtcttttcttcagcaaggtttctgttttcatagtctaatctttgccttccagaatctgcatcttctcactgctgttggacttggggtgccccaggtttgcacagctacattctgtgttattggatgttgctgattgtttttagctactccttgtggttcatgctgatgttaactaaattttcgagtcatggggacacttactctgcctctttgtatgcctggctatggggcctggcctagtgttgaatacttccccaggtgtaaattgacctactactctctggttctcaggtgtgtgtgtgtgtgtgtgtgtgtgagagagagagagagagagggagaggagaaagggagagagaaagagagagagagagagagagagagagagagaacaggtgtttgtacagctttgtgcacaggtgagtatgcatgcggaggcccatggttgatgtcgggagtcttttctgttctcccactaatcctgtagatttaccagtgcagttgccctggattgtcggtgatttctaggaatttgtctgtctcctgaacggtaggattacatgtgtgggctgccatgcccagcttaggtggaaactggggatccaaacccaggtccttatacttaacagctactttatagatagaaccatcttcccagttccacatctgatttaaaaaaatttaagtcgaatataatttatctctgcattgaatttaataagttattcttctgttaaagtgtttcatatttggactctggcaatgctattttggattattctccctagattttggtgggtaactctaccattacttgataaagatgtgtgaaattctttctcagatcaccgataacagcattgtctaagtcaaacaatgtgtcttgcagaacttaatgaagttaggtttgttaggtttgtttgggttttgtgacaggtctcagtatgcagcctgaattggctgtgaactggttttcctcctgtcttggcctcttgaggtgttcacacacatccaccttgtattctgagtcatgttgtttaatcattgaccaactacatctaattcctacacacacacacacacacacacacacacacacacacacacacccatacccccatgcccagtagagggtaacttgtgaagtgcattcagagagctcacagagctttgtcccacagctttgctgatgagagaaatagcagcacaggtggtgccttcttctcccagaattccagctcatcctttcccactcttgtaaactcccatagtggaatcttcctgctgccctgctgtgacattttaatgtgtctgtgagcccctgtgctctgcataccccctcccccattagaccataagggcattttgcaccagtcaatcacctgtattccacgagcagtgcctggcacacagtgatgcctggtcttggttgagctaattagccaaagctaatttcactacaattctattcttgagagcttcctagaacatgactcacactttcctttagcatctcaagcaggatttgctcttctttgttctgaacattttgtaatttgtgttctctgattgtgtcccacattgctgtttccagttagcatagcaagcttcagaattctgtgcttaattgccctccattcagtcagctctcttcctcccagtggtcacgctgacgtctagaatattgtctttcactatatgagagagacataatgggccgttttagccaggcacacctatgtgccttcattttagctgtgggagaattctagcagatatcctcaaagttatggaggtccccatcacagcagcccgtttctgcatcagctctgtctccagggtatcagtgctctgctgccattgctgcatccagtccagagccccgccccctcctcctcctccgtgtgatgctcagtggtcccaggttggcttgctggtgaagggtcaagcactttctttgttgaatacccagcttctagtcatggcctcatgggcttgctgggtttttgagggaggggatcccagcacgtgattgctaacatccttcccatttgtttcactcaacacatgatttacaggagccttctctgaagtcatgctcctccttaggagttgggtaacaggcaggtgttgtccaggttatcctgtttgccatcatttgttaagcctagtggacgtcagtattctatctgaatggcaatggtgatcatggcccttgttatcagaggccactctctgggcgagtacagtcttcttcattcagtgacacagtctcaccagcaagtccttcctgccctgtacgctgaagtacagtcaggctccatttctgccttctctgtgtctcccagttggtaggagacaacctacagtagtgagtttcttacaaaccatgtctgctagggttgcagtccgggcaatagtgagcagttattgagagctcagtcatagtgtgttgaaactggattcaaataaatctttaaatttaaagtaaaatatcagttttataaagtggaagtgtcaactaaggccgtctctcaatagtatagctttttgcctaatatgtttaaaggtcttgatttgagccccaagctgcagaatcattttttttttttgtagtctacatttggtaagttccatgtattttaattggttcaataaaaacagacccattaaaacttttgctaggtgttggtaagctaaatgctctaaaacattacatttgaaaattttgttattaatttgtttattaagacaggctggtctggaacagtccccctgcctccacctcccaagtgggatgacgggcctgcaccaccgaattcagcacttctcttgtggagtaactatagaggacctactttctcaagtggcccctggttgcagagtcatgtgaagagttgtgtgtttagtatcgcagaatgaaacgagtgtttgctgcatgggctgttttagtgggcactgcatgtccttctcatcctgggtttaggaaaggtcagttggtgaaacataccatatataggaagccccatggctaaaaacatggatgcatacatgttagtgctatgtgtgtgtggaaactgcttcttcctaagcagcctgcagcatggctggccagagagatgatggtttaggtatagtttacctctcaggcaatattcttttaagacagttctgactttctctctggtctaagcaccctttaaaacctagtgccttttctctggagatggggaggtatttgagatttttcattactaaatccttggcggatacctagagaaaccagttgtcatttccaggaactctattgtcctgggtgtagggcttagcagcatccctgctgtcacggtgatgacacttgaagggcctcctacagaacagtgcatctcaacagtcttttctgttataccagtaggacagcacttgaccggcccaggttgctgtgcagagaggctgggctgaagctgaggggggttttttttttttttttttttttttttttttttttgctagatcacatctgagcacttctgtacatttagggttaccagattatcatggggagtgggtgtggggaacctcatggctgcagcatacgtgacaacaagtctgtctgcatgggcttgatttcacaccttattgtaagattggtagtaagtgccacacaagttctaaaacaaaaatggaagttggagacatgagaatctagcaagggagggaatgcattattctctgtaaatgcaaacagaaggaaaagaagggacacatgtatgtgtgtgtgtctgtagaggtcaggctgaccttggtaattgttcctcagagtttctgtctactgtgtatttgtgtagatgtttaaaatatttttatgtctatatgtgtaggtctgtgtgtaggcgtgtgcttatataaatgcaggggcttttgtagtcccaaagagggtgtcggatcctcaggagctgccattgtagaccgttgttagccacctggtgtgggtgctggaacctctgggagagcagcaagcactcttaaataacgagccgtctctttaggccctgtgcctggagctctcaggatggaacccaggttctcagggatgctggcacttacttcatggttccctgccacagttgttactcacttggtggtggtgcaggagattgaacttggctctgtacttgctaagcgagtactcctcatgtgagctgtctatccctccaaacctgaggaaggaccatgtgaaatttatatcgtcaaggcttggtgttaagattgattacagcatgccattgggttgttgagggagggtaccaatgcatggtagaaataaagttacatatttagggtgggtcacattacagaacttaataaaaaccaggcctacaagtttacattggaatgactgggcatcatcccagttgtaaattcagagcatcagcttggagatgagaggctggcacctggaagccggctctcgtgctgcttcagcagatgggtcctgcagcccggtgaggatggagtgagaatgaagagggtggtgggatgaagtgagtaaaggagaaagctgcttcccaggctccttccccgactggaagcagggtcaccaccatggtcggataaggcatagcttgactgtggggagaagtcaggcatttaccctggccataataaaatagataccagttaactcctagacgttgcagctgaaatgtacccagagcgtagagacatgggattgtgggaaaagatttaggggagttccttggctttgttgagggttgcttaacttggggaagggatcctctcccagagtcagaggcgcagaccaagggcactctcacagtcatgtctgataaaagtctgaagaggtcttcttacacgtgctgactgaaatgcttaggaatttctcccaggaatatggcgtacagtgctcttcaggaaataagaaaatgccaaaggcaggaaggagccgcactaccgatgcagcctctctcctggcctttttcttagaaggggtaagaaatccacgcgtgcatgtgtatgtatagaattgtgcagtatatacctcttttcatttttgttgagacaagctctccctatgtaggctgcttgaaacctcacgagcctcctgcctcagcttcccaaagcctggcactcgctatgaacaccaggctggccccaaactcaagctcacagagatccacctgcctctgcttcccaagtgctgggattaaaggtgtgcactgccacacccagcctaacaaagtagcctttaaagacagtacttttgtcacctcaaatgttaaaagaattacggggttatttcatgaaataccacacctggctacattccttttaatttttaagatttgattgacgggggcattagatggctcagtggttaagagcacttgctgtttctgcagaggaaccagcacttacattgggcacctcacaaccacccataactccagtcccatgtggtgcacacacagttaagtaggcctgtgtgcatgaatgtgcgtgtgtgagcatgttcacacagacacacagacttccttcattctgacccctgcctgcctgacctgtttctggctgtagtgtggcaggctgtatagtcctagctgcaagggaagccgtggccatgtctggtcatgcagaggcacttctgttacgcttataattattaatgaacttgtatgctgctttccactgaagcttcgttaattttatttcctcttaagagatgatactgccctattgatgctgctaaaatcatccttctgagtcagtaagtaaggttgaagatggggccttggttgtggtaaatgaccaagcttatagatgcgttgtcaagaaccctctgaggaagttagtcactggcctctgccatgtgagaacacaagacaggtagctcttagagtccacacattctaacatttgaggtgacaaaaacactccttaaaaacatactttatgaatcccagtgcttaggaggcagaggcagtggctctctctgggttggagtttgaagccagcttgtgctacatagggaattccaggccagccaaggctacgagtgagaccctgactttaaaatgaaattgttgcctctaagcctcgtaggggagtgggcgtgttgcagaagcgtaggtgacctagagagcagctgctcgggtgtacgcactcactcccaccaaagaaaagttttggtaaagaagacaaaaacaaaacacagaaaattcttttcttagttttattagcgaagtactagtttaaaaaaattttaattcagaggtttgatttgaaatataaacttttgtactgaaaatttctacggggctctgcctgtatcagatgtgaccctttgtctcagccaggcatagtcttaaatttcagtattcttatattccacttagaattttccccactttctacatatttttttctttcttttttcagctcccagtggaatcacaaagggaaaagaagaaaaataaagtgtccatgtttatacaacacaaagtagccgttcagttccttaagaattgttggtggttctgaggttttatgccattgggccggtgatgaggctgtgcagccagccctaggaccagggtgtctgatcctctgtagcaagttttcttgttagaccatatttggatctccagccccaaataatgacacagagactcattattaatgctcattatgaaagctcagctttaggctttttcccaaccagctcttataacttaaattaacctgtccctgttaatccacattctgccacatggcttggttacctctgttctgtaccatatgtatgacttttgcagagtctgtggtgaaatccatgcgtttaaattcctcctcctcctcctcttcctctctctccccagtggaagtcctgcctgtcctctcctggccgttaagctctttattaaaccaatcagaaagttctgtatgtggagacatagctctacagggtacacgatattccccatttccccctttcatctaaataaaataaaaggttttaactctaacactgtaaaactatatacaataagaacagttttcaagttagaattttatccatagtgtccagatcttttgtatttcgaagttttggagaaaatactctattatctatcctaaaccactttctatcataacgtattaccattctaaaaatatctttttagactataaagcatcttcttagataagcaatttaagcttttatgcctctcaacctttattaactttgcatttctttctttcttttttttttttttagtttagtaacaaaactgtataattatctagtcttcaacccccatcagagacccaagaaggataaaatattacctgggtaaacaggaaatgtagagcaaacaacttccaaaactatagaaatgaccaaatggctggctgcctgtatagtcacccagggttcctctgttatgttggggcatccatcttcagccaacaggcctagaatatcttgacagacttttctgtgaaacaggaattttgaaggactgtcctaccttgtcttggcaaagttcagcagtcgccttcttttgtgtcctccttgcccagtttggacagcacactgttagcagttgaggctagggcagtttcttgtccaaatggccagttttgccacatagaatgcaaactccctatggaggttcttcagtgcccatcatccttttttgaagtaaattggtgttacagtagatgtctctcactgtcatggaaagccttatgttattaaaacattgtcagtgccatattctgtaggtctctgaagtatttgaagactacctatctgtctaaaataaaatctctgtttgaccttgaaaacatatgtaacagggccacaaatgtgactgttatagatgacttaactgctaacctgtatttctttattatcctaaatagctttcaaggactaaaactttacatttttaaatgagctgcataggtacaatacctttaaacaagagtagaaacatacatgtatgtgcgtgtgtaatattctaatataaataaccttaaataactatgacatggcaacttattattaattatgaagccttggctttttttccttggctaatttataatgtaaattaatgagtctattcatcttcattccaccacgcagctgggttgcctcaggtgtttaccctatgtccagcttcctcagtctcactggcttctccctgtcttcaggtgactaaggtgattgcctgctcatgatctgctcaacagaagacatgctactgtttcctacttgggttcatctgggtggctccttagtttaaaatgcttcccagattgcatttgatgaagcacaagccctagaagaatctgtgcaaatcctcgtgtcaatgtttcccagggactggagggctcagcacttagaccagtgcccgaagccgagagctagcgaagaacagtcgtagtgctgcgctcactccttcctcctttgggacacagagcttcttcttgtttgtgtcatctttactgtatggtgacattttaaagattcctgttacatggaaattaagccttccacacagtccaacagtgcgcacattagtggcaatgaactgtttgtggagcatatattttattgcccaaatattttattgtcagcttttgggatcatggtttattatgacttccatcctcccctaagggaaagaaaatccgtaaaattgtctgctcagatccctttgttctagttagggtcgccattgctgtgatgaaacattgtgaccaaagcattttgaggaagaaaaggtttatttctgcttaccttccctgaaacagcccctcactggcgatgaaagtcaggacaggaactcaaacaggataggaacctggaggcaggagttgatgcacaggtcatggggggaagctgctagctggcttgctcatcgtggtttgtccaaccttctttcttgtagaacccaggaccaccagcccggtgacagcaccacccaccatgggcgaggccctcctccatcaatcactaattgaggaaatgcctacagtctgatcttatggaggctttttgtttgtttgtttgtttgtttattggtttagcatcctgacaagattcccccccccccagtctccctgcccgtccatttcccctcctctgtttctcttcagaaaagggcagcctccatgcatatcagccaggcctgatctatcaagttgcagcgagactaggcacctcctcttgtattaaggttgtacaatgtagtagggcaaaggaccccaaaacaggccacagaatcagagacagccctgttcccactgttaggaattccacaagaagaccaagctacacaactgtcacataggttagtcctaagaaggcttcctggctgcagttcagtctctgtgagcccttttaaggccaggttagttggttctgtgggttttcttgtagtgtccttgaccccacagcctcatacggtccttcctccctgtcttcctcaggattccctgagctccgcctaatgtttggctgtgggtctgcatctgtttctgtggtcgctgggttaaccttctctgatgacagttgtgctccatctttgggtttatcagagtatctttaggaatcatttcattgagttggacacctccctgtctcatcagatgtgaccttgggatctgtagtagtagcccagggagggcaaatgtatcttgtttgctgtttttggaaatagggtttcctgtgactcaggctgtccttgaactccgatgtttgaggatgagcgtcaacttctaatcttcctgcctctaccaaaagtgatgggagacggacaaccaagatgagtctcgagctggcactctgcttgggtgttgtgctgtgaagttgtagactcaagttccttggagttgacctgtccgtgtgtaactcctgtagctgatatctcagagaccctgattaccctgtgatggtcttcctgcttaccagaagatggctccacaggtgttaacagtgtagacacatggcacttttggatggtgcgatggcagtgatagtgcagtttcttcagatgaccacacctgtgtccagtgtcccacaggggtcctttctgtgcatttgagtaccaagacctagacaggcagagtcgctcgtctaagatcacacagccgtgagaatggggtgggactcttaactcagcagtgccctttgccacatctaagaagcagatactttatcaacttgggctctgaagaaatactcatttatagttttaagagactttacttaaagatgtgatagagagtgggaaaacacacttcagtgtggtacttacagtcacacactgtcaggaccagagcaaggctcggagctggttgctggagggtcccacatgcacagttcatgggcctcagtgagttgacagtcatctgaagatttcagatgcctgtaattcagtgctccacaggccgtgtgccctggagagagtcagggaataatggtatagaaaacactatggagggctcttccagctctcaagcttgaatagttactgtccatatcggtgtagttctcctgagagagagagagagagagagagagagagagagagagagagagaatctttctatttcttgctcaaagtcgttagttctattatcatgtctctctctctgtgtgtgtgtgtgtgtgtgtgtgtgtgtgtgtgtatgtgactgttatagatgacttaactgctaacctgtatttctttattatcctaaagcaccatcctgagaaacatttttgaggcaaaatctctcattggcctggagcacattaagtagcctgggctggctggctagcaagccccatggatctacctgtctccacctggtcagtgtactggaactgcaagctcaggccatgttgtgtgcctttgggggatggactcaagtctgcacgctttgctgacttagctgtcttcccagcaacatagctctcacatagctatgtggaagtcacctaaacacgtctgaaaagtgtctgcctgtccactggctttgggttacagatattttcctcttcacctgaattttggatttaaagcatctcattggcttgtgggttttctttaagctggtgtttctgtggcaactggctgtttccaggtacagttttccctggttgtggtttatgtattaatttgtctgtaggtagacctcatgagtaaaaatcagtacttagaaaagattatgggatgttaccagagagacagaggcatgctagggtttcttaccccttcaatttgagaatgggcagagctggaaggaccatggatgggaaggccagggctctgaggtggccagtgagggctcaggcacatgactcagctgggtgtgcacagtaatggaaaagtttctaaattgtgccatcaactttaaatattacatttttcctctctttcctcctcaagaaagtagaggaaaagtctcccctttcccgcctttgtgtagtcaaataaggactaaaaatgaactcgctgtgtggaagtcagagcactgattgaattccatatttgtcttggaaggaaatccagactcctgtgtaatgatgactggacggtgcctctgtgtattccagggcggggtctcttgacactctctctccttgagttacagagtcactgctaattgtttcgtttttctgttttctcatggccgactgtccctatgtacacagtgtatcagagttgttgaatctgtttgctcggggaggacttaattgtagacgttctcagagcccaatgtaattaaaaactttgacagttaatgtgagagatgaaatgaatactaggaaacagaaaacctgactgcagatgagaaagagagctgggacccatgactttgggaggccgagtctggagcagggcatggtggtgctcacctgtgagccccacacaagggaggccgagtctgaaggaatttgagaccagcatctttctccattcttaaaaggagggaagagacttagtttctaaggaaagagtttagtgctcttattgtgcagggacagacagcagctgctcctgggggtgtgtaggggccttgggtgtcaaagggagctttactttttctttaagaccctcaggaccttgactgctgacagagccgttgtgtgtggctttcctgtctttactttgtgagttttatctattttctttacactctgatggggactgttctctctgctgatccctagcaggtcttggaggtagagtgggaagggcatgagttagccactcacagtggcttccttttttttttttttttttcccttattcttgtctaaatgctaatccttcaagcctcaaacttaatctttaccaggaggaacaggtgtttgcccagatatccaatgtttgggaggaacaggagtgcacagtgcaagaaaggccttggctgttgagtcaggctgtgttggctataagacttgagtaaggtgtgcgtctttccatagtgctggtgtcttctgcagagttaagtgacatgttagcatgagtagagactgtatatgtcaagatatattgcctggcacacagttcatgttaatgaactattttgagttatattgtcattgtcagtaactttggagtagtgttaacattctttaattgtgatggcatggaatagaataatcacgtctcaaggttttgatatttgatatacacagctgataccaggaaagtggtataagaaatagaggcatggtggcacacacctgtaatcctagcacttggatggctaaggtaggaggaagacttcaaagtcaactaggctgtgtagcgagacccagggtcagtagacagagggagaggaaataatggaggaagtcattaaaagaggcagaactttcagaacagtcatcagcagtggggccctgcgttttttgtataaccgttatttttcagtgctggtctctgactcacttagggcctcttgcctgtcagtcaggtgtgttctaccagaatctcgtggctgagaccttaaacgcttaatcttcctgtctctacttcccaagtgcaagaattacaggtgtgcacaccatgaagtctggccacaaataacatttttgaggagaaattgctgtttaattgtagaagtggaagcaaaagtccatgtagtttgtcatctagcctgatggcttcctttctgtgtgcctgtctatgaggcagtgaggtaaagcacctatgtgtcagcacacagagtgttctacaaagttctgtggtactctatggtgtcattaagatctgccagtcagcaaggagttgccacctgcactgtgtggcagggaccagacagaacaagctatcctgtttgtgagtttagcatttgtccactttcgaaacactctccctgttaattaggtacctactgtatacaagacgttgtcctagaagctgaaactcagttgatgagctgtgaactccaaggctatgtctgtccttttcctgaaagtttctatgtatcatgaaagatctggacgagtgtagctgagctacccgttcctaaagtcttttctgctgtgaaaaaggagcatattacctttattgcacattaattattccttacacttttaactcaccgagttctcttttcttccctctaaaacccaggaagcacatacttaatgaggtctcagaactcttcctgatgctgctgtgcctcaggcccccagcctgctggaccatcctcactgtctctaactgctgagtaagcatcccttccttcttccttcctgtgtcctctgcatcactgtcagccgccagacccctgtgctgcactgtgagctggtggagcactcatctcctggctggtgtctctagcagggcttccttgtcaattccacggaggtaccagggctccctggcttcacagtccttccctgtcgggtccctgctgtcctttccagtcctgtctttgaccactgtctgctctgttattcggggtgcacccagcaccatgtgccaccctatgaataggcatacttcttatgtcagttaaatgagtaaattttaaaaaggtaaaacaactgtggaatttgcatgtaattaaatatttttttgtaattattttttttttaaagctctgccccagtccctctggagtaattagctttgaattttgcgttttggaaggagacagaatgttcatcctgtttacttaactaaaaattaccctattccctttttctaaccaaatctagtgctggtaaaaatttctgactcagtagttttggaaagagctgcttctttccagaaataggcacgctcacaccctgggtcgtctatactggtaacttgccgtcacgtcaggaagctgggtggatgcagggacgagggactgggtcaggattaggccacggtaagggcctccctagctagtctagaggggccgattgggagacacttgtttttacgtcactgtcctgtgactacgagtgtccttcagtagcaccagcatctccacctggcagtgagtcagggctaagctgagctgcctgctgtttgtatacagcactgtagcttacatcagcctgtcccttttctgaagccctgccgttattatacagtcccacccaggccatttctttttgcccccgatgcctatctgggttagtctatagcagtattgtaaattcaacagtattgtgtgcttatttcttactgcttatactcctactgcctaatacacctaccgtcttcatgatgtgaccactgtcctgcctgctttattttactaccgttatcctggaaacccacttggcatgcaaacactaatgggcttatttgttgttatctagctgtgtagcctaggctagctgcaaacgcatagtcctcctggaggagtactggcgttgcaggtgttgccgtctcccttgttcgatagtgggtttttaaatatcttattttgctgtctgtaactatgacagaaactgtcagtttgtatgtaacgtttggagaggggcttcagaaaaccaccgtctttcatttcaatctgtgtgtctgtggtagcagaagtcccttggccaaggaaccggaatcaggcggaagctaagatggggctggacggtgagccacatcttctctaagcagaggcccccagggcagactccacgttctgttggaaggtgcagctgagggcagggggtgagaggattcctaaccagatacatcatgcagctatgaaaaggaaagtttggttccatgtagtagcggtaaagaagagtgtgtatctagttcagtcagccatgttctgtggttgctcgtacataccatctagtcttaggtcatgcattttttctattttttttttttttaaagacagagtctcatataatatagccctggctgacctgaaacttgctgtgtagaccaggctgatcttgaactcacagcttcccaagtgctgagattaaaggcatgtgctgccatactgggctcctcacctagtttttgaggatgttgtgacattcttttttttaaattttagatctgttcattttattctatgtgtatgaatatttttcctgtgtgtttgtgtgaatactacatctatgtgtggttcccatggaggtcagaggagggtatcagataccctggaactggagttgcagatggttatgagccaccccgttggtgctgggaactgaacccaggacccctgcaagagcagccagtactcgtatctctgcaaccccttctgtaaaatattgttcagaggcattagtttgtgaaagcctggatttgttgcttttccataagttctaaaatggaaatatgtgagataaataaaattggttatgaagaacttggtatgaagaacagacctctcctcagggagggaggcttgctggactggcagtgggagatgcctgctttgcaggcccaagtcccctggttggttccagttaccacaggctcactgaagtgaaagtgctaataacacgtggctgaatgctttcagagcagggctctggtgcatttattggttctgtaactgttgatgtaatccaggctgtctctttgtccctggctttgaaaggcacccacttcacacacggcacagataaaaggacactgcgagttaagctttgtgcctgacaaggtagctcacagatagagtcactgttttagcataagacctgccagtgctggggagggctcctttcaaattctcaagtagcagtttcagacatacgcacatgttggctcttggtgttatttacacatgggtttcttgcgtacggtagaagttcttccattagcaaaactgatggacgtttaagaacttagagaggagtgatgaacaaaagggtcaagaccatgctgaggaaacccacagaaacagctgacctgagcaagtgggagctcatggaccccagtctgacagctggggaaccaacataagacggaaccaggccccctaaacgtggatttttgtctaggaggcctggggagtctatgggccctctctcagtggaaccagaatttatccctagtgcatgaatggactttgggagcccattccccatggagggatactctctcagcctagacacatgagggagggcctaggccctgccccaaatgacgtgacagactttgattattccccatggaaggcctcagcctccttggggagtggatggggtatcggtggggggcatgggagggagagagaactgggattgatatgtaaaataagattgtttctaatttaaataaaatttattttttaaaaaagaacttactgattgtgcagtgaaagaaaatcaaaaccagtacagactccagttgtcatcatccccctccccccctccccccgtccagcatttgagcaagatacatgctgcagtaaaggttttcattttatggaaaatatgagaaaaacacatgagtttgagtggaggagaattaggttatctgtaagaagaactttgagcacaggctgccaaacagataagagggggagctactttctcggtgctagggacagcacctcctacaatgttccttttggggctgtccgaaggcagcttggccctgaacttcacccctagttccctggcagggcgtctatgccaggatcccttctccccttcagtggtgactaagcttcctgcccagacagtaaagcatttggaaacctgagcatagacagtgtctattttaaaactctgacataattgagagtccatccattaaaaagatggtccttaggcatgctgagcacagcttgcaaccctcagtaggatagcagtgacagggagggggggcacttgggtgatggccagcaatgcattatccagactgggatgtggtcctgattttaataaagaaaggggctggagagacgactctgggtggagctcctaccacacaagtatgagaacctgaagtcagaccctcagcacccatgggaagccagagacggtagcttgaacatctgtaaccctaggtctcctacagtgacatgggacatacagacaggagaattctcagaaggtgccaccagctagcttggcctaggcagaggggaactgaaaggagagctggcctccaacgaagtggaggggaggactgacctccacacttgcattcacacacgataacttacggacattggctcaaataaatgaataataataaacttaatgtctgagtatccaaatcttagtttacaactaattttacttaatcttttaagtctttgaattatgtgtagtggtttgatgtgagcctgtggatttataggaatataagtcttctgaaatataatctccattctcctgaaatagccaagttcttacattgtgaggcttttctatgctgagaacatgaagtcacttaaaaactgttagcactgtggtgtgacttcagctgcttaaaatgggatgtgacagctgtggcgtccagatgtggtgtcctgatgtctgtggaatgagcttttccatagacaacaacagacacatcagggaggtaggcttggtgctgcacaccattaatcccaacactcgaaacaaaggcagacagacttctgtgagttagaggccagccagatcatagtgagaccctatcttgaagaaggagaggaggagaagtaattatttacaagtcatagaaagatacttaattcattgttgtcaaagaaacgtgtaaacaaaaccaagattcctctgtagtggacatcagcggggctgtcaagaagccccggggttgattttccttctttgaattcagtttttgacccacacataaggtgagaggggaagcagtaactagggttagattgggatcttgtgttagagcagatggggaccacggagtctgggctggtgccgtgtcagtgttgactgtgagcttctctttaggactgtgcagtgtcctagaatgccactgccctgcacactccccagcttcactgtgggccaccgcatagcctgtgtaccacccttggtctgtgggatacatggcctgtctttccacaccacacacgtgggctgaataggctgttctaccacaccccatagtttgttctcccatgtgtctgtgggctccacttctggaaggtgagggggatggaggggcagttctgtcccttagtgacagataagatagtctttacatcacttaaagggacagttttccgtaagcagagtttgcttttgaaggtctaaccctgtactcagctgtatttttccatagtagaacctgtgctggagtctagaaaattctgggtagactcaaactcagaccctgctttatggagggtttcctgagttcttaggtgacaggttgctacagtttatttttattccattctaggtacttctctctctctctctctctctctctctctctctctctctctctctctctctctcacacacacacacacacacacacacacacacacacacacacacacacaatatccaggttgtgcttcagtgttgtttagggctcagtgataaattgctcaggtggtcatcagcacttacattttttttaagttttaaagatttttgtactgtgatgtgttactgatgcgttaatgggacacgtcccttctgagtcttgtcagggtggctgaagttgagccgtctgtgtgcttagcacagtgtcagttacaagtcacgtgtgcctgcttttagctgggagcggtgactgtggtcacttgggatggccaaaaaagtctcttggagaattaaaatgactcaaaattagtaaaagccactcgtggcttcttaggttttaagctatacacttgaattttagtcctgaattcttgctcccataaaggagcacttgtagttcagtttcattagtctgctcttgttgatttcagttgacaggacggacaggcacacacaagttagtctcttagtgtgaatgactgtgcttgttagtgtgtgtgtgtgtgtgtgtgtgtgtgtgtgtgtgtgtgtgtgtgtgttcctattagaagttcactgttagaaaagggaagtgccccagatgcccacgctttacatatagcgtggctgagtcacttggccagcctgcttccccagctggctcctcccccaaccaggatgtcataacacctctcaccatgcatgcccgttccttaccctgtctgttcattggctgttgttcttcacaccaggcctcaccttttggcacagtacctgcatctggtctgtctggcagagcttccttggaatacagagggcacagagggggcaggctcctcctcacatctggagcttgtctctgttcctcctctctgcatgttggaagcccccttgccttatactgcaggaaggtagtcgaggagtgcagatttgtgctgccctggtctgtgacttcagtgtaaacctgagtcattggcagggaagtcacttgaaaagactggtgatttgagccctgtaataaggcagttttgcgtctccctgtgagaccgagaaagtctcttcaggatcgtcctcactagtcatcctctttctgtttttagtttgatccatgacatcaactcttctcagagtcctttggttcctaggacagaactcaggtccactgtggtgcagggctctggctctgtgccatgatgcaggctgacacctggaggagcactctgtgtcaaggcagagagcatctcgtagcctgtcagcttctctgtgctttgattggctggtgatgttgaacatgtatggtttatgctctttttatctattgtctttttaaggtcttggtttacagatgtgctgtttaaaaagctgcatatgacctccacatacataatatattttgagtttttaatatatgctcagtgttgaacttgaactgactgaatttctggctttctcatcggcactggggaagaggctgtggttggctgctcttacatcaaggacccagcatctgggagtgctgcagctccaggcatcaggaccacagtcagaaagggctaggagacttcacactgcgagacattccaggagtgttaaagatagtgaagtgaaattcagggtcaggtgaaggccactgcgttctgcctttgaaggagacacacttctgcttatatagatgtgtgtgagtgtgtgtgtgtgtgtcccttctgctaaagaatgctagacttcactgttgatagtatttccctgatgaattgggggtcacttgtttaagtgaacaggaaattgaagggcactagtgtatgtttctcaatccaggaattctaggcttacaggttgtatcttgtctttttctggctagagaaaggctttaataaaagacaaagaccagtgttaagtccgttaaaggtgtaggtttacaaatttaaagactgcctgtgtttggttagaaaagttcttccttgtaaaagctaatctcaccaagggctggggttgggcttcactgcacacccgtctccgaaggaaaacttccttctgaagataaacacagcaccaggtggttttgtaactttgtacccaagtgaaatgattgcaggtgggtgtatgcatggacccaactcaccagattcaaacggtgttagcatggcactcacaatgcctgcccagtgctgcaggcattgactgtagaggcagggacagcatttgctctggcctggttttcagtcaagctatgtggactttgaggtgcatctaacaagaatggaaagactatgcgagtgacaattataaagggcctaaaaatagttttcattcacatctgctttgggtttcggagtaaagaccgttgcgtcatcatctggggaggaaggaggtcttatctgcgtattctttacaaagacccaggttcaaaagtgcgcatttgggccttgtttgctctctctgtatgtctaatgcaggcactctctgggacttgacagttgttttatttccccctcacctgtgtatgtgctacacaaaaatgtcttccaagattctacttagccatctgcctttctcctgtggcctgcagacctgctcctaaaggcaagtttggtcaactttggcagttaagtgtcatcatctcctccagcacttggcagtggctggggaccccagggagacagggatccgttctttagccatgccccccaccccatcctgaaatcactgaatgtttacattgagtgactattctctctagataccagcctggtttcctagcaacagcaccaacctaattcagacttctttttcctggcctgtagtgatggagtgctttgtgacagtattgggtcctgctgctcctggcccacctcctgctgtgtgaccagtctgcacactgctttttctgctctctacaccagtcttccctaagcttggtgaggatatagtatcttccagaatttgattggccactagatcttgcatgttggctgataagccggaaacattctgcaccacccggctgcaaccagtcggcttgctcctttttctgacttatgtaagtattgcttacaagtcatataactccatgatcagtgttactttgcattcttaaaggaggttttaagaaaagcatggttcctccttagctctgtggaaggatttttgttgtcctggagtagtgctcttgcctggtttttgcttctgggaactggtacagcacttgttgtcttctcagctgggcatttcccagcttgtgatcacttgttgccaaagaaaagacacacagatcctgaagtcattaggaattgcacttggctggagctcttgaggacccttgctcccaaatagtgtttgttgggaaaagtagctgacacttcctgggccttgaggaagctctcaggactctgcctactcccttgagggtgcacacatgctgatataggaaagctggcaacttttgccctgagtgtctttcttaattgtcatctaggtttcttaaatttcctttgattctttggtccccccacaaatcctgacagcagacatgatttgggagatgttggccgtgtgacacagctgtttctctttcctgactgtcgccttttctgagtctgatcttggaacagaacttgaacctgggattctgagattttaaaaaacgtttttgtttagggttcagttaagtggtggagtccttacagatcttgtggcaatccttggaacactctcttgttattgatttttaaagaaatgctgttataccatgcagcagtttatttttaaaaaaagctgcgtgcagtgctgacagagaggtaccttatgggtttccccggcactaacctgacatggcctggggcctgtgaagtcagcagagcacaagttgcagtcccctcttgggaaagtgactggggtcagactttaggatctggatggatcagaactgtatctctgactccaggtatcagagagcctcgctcttttccagctctttcatcccttcctgctgctcttttttacgaggtggtctccatcattcattaccatctgccctgtgtcagatatgacatggtggtgaatgttctagaaggaatttgggagagagtgctcagagaagttctagtttagagcagagggcagctgattgtcatgacgcacgccagcgaccgaggtgcggatgcagagccctcccaccaaagagtgagcagtgagacaaggtaaagccacagaggatcagcaggttcccacgtgtccaagtggtttaagggagctcatgtgatggactgtaggcaggaggggggctgaagttggggttgagtccccactgcacagcccattgctgtgtgagcttccccaagctccagttccctgctggaaggatgcagtgaggactgctgttctaggtcctcggtcaacaaatgaaatacagttgtcctgagatgcccatcgctggcttctgccagctacactttgtgtgctaatttgacgtggtgtgtgcagaagaacccatgtaagttttaaacaagggcgggggtgagcttctcatcacagagagttaactggtctgcagcacagctttgtggtgagtgtgaggctcacacagtagaaccctgtctgcttaagtccacgagacagcaagggaaatgggagttcaccaccgctaaatcacacacttccagtctgtgcctgacgaacagtagctctttgtttctttcctatccctggcttccagttctgctcaggtctgcaagcagagccccgtgtcttcatgtctttaaagcggcaggtggtgtaaagttctcagggaatgctggtcggctgagtggaacttgggatgctcacctggcaagccatctctcatccagatggtctgttaggaccctcttctaggtacccaaactcctttatgtgtgatctgtgctgtctttttggcttatcaaagcctgtggtaagcaaatgttgcagaagtaccaccacagagacctgtagagcagattgtctttctgtgaaacagctgttttgccgaattccttgccttcctaagggttgaaatgaccttaataccagtggttcatcaaagttggcacctggacgcctctgcgcagacatacgccattcagaactgattcacatgtttttatagtcactgcctggttttcaaaggcatttgagccccgttggaaaatgaagtgtgcctcatagcctggaaaaaaagtgctgcgtcttgtgctgttgcagaaacagaatttggagtggaaagagcatttgtgacccatctctaaagcatacacctgcacagagtgctggtgcctgcccgcatgcgtgtttgataggataccattgaaaacacattctatctttagagacatatttattaggaatggaactattggcaaaatcttacaaagtttgacaggtggtcagtaaatcagcaaaacggaccggaacttccttgttttgaacactgctgcacactgctgccttttgtgagctaaccagcctgtgagtgtgtggactgccaccaatgcatcctcccgtaattagctcctggtttttccagaacagaatcaatttccctggctttggaacctgtgcatctgttgggggaaggtggttagtgctggtgttccaggtgtgaggcactacacctggcttgcatctgtttattattagttttgtattattttaattaagaaacctgggttgttaactaatagaatcattcttagtagaaagtaagcatttttagagtttgataaaagaagcaggacgtttggtttttgtaaaaactgctgaagaatttgctctttttatgtcatttcaggtcccattactatggcagtgacagctggggcagcaaccacctttcctaaaagcaaccatactctcagctgggcatttcccagcttgtgatcacttgttgccaaagaaaagacacacagatcctgaagtcgaagagagagaaaccaggtacagtaaaggctaaaggtttgttggttgtctgtgactggacgggagccctgccctctgttaagttgcctggacctggttgcttgtttcatttcctggtttccagagtcttgtgtacgtgtgctcacatcacatgtcagttgtgtttaacacagatctttccggctgtggcattgtggtgtgcctttgtgctgtcctttggagagatggctttagaaattgctgacgaatgtatagcattagtggtgctgtgttgtattaatgggaatagagaaaaataatggctgtcattttgcctcagtgaaacttggagtttggtaaggggaactggtgcacacagatgctacatgagagagcggggagtggcagtgtggggaccaaaatggacatgtgctttgaccgcccttcccacacgacagtgacatttgaccaggaagagcattgtgcacacatgttaagaggaagaggaggaggcatagaatgggatgtaccaggtcctgacctaaaaaggagcttatctttcgttgggttctcatgagtagcagatacaaagactgtggtacttgagcctcaatccttgaccccatttgagtagattcaagagtgttagtcttctgttgtataatccaaagctaattaaggatgagttgtccagatccatagttaggaaaaaaccaacactgtagacatgaaatgctgttcacttaagaatgagaggcaaaacgtgttccatggtcctcgttaccatctgcagccccattggaaatactcagcttaacttcacattaaaaaaaagaaaaatccagagagtcaaacctgtctttacccagaaaagcaaaagttctgatcagtagttattgccctatacatatatgacttttcagttttcaaatatatgtgtctgccattggactctctcctgagctgggaacgtcattttgtactgggggataaacagtaaagctttggtcagtatgaaaatgctaagtctaagtatctcaagaaagagtcctgaccacagtgaatagctgaatcttggtccaatttgaaagattttcttagcataatgtgcccattgattggcttcaataaatacctgtagttctcaaatggaaataggaacacatttagaaagtctaattattttttctttggaaaaggcagaagaaactagaagtggccatggaggaagaaggcttggcagacgaggaggtaacgtaaccttctgtactaaaccatgtcagccgattgtgtggcttggctatggtcggtttctccatctgaatgtggcttcttactgtgttgctgtgtgggaacctgaggaggagatgggggcctttgcccccaggagcatcacatttgctgaataccatccacagcgttctgggtgtgcaggacaggaatgggctctggataccatctgtctgtctgtctgtccatccttccttccatccacctgtccatccatccacctacccacctacccacccgtccacccactcacacatctgtccatccatcgtgttctgggtgtgcaggacaggggtggactctggataccatccgtctgtccgtctgttcatccttccttccatccacccatccacccactcacccatctgtccatccatcgtgttctgggtgtacaggacatgggtgggctctagaccttcttgtcgattccctcttctcacatttttttccctgaatatttttttaaacaatttactccctaatttaggctgtgcatcttgctgataaatgtcttgaaatggtctcttcctcctgtccctagtttttctgtactcagaagtctgctaactgtccttcctgcctgtgatggcttcagtgagatgtcatgccccgtgcacccaccaacccccagtctctgtgtttgcttgcttgtggtactgtgttatagtagaagagtagtttacgtgatgcagtacaggcttctttctggtggcctgtttctctctagccttagctctcggcatgtcatccagccttgaccagtacccaattgctgtgattttttttttcctgcttatctgtggcccttttcatgtgctatttctgtctcttgaagcactttctcctccctaacgtctgacttccctgggaaatcctccctcatggcttagccacttgtcctacattctacactgacggtttctgtacttgggatagcctgaaagcaccatctttccagagaggctcacccaaagcatgaagaggccaggaaataaatatgtgtttttaagatcattcgtgactactttatccatggtagaatgggtaaatccactgtttcggtttttttgttttgctttgttttgttttatttttttggttttatttttttggtttttcgagacagggtttctctgtggttttggaggctgtcctggaactcactctgtagaccaggctggtttcgaattcacagagatccacctgcctctgcctcctgagtgctgggattaaaggcgtgtgccaccaacgcctggctaaattataaatttagggagaggttggttaccagaatagaagcccccgctgagcacattggagactctgttcattgaagaacagcctgcagtatatagcagggccctgtctcggggaaaaggaaggaaatgagggaagaagaggaggaagaaatagttgggttttttgttgttttcttatattgcactttatattaatgaagacctgtcagacaccaagagctcagatctggcatgtcagatgacagattgcaaaacagttgcccctctgttagcccagtgtggccaggttcctgttgtacgagatctagaagtctggacttttgcataaaaaaattttaagctgcttttaaaaatattgccaagtggcaggcagagaactgtctgggaaggcctgtttgtagcggtcatggcgccccctggtgggcactaatgattttttcttaattcttgtaaatagctcttagaaaatgtcacattgttttgcttctaaaagtcggtggttcgtaatatctgtttttaaacgttccactttttctgtgaaggtattttaaaattcctatgtgtttattgtgaagctcagtgcttgggctttgattatgttgtgtgtaaaacaattctcttcaatgttagaactgtcattataaggagttagaatttcttgtttcttaaaaaaaaaaaaaaaaaaaaaaaaaaaaatttttctcnnnnnnnnnnnnnnctcacgaatgtgtgtaggtgtggggtgcatgtggccagaggacaacctggggtaccagttctcagcaatactgtctttttccttgttgacctggagctcactaagtaggttaggctgcttggccagctgacctgtttctgcctccccagtactgagattataagtgtttgccacctcacctggcgtgtttgcataaatcgtggggattaaacttggttctttgtgtctgcaagataagcactttaccaactgagctaccttcaagcgtagtttttcagtgaaagttaatacctttaatttattctgtaacagaaaatggtctgtgcagtggttcatgagtgagccgtgagatggttaaactgtgtgtggctgtgtacagcagtggctgacaggaagctgttagctaaaccctttaatagctcagacctttgaaatatcctgactgctttagagacgcctgggcatcctgaagattgagaatctgatcatttgaagaggaaaggagtctttaatcccagcactggggtggagacggggagtcaagagaattgccagctacaaaatgagattgcctcaaaacataggggaggagatacgctgattagcaaaagtcatccaaagtagaagtttattaatgggaaaaccaaaataattgatttaagctgcagaagagagttgtgtgaagcagccatctgcctgcaggtctttcctgaggaggggaaagtccgggttagcacagggatcttatttcagttcactctgagcaggtacagtgggtcctcagttaccaccgggctgcagtgctgactgcagtgctgtctgaagagctgacctcactgagtagggtgtcctggggctggtgctctattcggaatgcggtgacgcacattgtcactcctgttttgtcgctggagagctgtgttcctgcaggcgtgagaacctgtcagatactcagtgactgcaattttttggtgctattgttagagagttttttggcagactcttgtctgtagatcataagcacatcttatgaaactgcagccaggtatcttctgttgggatgagacaggtttctgtagctaaacactactgtgctattttgcagcagtgagaaggacaaattcagaaccatcttccacagtcttgtgttcatttattgtgtgtaattagacatcaaagcaggcacctttttttgccacagggacacaatgctacagtgccaccaagtgatccttaaaagatagacctcgagttctgggacttaaaaccagccaagtctcagagctgccaacccatgcacagagcaaatttgatcattatagattaactactaatctcatgtcttagttatacattgcatttttaagtgagctacataagcacaataccccaaacaagagtaaaagcatgtataacccaccaaataaccaacaatcaccccatctcttgggaatgtgggtatcatgttctctggatttcttcctgttgtctgtgggagaagtcaactttaagggtccctgcaaaaattgggataatggtcaagtcctgggaagaccagctgtaatccttgttgatatattgtaatggtaagtctttactccatctgcctgagtcccgcctgcctccacattaaggtgtctcgcgctaaccgtctcgccagcaaaaaacgacacggcacactcctcaggatccttctgcagtaaagctttaatgcgtcttgagagggagagcatcagcttacagagcggagactccgaactcccaaaaacccatcccttagccgcctcagaagtgttactccctgactggctgaagctcgtcggaccatatgacgttagctgatcggaccatatgacgtcacgggagaggcggagaccaagggatggaaagttacaaagttacctagtgcgcatgcgcactagcttgtaacggctccttacattagggtcccaagtaacacacagagacttatattagatacaaatgctgcttggccaatgactaggatttctcatctgctagttcagtctttttttttaatatattttttatttaaattctttaattaccactcatatttacatatctacccccagctagttcagtcttttttttaaatatattttttatttaaattctttaattaccactcatatttacatatccacccccagctagctcagtcttttttttttttagctcagtcttaattatcataaatctatatattgtacaagccttatattatcaaggacaccttccgctggcaccctctcttgccagtggatcacatggcgactccagagcagagaccagaggaagagcaagagaaagagtatgacttcctgtttgtccctgcttatatatgagtctgcctgtatcacaagacttctttttactacatttcccagaatcctccctgacttgctgcctcattggttaaactttattcaacaatcaataagaaacatacacaggaggaccttccccatcaatatatatgacctgtcaagattcagtatgtctcccctgatcaaacctgatccatatcaaccctgaaggaacccccagcttctcatttcctgtggaaatacaagcaaaaactcttcttcaaagcaatgcatttttgagttccatcttaaagttaattactcttaaaatatctaggctggtttatttcagcatcctttcaaccccatgtctcttagcagttgtcatttgcttatcagcaatcaaaaaatttaaggtcaatatagcaacacactggatccagacagactccctgtatttcccattttaacgtggcttatttttatatatacatatacatatatagatgtgtgtatatatgcatatgtatatatattgtatatatattactttacttctctctttaaagactttatttttaaactatttctttctatgactgtctgcatccttcttttcctatgcctgtgcacattattaaacacactggaacctgtttagagggttttttgttttgtttttcctgtctggaccttttttactgcatatctctagtcttttttgactgcatgatcgtttaaacggctaagcagtgacctctgcggctggctttagcatctggctctgccagctttttggatctgtgaaagcaaagcctacaagagctggagacctggtcagaggtgtaacgagagcttgtaggttaagatatctttattcaaataataccggccaagcgcaagctagagcgtgcccagaggcagcaagctagggaggctagagagagctcccacgtgtctgctgccccttaagaatcccccatgtgtcatcctgaacatcccctgaccataccctgacaggtgtggttaagcacatctgtagccagcccttaggaggcatggttatgatgtctccctacacagaggtgcatgactgagaactgcattcaaacccagagctctagaataaaatgccgaagcttgcattatagcatttttttgttttctgttttttttgttttcttagctttcccccctccttattatactggttgctcaagggcttgctgtaaggcagaaccttttaaaggacccaggtccattttttttttttttttaatttttcaggtgctgtggacattcgagcttcatgttggtatttttattttttgctctttgggggcccgccacccagatcccaagtaaacacatggagacgtcttcttacttacgagtgcccagccttagcctggctggtttccagccagcttttcataagtcatcccatctaccttttgctctgagctttcatctttctcttctctgtatatctttacttccttcttattccatggctggctgtgtaggtgggtggctggcctctggcgtcctcctctcctcctctttgctcttctatttattctctctgcctggcaaccccgcctatcctttatcttctgcctaactgtgctgttcagctctttattagaccaatcaggtgtttcagacaggcaaagccacacagcttcacagagttgaacaaatgcaacataaagaatgcaacacatctttgcaccattaacatattccacagcataaacagatgttcaactaatattctacaacatatagatgtgcttttagctgcattagactatttaaagggttaaagtttcccaaaccccaagataagtgcagtcttattttttaagtaacatatataaaacagtatttgctatttgctatatcttcatttcctttattacctggttcctatccaaaggtgtacacacacacacacacacgcacgcacgcacgcacgcacgcacgcaagccagccagccagccagccagccagccacaaatcaaattggggactggagagacagcttagcaattaaaaacactagctgttcttgcagagggcccagattcaatctataacaattacatgacagctcacaaccatttgtaacttgagtttccagggatctgacaccctcccctgacctgtgaacaccaggcatgcacacggtgcacagacatacattcaggcaaagcatccttatgattaaataaaatactaatgtagcttcattgaactgtgtgaactgaagacattccttgtttccctcctacctctgctacgagtattagaattctgttttgatgatgtgcagacttaattagacacctaacttctagttagacacctactactctacaacagacaaacaggtgcaggacaggtgagtggctctgctttgagctgctttgggagcagtgtgtccaaactgatgggagtgctaggacttgagtccctgacctcaaggttgataggatcacttgaacatgagtaggggctcaatggttttattttccagtgtgtgctgcctctactgggaacaatcactgtgtcatgaacttgatttttcttagatgaggagtcaatgaggttagaacaagaaaatgatttccagatgcagcctttgggtatttcaaaatgttgcttattaatagttcttattttgttatctttgcaaatcagagtattactgtaatagtattgactcggatggttttgttttgtttgttttttttttaattggttgattggttttctttcgtttttgatacagggtctctatagtcttggctgacctggaactcacagatccccacctgcctctgcttcctgagtgctgggattgaaggtgtgtgccaccattcccagctaacttgggtattttaatgctactttgtaattattattttgcaatttcatgtcgttggaaacttgtatgaagttttgcgaaatttgctgaaatttatgcaagaatgggtttcattttttaaagatgttatttatttatttatttatttatttatttattatgtatagtcttctgcctgcacaccagcagagggcaccagatctcatttaaggtggttgtgagctaccacatggtttctgggaattgaactcaggacctctggaagaacagtcagtgctcttaacctctgagccatcttttcagcccaggtttcactcttaagtaaatctccatgggaacactgctgctatgtgacttctgcaggtcacagtagtggtgacagcaccttggaaagtaaagaattggagccagttccctgacagtaaaaacaagtgtcagaggaagcaagcagagcctggtgatggatgcctgtgaccccaacactcaggaactggggcaggaggactgccttgagttccaggcaagcctgggctactcactgagatcttgtctcaaaaataagtaggtacacacatcccagaacactcctggcatctgcactgtctaagatttatttttgttagttaagttaccattcagaaggcatcaacttacacatacaataaactggttaaggtgatgcagcccataaagtctttcaaggatacagacttaataattgttttaaaaatgttttcttaatactattttattcttcccttgcttagtaaatacttgacttgacaagtagattatagacaagcatataataattaaggtaccatacctccatccattcacttctttaaaattatatgtgtgtgagtgagtgtggatttgtgcatttgagtgcaatgcctgaggatcccagagtcacctgatgcccggagctgaatggatgctggaagctgagcttgtgtcttttacaagaacatcacacatcttagctgcagagacttctctccagtcgctatgcctttgtttcttgttgctttgttttgttggttttccaagacaagctttccctgtgttgccctggctgtcctggaactcgctctgtagaccaggctggccttgaactcgcagagatccacctgtctctgcctcccaagcgctggaattaaaggcgtgcacccccacggcctgtctttgtttttatgtctgttgtcttttaacattacacatgcctttgagacagggttactttaaaatcatctttttaaattctgtttttcatagaaaaagttacgccgatcacagcatgctcgcaaagaaacagagttcttacggctcaagaggaccagacttggcctggatgactttgagtctctgaaggttatagggagaggagctttcggggaggtgagctgctttgttcacatcaccattgttgaaagtagatgttgtatggtgtttaaatatagttcgtaggctccgaggtcataggtcagttggtaagagtgcttgcctagtatccacaaagccctgcctttgactcagcatcatagaaaccgggtgtgatggcacacctctgtactcctagcacttgggagatggaggcaggaggatcagaagttcaaggtcatctccagctacataataataagttcaaggccagcctgggctacatgagatccctgtccccccttaaatgtgtgtgtgtgtgtgtgtgtgtgtgtgtgtgtgtggttcccactgttcagcgcttgcgtttgtgctccaggtgcggctggtccagaagaaagacacggggcacatctatgccatgaagatcctgaggaaatcagacatgcttgagaaagagcaggtgtgtctcccaacatgtacagtgccaagggcctctgtgagagggagggctcagggcagtgttgatgctgaaaattataaaagagacctcgtttactagatggtactgaatttatagtctggtgttttcagttgttaagttcagagttcagtctttccaactttacagcctctgtgttagtttgctctgttgctatcagaaaacagcaaggctggggctgtgaatgacaaaagccattactttctcgtggttctgttcaagggcagaaagttgggtaggttttagtttctgatggttgctgtcttggctcccttccttcaggtaccacactccctgtccttggtgaccgcaggaagagcagacacaggctccctgagcactgctgctgtctcctcctgtgggccctgtcacagtggaggagaatctgctggctctctgctcaccctcgaggcttaatgaaataagataaaaacagcctcctgggttctgcatatttagtgagactttctgggtcaattgtcttttcaaaacatattcatctaggtggctcatatccgagcagaaagagacattttggtggaagcagacggtgcctgggtggtgaagatgttctacagttttcaggacaagcggaatctctatctgatcatggaatttcttcctggaggtaaatagcagtggcagacagacctgagctcatttgcatacgtaataagttcatctgcatatgaagtaataatgtcacccagttttactgctgaattttattgagtgtatacatacccatcattttttttagtatttacttccagaataatggaagatgatttggccacaaatcatgtaatttccaaaggactgttaggatgaaattttattttatttattattattattattattattactattattattatttgggttttcgagacagggtttctctgtgtagctttggagcctatcctggcacttgctctgtagaccaagctggcctcgaagtcaagagatccgcctgcctctgccttccgagtgctgggattaaaggcgtgtgccaccaacgcccggctaggataacattttatatattaccattttgtgttcactgtagagttaagggaagagagcctgtatgcagaaagacagaattctggtttctaggcgtgcctgttcactcttcgtgcttctaaactctgttctggccctgataagttagcatgctccccacacacaccattgcatgcacttggtgggttgtttgaggtaccgggcaagtcataaaaccgcaaatatgacacagtctgtacaaaggacgtctgaagagggtctcctcaagagggtgtttgctgcgcactcccatgatacagcaccagggctccagacagttactgatgtttatgaacggacctgcgcctgaggcttcggggtcactgcctcacagcagcaaagattaaagctgttgacggctgtggggagtaaagcagaaggaggatgtgagagaagacagaaattggggtggatgcaggaaggtgaggcgagtcacctccccgttcgcagtccctcggtgcttcgccctgtgcaggtgacatgatgacgctgctgatgaagaaggacaccctgacagaagaggagacgcagttctacatctcagagactgtcttggcgattgacgcaatccaccagctgggcttcatccaccgggacatcaagccagacaaccttttactggacgccaaggcatgtgaggaacgggagagtccttgggtttttcatgccggtttcttggctgcagacagcagccgtggcttgggttgttttggattaactaaactttttcatagatagtacataaatggctgttctggagtaacatcacgggaaatgggttacaaaaaaaaaaaaaataaaactccctgttttctgtttttaaaaatcatcctcagacatgtataatctcaaatttttagctgtatgtgttttaagaatttttataataatggcatcagagtttatattaaggacttttttgtcttcaaagttaacatgacttcactggaatttgttgttgttttagggacatgtaaaattatctgattttggtttgtgcacggggttaaagaaagcgcacaggactgaattctatagaaacctcacacacaacccaccaagcgacttctgtaagtttgcatttttcctttggttgaaattttgtagcttggaactttagtctgagccagaatgctggcataccttcctgagttgcctgagctttaggtgtaggtgtgcagttgcatcttttgtccatttcccctctgacggtcgtggtgtcttgttggaattagcgtttcagaacatgaactcgaagcgaaaagcggagacgtggaagaagaacaggaggcagctggtgagtcctgaagaatgctgtccccctgggaactcgaggtgctttcctcagtagctccgactgcacaggtggacagggacggggtcaccaaaggtcaactgggacagcaaccccctcctgcgttttctgctgccagtgaagattaaagactcagacacttgtgggtgtgaacagagcgcagtgtgttttatgacggaggtttcagaaaagtaagaagctcaagaaaagagagaagcttcctagagtggtatcggggttcctgagagaaaaggctgttgagattcatccgtaagggctctgcagacactagttgctgaggctggccagttctctgggctgtcatgggctgagcctgtggaggaccacactgtcttggcccagccaggagctgatcatgagttcttcacatgctgcccacccagttagttggggtgaagcctcgctgtgtctgtctgtgactccagctttattagttattgcctgtgactgtctgttgctgtcgggcgtttcaccagcctctgtcctcctgtctgtgattacactaagctgtttgttcccacaccacagagaagaagctgcaattaagcttggttaactgtcattgggatggtcttgggtgtccttcctgagataggtgggttttcttgatgctgtctctacctaatctgtgagtgagaagcaagcagacataaaagagcagtagagtccagtgtacattccagaaggagagggtctcccggagctgcagccaccaccaacactggcctttctttcagatcccaagtctcttttaccaggtccccttggctagctcataaccagctgcaagctctgtttctcatcctagtgtttctgatttggctgtttaacccatacctccttttaactcttgtctgttttcactatggccctatccccttacttcgtacagagaacagggaggagacatcacctcctctccatagccagcgttctcattgcctggggtggtgtaactcctgtaaccaatggaacaggaagcttggggtgttggcagtgacacagttgtctcaataggcaagcctagcccctaacgttgaattttatggctgtttcttttgttgttgttgttgttgttgtttaagatttatttattatgtatacaatattctgcctgcatacatgcctgctggccagaggagggcaccaggtctcattacagatgattgtgagacaccatgtggttgctaggaattgaactcaggacctctggaagagcagtcagtgctcttaacctctgagccatctctccagccctggctgtttctcactaatgccatttccctctttttttagtgaatgtaagacttgctttcctccctttcctgtctgcatttgtatagttaactgaggtgtgaacatttgcaatcaggagtgtagctttgactttgtcttcctggtttcttacacagtgcccagcacatgcagacagataccttgtcagtatttgttgagttcaagtaagcaatgatgaagctggggactccccgttcccttgggaaatgctagactcaggtgacaatagcctgccatgtccaacacaattaaatgacattttgcatttttgagttcatttggtcattggtccaattagcagcaaacttcatattctgataaactttttaaagtgtgttcatctgttggttaaggaaaaaacttcattctgtttttgaatgagtcgttttagatcagatgttacatttgagaaaatactacagtcttcctgtttttaaaggcaaggggacaaagcttgaggggaaccttggcagattccatgggcgggggcaggcggggaacaaatacgccaggcagacagaacttagaagttttattagaacggggagggagtggaacggaaagagaaaagaggtgaagagacagagacagagacagagagaggacagaagacaagagggagacaggaaaagtcctgtctgccccaggggaacagctggaaagaatgggaaagagcataagtgggtggggctctttcttttaaaggggtcctttgtacctgtgtgcagactagcactcatgggaccctgggctgagagcattctgccaggtgataggggcataatgcctgaatccttacaaataccccttaaaaacttgtctgaggggctggcattggtgctcacctgaaacccactagttaagaggctgaggcaggggcatcctgggttctgagaccaacctgggcttcacagtgagaccctgtcttcataaataaataaaagcatggcagagggtttctgtatctcctaagagaaattgtcgttggtcagtggctcccgaggaagaagcagcgatgagttcatcaatgtctgggtcaggagattccttcagcccacccactgcaggtctcattgtcccctggtccctgaagtgacgtcttctgtcccacttttggtgatttctacaatagtgcccctgttgagagcagctaataatggttttgtagaatttgatgtggatcaaggggaaggtgcacagagcccctgacgtaactcgatggagttacgttctaaggaaggcagcctgtgagcgcgctttttgttgcggcctcagatcaagctgctgtaggttctcccacctggatctttggtgagcagaagctgaggctcagagagcagctcacatgagtagtgagcagaagtcagggccactggacgcagccttttcctcccttttgaagtagaagaagggtctctcctcagcccagcatcctgtgttctgtccacagtgcctgactcagcacctgtcagtcagccttacatgtgacaccctgccttacatgtcaccagtaagggggtgcttgtcctgtgcttcttcctgtactaatccacactcagatgttgtctgagaggttcagaatgccagtttgacaggatgctgctttgtaggcatattccacagtcggaacaccagactacattgctccagaagtcttcatgcagactggctacaacaaactgtgtgactggtggtccttgggagtgatcatgtatgaaatgctaataggtgagtcctgtttacatgcatgatacatacctctattggcagatacttctattggtacatacctctattggcagatacttctattggtacatacctctattggcggatacttctgtgacagacaaaaatagcagagccatttttaatctattccccaccttcttctgcccaggatccctatggcttcccttatcggatgccatatgcagggttcggataagatgaggtggggctttacatccttatggacttcattagtagttttacagtaaaccaacacctataagaaacagatgtcgctacagaacactcaggtttttttctcgtggcgtgtacttgtaggtctggttgaactgatcaccaaagctggtaatttttgtttccctgacacccaggcttcccacctttctgctctgagacacctcaggagacatataggaaagttatgagctggaaggaaacactggcattccctccagaagtgcctgtctctgagaaagccaaggacttgattctcaggttggtgacttaaaacttcccagtgcccacacgagctgtttctctgaggcagggcaggtgtttgggggcggggagagaaattaatttttatgtttaagtgtgttgggtattgctcatggaggctaggagatccctagagctggagttacaggcagttgtgagccacctagtgtggtttctgcgaattgaacccaggtcctctgcaagagctgccagtgcatttaattacctacttctccttccctccaaaacgccaatgcttacaaagaagtttgtgggaaagcggggtttagatcagagaagagatcttcttggacatactgatatttttagcaaagggtcacttctgttagacttcaggactgggtgtgtcagaaacgaaaggagggtaaatgtattagaagcagaagcccctgccatgaaagtcacaggcacctaagcagagggcggtgggaggaggtgctgcagcactcctgtgaggggagaaagagctgttgtaacgactctttttctgtcctccagccagctcccaaataatgacacagactcctcattaatgaaagctcggcctgtagctcaggcttgttcctaactagttcttatcacttaaactaatccatttttattaatctgtgtttgtcctgtggtatttacctctcttcttgtttcctctccgtgtctcctggtttcttctgcgtgtttagatcctcccctcttcctctctctccctgggagtcccgcctgtacctcctgcctagccaatggccattctgctcttattatggcagtcacagcaatgtatcttcacacagtgaacagacatccccaacaggatatgaactgtgacaagccttgtcagtggacagctggcagcgtactgtatagaattgttaaactatacatggcctttgaccagcagttctatttctgggaatttaatagagcgtgttaccatgtaggagcaaaaagagttaggcacatttcttgtgttattttagttgtgaaaaattggaactcacctaagtcttcagcagcatcgatggatgtaacactacgatgtctccatacacaggtctcaaaaaattacctcacaggaaaatactgaacagcgctgcgaagttttcttagtacattaagtgataaaagtcttaaagtaatcatgtcagccctgttttaattatttcaagcaatgaaagaagtgactgcagaatgtctgtgggtgattgtacttctccatgtttctcctaccccagtgtactcaatcactaaattagaatgcttcctagaaacacttgaagggatacaatcagagttgcaagtgaagtatgtggctgacgtctgttttcccttcctaggttttgtaccgactctgaaaacagaattgggaacggtggtgtagaagagatcaaagcccaccccttctttgagggtgtagactggggccacatcaggtatgttctgaggcctgggctgacaaagggagcttctggattggtggttaatgtgcctctgattcttatagacccgaggttctcagcctgtagttcatgacccctttgcggggttgaacgaccttttcacagcaatcgcctaagaccatcaacaaacacattcataacagcagcaaaattaccgttttgaagtagcaataaaaatggttttatgggtggggtcaccacagcgtgaggaactgcactaaagggtcacagcgacaggaaggttgaaaaccactgttatagacgaaatacaagaggcagctctgcctcatctgagacgtcatagacttggtctgctgctctgcttccctgtgtctgttacggaaaggtcgcagagcagagcctggcctgtctaagctcagtgctagttggggacagaggccaaggttgtggctctttccacccagttgagtcttaactagacttccatagtcatcgtgcctgggtctagaaagtctaggtaagacaccatggacaagatgtcaacagttcctcaggggaagatgagaaatgtatggtgtgtgctcatgaaagtcctgggcacacagtgggacctctagtgaaggcgcatattactcttagttaagactaattcttgtatagacacagacagtacgtgctttttcatagtgtggtaggcttagcacccagtagatcctttaaaaatttgttgaaaaaaagtaaataaaagctgataaagggcctttgaggtgattcagcagggaaagcctggagactcagttcaatccccagtcctgcgtggtaggaggagagagccaacagctgaatgctgtcctctgacctctacacttgtggggtttgtgtgtgtgtgtgtgtgtgtgtgtgtgtgtgtgagagagagagagagagagagagagagagagagagagagagagagagagagagagagtgagtataacttaagttttaagtgtaatttaaaagttttaagtgatggtttcttttaactatttctatagttaaatgtatctactaccataaggcattttttgtggaggtattttttttaacctaacctctctggttctcttaaaatttatatgactgacaagtttttgcattcggattttatcactgacatgtatgtgtgccctcttttgcacaggctcactaatcctcactagacttgtagccctgactcacttaggtagatctcactgtctccacagactccatatcacctataaatctcagtgagatgccgtgtctgagccagaatgctggcatacacctttaatcccagcacttgggaggcaggcgaatctctgggttcaaggccagcctggtcaacagagtgagttccaggacagccaaggctacacagagagaccctgtctcaaaaaacaaacaaacaaacaaaaacccaaattccttctcttctaattttcctttcattgggtcttgttttttttcaccttaaaaaaaaaatatgtcttatctcagtggtagagtatttgtccagctgttgttcagtctctagtactagatggggaacactgggtgagaaagtcttcatgcaaacgtgtaaaaattccaagcaaataaagacattttagtgaaaaattactcagccatcttgacatcatccgcatagctgtgttcagatgcgtagcaggcgcccttgggtttcctgtcccatgcagtggtggacaggactttcaagaatggtttgttggacagtgaagagttaagaaaacttcccatgctctttcagggaaaggccggcagccattcctatcgaaatcaagagcattgacgacacctccaactttgatgacttccctgagtctgacatcttacagccgggtaagacaggttcacagcagacctcacacagcagtcacctgcaaggtgagggacatgcagctagtgacgtccctctgcccttcttaactcttttctctttccagtgccgaataccacagagcccgactacaaatccaaagactgggttttcctcaattacacctataaaaggtttgaagggctgacgcagcgcggctccatccccacatacatgaaagctgggaaattatgagtgatgttcacagtcacccacagccaagaactcaggtagctgcatctccaggctggatggcatcagcaccagacattccgaggacgctggcgctcaccagcctgagaaacttccacagggtcggattctgagactactacaggaatcgctcggcttttctttcttctttttttttttttttttttccaaatattttgttgtttgtattaactttattatacaaaggtactggaacaaaaggaaccgacatgtcctcctaactgcactgcccacgtgcatgttgaggtccactctgcccatgggctgcgcttccaactgcaacactaatccagccagaactgcacagcactgacggcagcctgcacagcgtggcagcctgaggtcactcacccttggtgtacctgcttcactgcaaagcgtgtgggtcttgaatcagtaaaaaaaaaaaaaaaagccatctgtagctgctgttagaacactcgccctgttggtttggacattgtaggctccgagtgaagacagtttctgtggcggtcctaaggaacttagggagaagaataccgacttcaacattagaattccctgccaggtgctcacacagcccctgggagagcggcggtgagcttcggtcagggtgaggacgtatgtctcacctcactccagcatcttccaaggctgacttcgctgagaagtagtgacgactgttttacacacacggggacacactgctgtgattgagcaagtgccagttacttttattgtaacacaaggacttcttttataacaagaggatggcattattttaactgggtgatggtgagttgagtttcagaaatggccatgaaagctgcttgtagaacctagtgtatttttattaaactatttttttaaatgttaaacttccgatcatgtcaatgaacacatagagaacaagcgtgtgagtagtcactttggctctctgcaaagttggtacatgtccttgctgtgctggtaggcaacctttgtgccattgttttccagtgaaccaaagctcctgagcagtggctgtcagtggcgagtggaattccgcttcccagggagcgctagacgccacatgacagacctttgacagggtcgtgttcatggttagctcatcactgtggttaaagcccacagtggagtgaaggaatcgggtgcaggctgggtgtgtgtgactggagactggacaggaaaagtcagcatcaaattccctgggcatttccctagtggtgacgtcatcttttcttgctcagcgttttgattctaaaacaactctctgaagaggtttagtttcctaagttgtagttgagaagtaacctctcagtgaatggcaaagatttaccatctgcgatggagatggaatgaggatttattgggaggaaatgtctctcctcgggggactgactgagtaatgcgttgtgcaaatttccaaaagctttttttttttttttttttttaactttnnnnnnnnnnnnnnnnnnnnnnnnnnnnnnnnnnnnnnnnnnnnnnnnnnnnnnnnnnnnnnnnnnnnnnnnnnnnnnnnnnnnnnnnnnnnnnnnnnnnnnnnnnnnnnnnnnnnnnnnnnnnnnnnnnnnnnnnnnnnnnnnnnnnnnnnnnnnnnnnnnnnnnnnnnnnnnnnnnnnnnnnnnnnnnnnnnnnnnnnnnnnnnnnnnnnnnnnnnaaaaaaaaaaaaaaaagccatctgtagctgctgttagaacactcgccctgttggtttggacattgtaggctccgagtgaagacagtttctgtggcggtcctaaggaacttagggagaagaataccgacttcaacattagaattccctgccaggtgctcacacagcccctgggagagcggcggtgagcttcggtcagggtgaggacgtatgtctcacctcactccagcatcttccaaggctgacttcgctgagaagtagtgacgactgttttacacacacggggacacactgctgtgattgagcaagtgccagttacttttattgtaacacaaggacttcttttataacaagaggatggcattattttaactgggtgatggtgagttgagtttcagaaatggccatgaaagctgcttgtagaacctagtgtatttttattaaactatttttttaaatgttaaacttccgatcatgtcaatgaacacatagagaacaagcgtgtgagtagtcactttggctctctgcaaagttggtacatgtccttgctgtgctggtaggcaacctttgtgccattgttttccagtgaaccaaagctcctgagcagtggctgtcagtggcgagtggaattccgcttcccagggagcgctagacgccacatgacagacctttgacagggtcgtgttcatggttagctcatcactgtggttaaagcccacagtggagtgaaggaatcgggtgcaggctgggtgtgtgtgactggagactggacaggaaaagtcagcatcaaattccctgggcatttccctagtggtgacgtcatcttttcttgctcagcgttttgattctaaaacaactctctgaagaggtttagtttcctaagttgtagttgagaagtaacctctcagtgaatggcaaagatttaccatctgcgatggagatggaatgaggatttattgggaggaaatgtctctcctcgggggactgactgagtaatgcgttgtgcaaatttccaaaagcttttttttttttttttttttaacatggctgctggatgactcctctttgatcaaaggccatcaccagctcttgaagtgttttgctgagtttctgtgtctggcaagtactaaccacttgtcagcctaccggctcaactgtagcctgagcctgtgaccaccgagtgtttggagagagcagactggacacggtggatatctcatctcactgatgacttcaattagctgccttaatttatgcagggtatatgagcttctccagctcacctatttcaaaagtatttagcagcaggaaaccgccccctccccaggctgtaaaatgggactgtggggtgaccaggttcaacgtggagatcttgctgtactctctagctcaggtgcaatatctatctaactaccacaggatgacggcatcgtcaagtccaggtgactggggtaggttgagattagtgtaaagaagaattacccagcttgtgtttccatggtgtagggcgcagcacttcgtctgacctccctgttgtgactggaggaaacagtgaaatgcagtgggaagttggctttgctggagttagcacacaattcagtcttcaggggtttctcgtgaaagcctttcttaagctgctgtctaaaggaaactagactgtgcctgtcccgttgaaagctaaaaatatgagtcagggtgcaatttaaggaaatagcaaagattccccgagattggctttttttccattatatttcccccatgtctcagggggatcatgtaatttaagtgacaaagcctatctaatcactgggaatagtgacattttctctagtctctattttgaatcaaagttttactacaagctctgtggtttgggtttttctaaggatataggaagtgtgtataatccaaatttattagtttcctgttttaatacagacttttgctttttcattaaaacctttgtgttaaagcagttttgttttgtttttgttttttgttttttccagacatggtttctctgtggctttggagcccgtcctggaactagctcttgtagaccacgatggtctcaaactcacatagatccgcctgcctctgcctcccgagtgctgggattatagcgtgagccaccactgcccggcatgttaaagcagttattaacagcgaagtctgcaggtgtgtgaaaccctaggctgtccagaagaagcagtgaccacttagccataggtaactaatcagctgttagtttatcgacagtgtcagttatgggatattaaaatattctttggttgctaagacttaagatagggctcatttattcctgtaacagcatagctttttaacacatgcataactttgtacaagctgagcatttctaaggattttaaagcatgttttggtgttttgatatagaagaccttagaaagtttatgctgtcaggaataatagctacctgtcttttggtggtctacaagtaagttacttgagggtcagaaaagaccctggctacatgatatattctctctttgaattgttaaaactcggaaaatgctaaagcagctgttttgctatggtgacagttatttttcatttcatttcaaattcattttctctgtagaagtgcacttatttctgaaaaagcttatgaagccaacacttaataaatataagacacttggaactactagaaatattttaggtttttattacaaaatatgaacaggtactgctgctttaaaggaataaataaataaaagtgtattgtagttattttttaaaaagcaatacaagtcagcagttgtccagaaccatcgagctccagaggccctcattttgaagactgttgggcatcgagaaggtacagcgagaataaaaaccatgtttctgaaagttctgctggtgggatttctttctttctttctttctttctttctttctttctttctttcttttttttgttttgttttattttcttgttgtctgaagattgttgctatccaaaacttaaatactattttgtgaataaaattaccaaatagctgttacacctaaaagtcacatcatgaaaaggttcaagtatttggagtttgaaccgtattacatttaaacaatcaagacagttgaacaagtctgggtttaaaattgctcagatccatagctgaaaacatacacctttgtaagttgtcattttaggacttcctgggcatagatctgacatgcagtcagtccttccagtgagtcagaccttagtgtatcagtaacctgaaaatcctcatgagttcagagataaaatcagctcagctaccacccactgtcccttcctgtggaagtcacaacaccaggcttgccactgagcccagaaagagccaggcgggatcccctgggccccaggcggcaccactccctcccagccgtgctccacaccatttcaatggcgctgttgtaagaactgtgggaacacagaggtcgggatttgaggagagcaatcttgcagactctaaagtcccactctcagaagtgtccagtgagacaacctgcattcacaatcgcactttcacttacacaatgccctgttttacaactattctgtaaagaaatggcgtcaccaggacacagacaccagagctccaggcctgtacttcttgcttccgaagcacagggtatgcgccatcggcatggtatccccctaacgcccagccctccccgccccccatgcttctagaaactcagagggatgcatgggtgtgatgggtgtcacttggggacaggaatgactgcaggtgacagcaggtgagtagtttcacagtaaggaaatgaaccggtgccacgcagggtggaaagatctcttccagggtagtcagctcatggcagaaacacgagctatgggggctgcttcctttgttacttttgtcacctgtgctgcttttgtccttggtcggagagagctagacggctcaggcttaagcagtcctcacaggacttcaaggctcgattttataagagaacctgtgggttctgaagaatggctgagcagtcaagagtgagtactgctctcacagaggtcccagtacccatgccaggtggctcacagtcatctgtaaactccaggggatcaggtgactgcatctgcagggacacatacacataattagaggtaataagaactccttgccggaaagtgcccccatgtgttactggctgtgatcctgtcaactgcctgttaattaactggtacctggcctggcgttgacttaggagtccctccctccctcttcacggtctccccccccacacacacacacagcccttttttgatgacttcctcattcttttaaaagaaaaacttcaaatttgtattgtgggggtttgtacaagacagtgcagtgtcctctgaggccagaagagggcgtcagaagttcacaggtttttggttatgaacttgcccagagtgggtactgggaacctaacttctgtcttcaggaagagccagagttgctcttaaccactgagccatgccaccagccagattgcctcattcttgtcctatctaaacctgaccacggcttcctcaggactttattgttctcttgcttggagaaataatctcctcgtcgtctacccaccacctaggcgcaggaaattttcattcttaaccaaggactacatcctggtgtagggctcacagcagctggggcttacttgaaagaacttggtagtgtgtctcctaagaccagaacctgtgggtggaactgggaccaggctgtcctcgttggatttggggttactgggctctagaaaggccactggtaaactctccagagtgcgtgacatgttccttgttggttactgtgagaactatgcaccacagagcctagcatagggtgagcgctgggtggctctacttcgtgtctatggccagtttcaagaagtttggactttcaataaaaacgactccgaaacattggaaggcaaaatgaataaagctttgccaaagttgtttaggttagcaagcaattcagggtttgcactacccggcagaactccctaaacacaccttttaaaggggccttcctccaattcctctgcatccctctgtgtctctccctctgccacgaacacactttgctcccagtgtcttctctgccacacctccctgcgttaggtcaaacccaagcccgttattttatcccagaagcccatagtgggtctgacaatctagacacactgaagaattgtgcttctgattctccacactgctctcgtaacccactgcacaagcctgggagtccccaggactccttcctggacctcctctagaggtggaagggaaaggtcactttaggtattatcggtatacacatttctcttcaatctcttaagagctcaaaattgggtatttgtcatttttatgaaactcagaaagtattttaggtttaattaactatgctgttgtttgaccccagtcgtggggaaaggccccagccatggctgtaaagtggactccttcccaggtgggcaaatggaagctgccttggaagctgatcttacaggaagtgaagtgaaaataccgccccctagaggtgaacaagggttcctgccacacaaggccgttcttgggctctgagccaggaaccctcggatgttgaccagaaagaactagccaggattctgtaaattgggttaccagtccgttttctcaaacatttcctaaggtgaaagttaagggattctactggctagaaatgagaaagtacctttctatctttaagacacagggaaatcactcagccctggctagccctgaactcactgtacagcgcggggtgaccctgagctgccaatcacccagctttcaactctccagcacgggaattgtatgtatgcacggtcgttgtcgtggctttatggagtcctgaagatcaaggcgcatccccagccctccctgcaccccataccttctgatatgagacagtctccgcccaggctgacctccacatggactgggagcctaggatgactttgacccctaccactcaattcttctaccgtacctcccaagtgctaggattacaggtgtgcactccagctattcttttaaaaaaataaaaataaaaataaatccctgtctagaaagaaagcaaagcttccaggcataaagaaaaacaatgtaagcctgattggtggggtgggggcatcaggcagagaacagtcaccccaaggaacctggccttgcctggccccacagcttcctgcttcctcgggggagtggctggattctttcttttcgggctcctggtgaaatgaatcatcattgcaaagaagtgaggcctgtgttgattcacaggcaagctcatcagccgccatgaagggtgtgaactcttgaggagacctgacccatgatctcctttctgttacctatgaaggaccttgccaaaatactcattttttaaaaaaagttggagtgtattcactgcacatgacactgggtttcctaaggacattgtcatcctagtatataaattactttggtcacattctcctcccagctgctctctcacctctgtccctgtagacagttttaccatctacatacacatgtggtgaaatgaaggatccatgatatttttgttaattaagcctgacttaattcattcagtacgattatctccacttgtgtctgtttccctgcaaatgacatggctttgttccttagggttggggagttccactgtgcacagagaccacatttacccattcatctgttgacagacaaagcttatctacataagggtgacggtacacatggatgtgtttctgtgacgtgttcacttggtggtagctgggtggtctggatgctctgttttagttgtaaggcatctctatgctgagttccatagtggctggactagttaggttcccaccagaagtctattgggaggcccttggttcacatcctcctgataacttgtcgtcattagttttctgttctaacagagctggaatctcagcatagtttaaatttgcatcttagaacactttttcatgtttcttggccattcgtacctcatcttttgaaaaccgactgttcatttcattagcccacttattgactgggctttaaaaaaaattatctttatgtgtgtgtgtattttgcctgcatgtgtacctgtggaggtcagaagagggtgatggatctccctgaacctggagttctggttgtaaacctccctgtgggtgctgggaaccgaacccgagtctgagtcaagagtcgcaagtgctgttaaccactgagccatctctctagcccctcaatgagggttttttgtttgttttatttcttggcgttttgtcttctggattctttatatgtgtaaatgctaatcctgtcagatgtttagttagtaaaaattccctcccgttctacagttttcaggcttgagcctctccccgactgagcaaacaggaatgaatggatgttccttcagctacagcggcggctgagggagtggctggatgagaggtaaagtcggcatttgggactttgagagaggttttgaggaggtggtgtctttgtgtgtgaatcttgggaacccgctcgctggctcgcacactgcggtaactaagaagggccgcaccttctgccctctggacccgactagaagagtctgccggctcgagccaaaccttggagttttcactgctgtggctttacctgggcaaactgtacccaaggaccccacctggcgacggtgagttctgggggtgccgccgtggaacgggggcaggtctggagctccaaggagcctggatgacttgtgtccccaactgttgcaggagtgcccgaccgagacagcgttgacacccacaccacacccgaacgcccacagccaggcgcttgcctggagcccgaagagggccgggcccacgggcgtgtctttcttgctccgcgcagggggcttccctgtgcgccccctgcaacgagcagtggacttgggtcgggggtgggggtaacaatcaacttatcttccgggtccacggttgtaacctcagcttgctccattgcgtcctgagtcttgttggaagttttgcctcgtttgtcctctcttgctctcagcggtaaaacttggaggtgtcttccctggaacgctgcacacagaggataatcgtaaaaagctggtgtttaaggcaggtgggagtcaggagagagaaaaaaaaaatccagtaagtgtaaacaggcacagaagtcaggacgaagttattttgatcggcctgctgattgactgatttcttgctgtgtagcccttggctggcctgcaacttgctgcaagaccatctcaacctggacttgtatccccccagtgctggcggcaggcttgtctccatgagactggtgtgattttagtgaaaggcggggatgtctgtctgtggcttttcagaggctttgtgtgctcccttctcgctctgagctctgcttcactctccaccgggcaccttggtttccctccctgtaatatggggcaactgtcagggttaacaagctacaaacgcatttggctggcgcgcttagcccaagtctcgggggtctctgtgagtatcaagtaaacacatcttttagtataaggacatttgtccactctgccacacaagagtcatctcagtgtggcaacagttcggctaacactatggaaatgtgggcttgtttggttacaagaaagtggaaattgataactaaaaccctaaacaaaacaggtctttgtatcagtttggcttacattgtatacaaaaacaaagcaagcaaacaacaaccacaaaaaaaaaaaaacaaaaaaaaacaaaaaactaaacccttataactacagggctgttttgaagatgtccacaaagagtgaggcggagccaaacaccattacttgctcacttaccattttatgagaccagcttgtggggtaaccgctgaggttaagcctgctgcccactggctgagcattttcctggaaggtggttccagaacccttggagctagggagagggctcgcgactgtagtggcttaaattcgtgttcctgactcacaaacccaagctggtgtcccactctgctttgcataagcagttgttcctggcctgttccaggaatgcgtcacacgagctaacgcaggatgggcctgggaaagctgcagtttctcccgtgcatgggatctaggtcattactcaggcccagaacccacgcgacaacacccgggactccgtgtcagcctgcatggcccaagggaagatgcgcacctgcctgccctgtaaggctcttcctgccctgctttcagcgtctagcgcctcctgtggaggatggggacagtgggagcttctgcttcttgggagacttagggccgagaggcatggtgagggctggagagaacgcgccatggagaagggcattggctgctccgcaggacgccagagtttaattcccagagcccacgtggtgtctcacagccatgtgtaactccagatccaggcagtcagatgccctcttctggcctctgtggtcacagagggcacacatggtggcacacacacacacacacacacacacacacacacacacacacccatacaggcaaaacacgcagacacgaaactcacatgcagtcttgcagaacatgctgggtatttttttcagtgtgtgtgtgtgtgtgtgtgtgtgtgtgtgtgtgtgtttggtgctgtggatcaaacccaggaccttgtacctgccaagctcacatcttaaccaccctccactcctgaggcctgtggaatcccaccagactcaatcctgggccacgggcttcattttttttcctgtttgtttatggcagagatctgttgatggaaaacctttgtttactagctctgtgattttggctaagttattttgtttctctgagctccagtttccttgtttgtttataaagttgggctaaagatccctgactctgccggtggcggttatggagtaatgactacaaactgtgtggaggattccagcttccacaatatttcctttttcctcgtgacctttccccaggacattgtctctaccacagaagcctttcccaatacccattttctcgttgtagagtttttgtctctggagcagtccttatgtttgccacatgctgtgttggcctcatgctggtcctaggagggcagtggtcgcccttacctgtcgtctccatctctgatcccttttcctatggagtgcctggtacagacactcaaaagtgaatgagactcactcaagttgtgcacagggctggttcactctcaacggacccatcaagtacgaactgttgagcagacacacggtgaaagccggagttctgcttagagagcccagccttggccttagtctgggtgagaggttcacattcctgactcctctccttataaatgtgtcatagaggcgctgaggatggcatagaagtgactcagaaactggtttattctggctctcagtttgagtggacacagcccaccacagtggagaaggcaacgcaagtgtcaggctactggtcaccttgtgtccacgggaagcagagagcagacaggaagtgtcacctggctataaaacctcaaggcccgcccacagtgacccacttcctccagtgaggctccacctccacagggaacagcaccaccacctggggaccacgtgtttgacacttcacctccaaaccacagcagaaatgggctgcaacgtgacattgtgttaacagaacaaaacaaaaatcggcagactggccacggagaatgagaccccctctcaaaattggggcgacactgtctaattcatgaagaggagggagcactttaatatccgtgggtgggtctctctcggagatctttcaggggacagaataggaacagaaatggaaactggcaggtgactggaggatgtgatcttgtagtctttgatttgagtaggatctggagaaggaaggccggctttgctgaggttgcctcgctgtgtgttgttagacttcccttgccctgtggacagttaacccatggggggggggggagtcagagagttttccaggattaaagacaaaggcaccttttattttgtggtacctggttggcagcagcattttcatcgccatggaaaaagagcgaactggacttgatgctgagggaaaaggcaggaaagcctctagcacaggacgggctccacgtgtgtctttctctccttctcttttgctttctgaaaaagcagctacttatgtctttcaagctactccacactcggtctttcaaaaagcattctcagaactatttagtttgtccccgagacacccttttgggaagcgggtacctgcccctccctgtctatccacatcaggggccacattgactcactgttgtcatcacttctgccttccttgtgtggttctatggtctgggcgcacggcaggaaaaacggaaaaacaaaaacacgtactcaaagacccttcccgcggcgctgatggagctgacggagctgagacttgacttctaatataaaggcacaacgaaggctataaagcaggagcccaggcctccagggtgttcccctaaagtgggaggacacgtggaaaccccgttcgtgctgtcagatgttcttgagtcaactcagttgtgggccagaggctctggggcttacaggttacttcagagcagtggctatggtggtgcagttgcacctgtagtcttacattcgagaggcaggggacattactacaaatctgagcataagctaagtgagttcagaggcagagataccctttctcaaacaggaatcaagccaaaaagccccaagtatggggcgtggtatttatgaacaaaaatcaccataggcatcgcaactcatcttcatctagattttgtagtagaagtctctctggggtcctggactactatgctcagagaaatgtccaagctgtgcgtgtctttcctaggaatacagatctggggactggagatggcccggtcagtcaagtgcttgcaagcgcaaggatctgagtttgatcccagagctcatcccaggcctgatggaggatgctgaggatgctgaggacatagaaacaggaaaattcccagggctcagccaaccagcctagcgaactcggcgagttctagactagggacgctgtctcaagaagaggcgatgccacctgaggacacacgaggttgtacccggcttccacacacaaatgagcctgaacacacatatacaaaatagacaatacagattccccaccctgtttcttcttattcaaaaggatctcactacatttctcaggctgtcctgggactcctgacgcagtctcccaaatgctgtcattacaggtgtttaccacccatctggaggttcaggcggttgaagctagtattcagcaaatgcagttgacgttgactcagcaatctgcagacatctaaagggacagaagattggcggagggcggggggcagggggttgctctgatgaaatgttaggcatggcacccctgcccaggttgattcactctagataccaactccttggttgaagaattacacttcctgtctgagtttacatggcagccaaaggccagttacacttatatcaccatggagacaaacgggaccatgctctagcagactgccactgctttaacgggtctcccaggcaaccacactgacttagagaagagggacgagacccagcttgccttgtgtcatggtgcttcagggttccttaagcattagcacttaacatttccttaatatgctaacacttcttttttaagattttaattcatttatttattttgttgctacgaaccgcagagttatgcatcgagagctcagttgacaaaaatcacaaagctaacccgctggcatcaccagatggagaagcccacatgcaggatggtgggagtattcgctttatgaaaagtcactgtccttactgaaaattacctgtgaagccttggtgctccctttctatggtgggattcatccccaaagctccagcagttattaatcattcactgggcacattaccccctgtgcatccgtatattggacgactcccccagcaatgtgtaacactggcaagaatgcaatcacaaccaataccctcactctcaaccaaatctttgtataaacttagaagtctgccccccccccagttatcttccttggtagacagctggtcagtgttagtgtccaggccaagagacctcaattaagacattcacagatgcctgaggacaggaattacagcatgtctaaagttgttgagccataactctcagagagatacaagaagagtgtcctggattctctctgccagcagataggaaagtactgtcacaagctaagctcatattaaccttaaagcatgcctatcttcacttgccagtctactaacaatagatctgtgtcttaaagtggtcagtgggcactgtgccctccctgtcttaacagtggtcagtgggcactgtgccctccctgtcttaaagtggtcagtgggccactgtgccctccctgtcttaacagtggtcagtgggcactgtgccctccctgtcttaacagtggtcagtgggcactgtgccctccctgtcttaacagtggtcagtgggcactgtgccctccctgtcttaacagtggtcagtgggcactgtgccctccctgtcttaacagtggtcagtgggcactgtgccctccctgtcttaacagtggtcagtgggcactgtgccctccctgtcttaacagtggtcagtgggcactgtgccctccctgtcttaacagtggtcagtgggcactgtgccctccctgtcttaacagtggtcagtgggcactgtgccctccctgtcttaacagtggtcagtgggcactgtgccctccctgtcttaacagtggtcagtgggcactgtgccctccctgtcttaacagtggtcagtgggcactgtgccctccctgtcttaaagtggtcagtgggcactgtgccctccctgtctaaccttgattctgttcctacagcctgggacccttgtgttgtcacattaaatggttcggctccttatctcttgctttaggaatgtgcttttgaccaataagagcaatttctttatcacttctaggctcctgaaggagaagagtttttagaatagaagagggaactagaagaagaagcatggagaagctagaaatattattatagacaggattattagagtagaaacggaacaataaagatcacaggaaataaagagcacgaccctcagattgtgtgtgacgttactatagaaatcttttacccctccttcactcctgagcagcattttacctttaggacccggggcggggctggaacagttctcatagcccttacattttgtgtgtgcttgcttgtgtgtgtgcacatgtgtgcagaggcttgtgtgtgtgcgcgctcatgccatgacatacttgtggaggtcagaggataactttcaagagtcactggcaactccagagatcaaactcaagtctcaggctgctgcagcagctgcttttaacccctgggccatctgtgtggcccttattacctcctttacagtcaccacacttacctctgggacatgtgacaggaagcaagggggcgtcaaatacacacctcagaatttcaaatgctgtgagggcaagctatttagagaaagatttagaaatgatttgttattgatttctctaagagctgacaataattttagattctgggcatcactgttaccatagtaacggtgatgtattaaggatgtaaatgatagggttattttattgcttttaaaatacttatcatgctgggtttggtgacacaaaccttcaagtaccctctgcggatgcagaactcagcaggctgaggccagaggatttcaagttcatggtcaaggttaagttttgctatatacaagatccatctgcaaacaaaacaaacacagaaaattcccactgtttcaggtggtggaggtttcattttcttctttttcaggctccttcgtattttataataattgactagttttgaaaaggcatgcaaatgtttttatgagcgctaaagagtcccgctcctgcctgtgaagtttaactagcttggtagaacagtccttcatgggttctgttctgaacccggcgtggctctggggccccatttactataattatcccagtgcctacaatggccttctgtctactcagaacctgagggaactatatttgtggggctgggattctcatgagaggcagtggctctcatctaactctgacagctgccctaagtttttcaggaaaccctgctgaagttgagctgccacacccccattctttagtgtgggactcaccagctctgggatggttgggggacttctctgactttccgaggaggtgctttgccctgctcttgtctgtcctggggttaggtggaatgctttttctaaaagtcatcatcagggagctgttatttgggcttgtgtcactctggttaggttctgaatcacagcccagcggtttctcggggctcagttcccaaggtcatcagcagtgtttgccctgcatctcccttttgggggcactcagcaaatcagtctcaggttctcgtgggaagttctgaacaccttccatgctgtagctcagcggctctgcctagctgcttaagaatggtattttattctgtgttccagatgctgagaacttagactcattgccaaaccagagcgtgaacccaggctaactggcctccagaacgtgtaacctttctgcctggccttcgattgcattccttcaatacccgcagtcctcccagtggtgccgtttctgtgacatgctgatgtctaaaagggaacctgtctgttgtcagggagggtggagcgctggcctccatggctttgaggaattctgaacatttcacctaataactgaatggtgttgggcaggtgcaagtgtcaggacacagccagaggagcaaaggtgtgggaggcttcttacagtggtcgtcagggagctggcatgctgagtggtgcagcgagctaggccagtctggaacctgcagggtggactgtccacaggcgggccgaggatctcagctgctgctgtccactggtagtttcttctccagggaagtctcaggtccttctatggattagatcaggcccttccagtctatccttgccgatggcacaccagtgatggcaattttcacatctacaaaggttgttggctgattgtgttgctgagaaccgtgaccaagccaagtagacacagcaaaaacaaacaacaaaaacccagtcactgtgagttttccatttctctttgcctgtttctcatgtgacagaggcagtgagcacctgtgggttgactgaggagagactgagagtaataaagcaatattaaagggtctactaagccggcttcaggaagactgagttacaaaagcagaatttagctaaaggtgtgcttgaggtcgaggcatgcattgagcaagtttaagattgctgaggagaggtttctgtgaagattgttcgccaacatgccacccattgggtccccttcccataacgaacagttaggcatggctacaggtactgcacaggatagtaagtgtggcctccttggaagaacttggccaagtccagtgtgcatgaccagactggctcctaagcggctttcgcaccatgctggtagtgtgttggcaggggagggaaatcattaggaaatgacatcagggcagtggacttgctgcacggtcctggccgtagcttttgcctccatgacactcaacaccaaagatgctggataactgtctgtcctcactttcctctacttgatcttgtctccagaatgccacagttgcatttggcttgcactcgttgtctgattttgacttttcctttggtcctgtggcttattcaaggatgttagaggatctggtcccaaggtcaattgtcaggatttcctgtagcccagactagccccaaacttgtgatctccctgctgctgtcttccgagagctggggttagacctgttcgagttacactcagccattgttgaaaatttgatgaatttgtagaaggagcatctttgtgcatctctgatatttcaggtcagtcaaatggcttgggggtatgctgtggccctccgtaccatgctccagattgccctctaaacatttacaatgatttctgcacctaccagagtcatgtgagaggatgggactgtctccattcctccctcttaccctcccgaaggcactgtgatctgtatttttcagtattaatcgattggtggatattaccacaacataaagcctgtctgttttcattgttggattttgtggtactgagggtggaacccattcatgctaggcaagtgctctgccactgagctatgctctggcaggcactgtgtctccatcttgaattcagtaattctcaggttacttgaaatagtcagccctccgttggctacagacgatcacagtcatgtatttcagagccaggaagcaagactgtcatttatctgtccccgttgctgttccccagtgtcacttaacggcttccaccctggctgcccctgcactgtgtgccctccatacacttgtttcagtgtcttgcacagtcacgtaaactttcaaacatggatggacacgcatgattcaaactaaatatttggatcctctctcgtttaaattgtgtgatatgataatgcataagatgaaaattaagtctgaaatgcgtcttcctatgctttctcactcacaggtaaagggctgagagagagccagagcctttctcttgtggtttctagtcacgtgaacccagggacaaaactcacagctcctggacccgtcaactctcttgtaatggagtttccaaggaaacgcaaaggcagtgattcagagtcggcacagtaagtgcacattgctctaactccatgaaatctgtcagtcagaaaaagggggccatgtttacatcatttctaagtctgtgacagcatggcagctggtcgccgcctaccgctacctgtcagtgaccttgcctgccagggctggtgatgatggatgtctgggagggtcagttaggacctgaaggagatagatgatggggcataatcaatgtgtaatgctcacagtcacagccagcgccccccttcctcatcagaatactccacctggagcaaaagattcagcaatgcttggcttccggtcccagaataaccaggcctcggtgatccgaagtcagtttaaatcttacaaagctcttgtttccatagttactaagccaggtggatgatgaagacaacggtgagactatgatccccttgttacttgcttgtttgtttttgtgttgctgggaataaacccagggccccaagggtgctaggcaaggtttgtgcttctgagccacaccccagatcctcacaggaggattctaggcagacactctacccctgagccacccttcatccagctctgcctcttatgctccttgtagcctaaggtattccttaattactcccccaaagcaaggtttatacagtaaaatcgtttggggcagaccgtgggatggcagtgtgtgaatgggaaagttggggacagtttcccaccgcacctgaagggcaaagctctgagttagagaagagcatgaaaataagcttcctcggtctgtttaagtcagtccgcaccagggtactccatcttttagctctgatccccaggacagtgagtggcgctggccaactgcacgtgactgggagattcctccctgatttaactgtgttctccaccctctcccattaatgaggtatacagaggggcagctggccaagggcagttaccttcatcttgagttatcatctgataacaaatgatagttcctactaggttggttttttgtttgttttgttttgttttgttttgttgcatgtgtgtgggggggttttttgtttgtttgtttgtttggtctttttttttgctttttgagacacagtttctgtatgtaatactacttaggctgggactcactatgtggcacttgtagctcaggctggccttgaactccataattcagagagggtttttcttcctccgttaagcctctctaagaatagtctcatagacatgcctggaggtgtgtcttctaggtgattccaaatcctgtcaggtgactacgagatttaccattcagggggtggcccaaggcctccttccttccagaaggaagagaattcatgacagaaacaatggtggaaaacttcccctagaaccctttacctcccttccttcaacaagaatagagctagcagcacccaatggcggaaggcaggttagtctgcctagtgtccctgttacgggaagagggtgtgccctgtgaaggaagcaggttttgctcactgtgctcctcagagttttgccctggcccagttctcctatcgttttccaggatatttcaaactgcagttcttgctaagtgctggatatgtgtattatctctctcagggtgagaaagccagcccacagacatatgagaagttttgtttccatagccccagattgtttaatacttgtaaagaagaccccgtgagaatggtcacttggtgtggcactgttggctttgggtggatagctgattctttcaaagggactttgatcaagatcctgtactatgtagttattcaacatttattaagaacctactatggctgggcgttggtgacacacacctttaatcccagcactcaggaggcagaggcaggcagatctctgtgagttcaaggccagcctggtctccagagtgagtgccaggataggctccaaagctacaaagagaaaccctgtctcgaaaaaccaaaaaaaaaaaaaaaaaagaacctactatgtggggctaaagagatgtctcagcagttaaaaacacgtgttgctctttcaaagaacccaagtttggatcctagcacccccagtgactcacaactgcctgtaactcgagctctaaagaatctgatactctcttctggcctccatgggtaccccctccaacacacatatacacacagagaaacaaataataaaatctttcaaaaaggatttatgtatatgagtgtctgcctgcttgtatgtatgtgcaccacgtatgcagttcccacagaggccagaaaggggtgtgagatgccctggaactggagttacaagcagctgtgagtcacctgcggtgctagaaactcagtgccagtcctgtacaagaacagcaatgctgttaaccactgagccatttctctagccctcaaaaaacaaaataaagcaaaaacaaaaacaaacaaaaaagcaacctactatgtgacacctggtagaataggaggctgagcaccagattagacacattgtgtttcaaaaggagagcagtatggaatgggtgaggattgttggatggcaactgtggaagtgtgggtagcctagagcggctgaggaaagcaagcattggaaggaggctcaatttaaaaggctttggaggcagcgcggggccccagagtgaggctgatggtggctgagggggaggagacatgattgtggaatattataaactatagagcttcatgactgtttgacccttgaggaaaacaaggtgttgagaatgaatctccatgtgctgcccgccacggtcacacacaggggagagctcgcaggagtggagggaggagacggaaggggcaggtgttagagtgcctgcggtttggaattcctttagttgcagattccttgggaagcattcaggggcagaactgtctccaaaggctggagggaggagcatggcagacactgtcacagaacgcagccggggagcctgtggagccttgggaaggagtgtgttctcctaggttctctgcccctgggcagtcaggaaccaagcagggggccaatatctaaggagacataggtgatggtgatgatggtgatgatgatggtgatgatggtgatgatggtgatgatgatggtgatggtgatgatgatggtgatggtgatgatgatggtgatggtgatgatgatggtgatggtgatgatgatggtgatggtgatgatgatggtgatggtgatgatgatggtgatggtgatgatgatggtgatggtgatgatgatggtgatggtgatgatgatggtgatggtgatgatgatggtgatggtgatgatgatggtgatggtgatgatgatggtgatggtgatgatgatggtgatggtgatgatgatggtgatggtgatgatgatggtgatggtgatgatgatggtgatggtgatgatgatggtgatggtgatgatgatggtgatggtgatgatgaagggtgatgatggtgataatggtggtgttgatggtgatgatagtcatcataatgaaacagaaactgtaaaacgcttcctagaatgggcagaagtgtaggcttttctttgccttgtgctttggagagagggtcttgatgcataactcaggcgggccttgaactctcagtggttttcctgcacaagtctccagagtacatgattttaaacatggagaagcttcagtggagaccacgtgctttcagggaaaaccagttggaaacggaagacttagcatcaaaaaccacagcaacagtaccagaatcagcgctgtgtctttcagaacagggctccagcacttttggacacagtctggagctggagggggatgaagtaagggcaacagctgtgcaagtttcaggtcacctctaatgagaagaggccactcactgtcccacagcggagagggaggaaaccacagcccgtagaccacagatgtcttagctcaggaagttcatggtcaaagccgctggatgtggtgggtgctttcacaagcactttccccagaggcgccagcttctcacgtaagtgcagctgctgtaagagcatcctgagagccatgggtcctgcacccctagtgcctctgggcaacggggtgaacattagccaaggatgttctttctccctcccagggaagctcacagccagatggagaagcggcggagagacaagatgaaccatctgattcaggagctgtcatctgtgatccctccactcagccccgctgcccgaaaactggacaagctcagcgtcctgaggagggcagtgcagtacttgaggtctctgagaggtaagtaaggatgagagctgtctcaggctattgacatcatctctttatcagagagctctgttaactctgtggttggtcctggctatgatatgtctgtccgccttaccatgaccatgcaaaattgtactccttgccttcatgtgagaagataggctgtcagacactaaaaaccccaacatgaaggtgtagaccagcagattaggagctcaaggccagcctgggctacatgagtccttgtctcaaagcaaacaaagtataaaacggatacacactgccaccttgtggttcctttctagatctctgcctgtaaagccaagcacagagcaagagtttcagagaacagggtgttctgtggaccctgacaacaatcttcccagactggggatgcaggagagagcagagctctctgggacttccttttctgtgcttagagatctgggttcgttccatcagtctgttgagaaacaagagtctcttttacccactcctgaggcttgcataagttacttggtttctcttgaatctttagcaatgaaattccaggctacaccagggtcatttgattccatcccagagattacccaaggaccttaatattagccttgtcccaggggcatgagtcagtcagctaattcaacacatatgaattgaacaccagctataaacctattctctactaagagaaaggagaggacaggagaggagagagagagagagagagagagagagagagagagagaggcgcaaaatctctgccctttggatgtctctgttgacaagagggtagactcacagtgaggtcattgtcccctggtgtggggacagtgagatggctcagcgggtaaagttgcttgtcaacaagcctgacaacctgagtttggtccctgagacccacatggtaggaggagagaactgatccccccatgaataaataaaaaatgttttaaatataacaacacaacccctagtgtggtatgtgtcccagcagaggtgtgtgctgggaggaactatgggaactgagcagggcagacactctctaaatccattgccatttccaggggctgatgtatctggtgccacaccccttctcagccatcatgtggtcagctgcttgtctacacagcctgaccaagcctgagtcagcacagcacattagtgaagatggcttaagacacttggttctgtgctccagtgtgtttggcacagcacagctgtattggttcggcaaaaccttagacaccaaacttcagagggtgcctatggactgtgttatagacacaacaggcagagagtagcctgtgaaactctgggttggagtctcagtgtcacataaaccgggtgtggtggcacacacctgtaatccaagctcttgggaagtggggcaggaagatcaggagttcaaagtcgtcctgggctacatagtgagttcaaagccagcccagaatataggaggccctatttaacaaaaaaaggaagaaaagagggaggggaggaaggaaggggagggagggaagggtcccaagagtccccagatgttgcgaacaccactgcgccgtcattgtaatagccgcagcagctcatggacggtgtccactgagcaattactgaatttctttctctgtgctctcagtaactttggcctatttgtttttaggcatgacagagtctttcttaggagaaaattctaggccttcatttattcaggataaggagctcagtcacttaatcctcaaggtaagtggctgtacttggattcggatgggagcaggatttcagttcacctctattgtagccatcagagagtctgtgtctcacattccttaaattagacattggagataaggaaataaccttgtgtactaatgcctcattagtttggaagagcaatggacatctccattgcagaccccctcacacttaagatacccccacacacaatccaaggatcaaccatgggcaccacctcctcagtgccacccacctggagtccagttataagggatctgtcacctggagactagggaatgattcattcagagttctcctgttgtggcctcatcttctcacaggccggggctttgcagaccccacagcagaaaattggtgtttgattgatagttttgccatgcactatgacataggtatgtgttgttcattttgttcatctttctttcttttcttttcctttttttcattttctttttcttttctctttttttattttgagttaaggtttctctatagctctgactgacctggaactcaatttgtagaccaggctggcctcaaactcacagagatctgtctgcctctgcctcctgagtgctggaactaaaggtgtacaccaccaccacctagaacattttcttttcactttaaaaaacttactcttattttagcttaatctttaagatttactttttattcatgcgtgtgtgtgtgtgtgtgtgttaggggaagctgccccagaggacagacagatctcttagagcacaggttatcggcagtttgaatcacctgatgtgggtgctggaaactggtaagctgtatccccagctcccagagagtttaattcaaagaattttattatactgatctgtgggggaggggggatgtatgtcatggcatgtggctgtgtgcatagatcagagaacagctggtgggacttggttctctccacccactttgtggtgttagaccccccagaaaacctcaggtatctggggtcccaggccacgacctcggtcaccccaatcaccaggcagattcgagagcctgatgcaaactgcatgaggctttattgttttctatcgagctaaccccatgttagctcaggtctttcatccacccgccatggcaggtggctagcaaaaacagcttgaacctgctgtcgagtgatcttgtaggtcagcataaggggagtgtctaggggtacacacaggctcacgattggtgatcttggagggcttgccctgtgttgattggccaattgcttgttatagcccataggccctcccagggtggttgctatgctctccgcgtcattgctgtgcacttgtccgtaaagcacacccagagtcataaagcatagcgccaccagctagcttctgattggttcctaacgaggcaggcacctaacctcttagtgaccaaggcaaggtcatagcaagcacgtgtcatggctgctgaaatggggggctggtcccttcagtgggtcccgggagtcatgcatgtgtgtagatgagagaacagcttggcagcaagtgtctgttcccactgagccatctcactggccctgaacagtgattttgtggatatagagcaatctttaagttggattattgtgcgaattaccaatacagagccaggtaaaaacacaagggaatttaatagggaaaagccttacttacagagcgacctagccatccggtggggcagcagtaagtacagcaagccaaagatgaaagcaaaagaaggagcctgccacatgagcgtccctcactcataaccttccctccgtcaccctgaccacaccctcgcaggcgttgccaggcacacctgtacccagcccctaagcaagcatggctacagcatcccctataattccccttttagtctaaaagaggattaaaacttaacagtgtaaagtatccaaaattaacaaatcatagaggtgaaatataagaagatacaacaatctgcttatgtcacatcctaactatctatttcaattaaaccctaaagtcatctgaaagaggtgtccaagcctgaacacctccttccaatcccaaccatcaacaataagaagctatccctaactaggtatatacactatcctaaataacaacaatggggaaaggggatgtagcattctccaagttgcttcctactgaaatgggatgatgacctccttgtggggtcctataggaagaaaatgttagtatagtgaaagtcttgaataaattgtatccagtccatgttagatgggatttgcttaatttaagatctcgattgaaatcctcaacttgattgaagtcagtacccgaacctctggccggagtgtcagttgaaacggagcaagttggatccagtctgtggcccattttctttctggggcatccagggattgctgtcaggcaggtcttcattggctgtgtgggactcagacataaatgttagctgagaaatgtttgcttgtgtatgtaagcatgctagaaaaggcaatcatgggagaataatgattaagagagggtgtactccttgaaagaaagagcaaagaaaagacagacagtccccaaattcttctcttattctgtattacatcaattagcttcatgatacaatacagaaactctaaagtttagttaaacaaagtgctttgattttagaggaggaaagccaaatccacctctaaatccagcattgatttaattgaatagggactagaaaaagagaaatagagttctctgagagacagctataaagtttactgtatggcactttccttttgtttgatggttatagctaccttctcttcttaagtatctacccatgcagtgtcctttgacttcgggagatgagtttttctgtgaagataaaagcaaaacactttcttttcctttgggaggtttttatttagtttatgagatataccttagtaaaatacctgtcatttctcctgttgagaggtttttccttttcaacttgtatcttgatcaactttgatggtatccaaagtttttcttctcctgtggaaacaaatgcaaaacccctaccccatcgtaacacatatcctggtttccatacagaggttagtgcatctttgaagtataccggctgattcagttcagcagttttttctgtagtttggtgtctttctgcagctgtttgtcctttctcattggcattaagaaactttagtgttaataaagcattatgcaacctgtgtttggggggtttagtcttccaagcctgtttatggatcatctcctttagtgtcctattagatctctcaaccactgcttgtcctgtaggattgtgatgcacagagatgcaaataagagccatattaccctgaggccatggtaaacaatagtagccttactggcattaacaatacaatagtgggccggagctttccggtgctccatgtttagtgagacccaaggctggatctcaaaatattccatagcagaaatattttggtcccccacacctaaccaaggttctagttcatagtagtaataacctctggcctcttggtatgtatgctgacttaccaagtaaggtgcttcttcttcccaagcccttgcatcctcacctctagaacttttaatctcctgctgccttttaaacctttggaaatggcttctcccacccaagctccagtatcttgcacattatagtcagtgttggcttcatgctaaacccattcttctagcagagctgatctgatctttaaaggcaaaagtattcttttgcatattaggtttgcattttcgtaagctattgtatatacaatcgaatgtcttactgccggatctgttacttgtaattctgctgccctggttaacctttgtaagaagtcttggaattgttctgttggtccctgttctattctggcataaacttctaggcgttctcctggctcacaaaccttatcccaggcatttaatgctgctttcctgcatagagacagtatatggtcatcatattcagcctgagcctgtggatcagcataaataccctgaccaagaatcttatctaggggggctttaaaacctttatgccttgacactcaaggagcttatcttcttccctgaccaatgccttccactggatttggcatgaattctcaagtacagctgctaccagtctttcccagtccatgggcatcagcctgttaaaggttgcccatgaatgtaatagctgttttatgtatgggctatggagaccatatgagacaactgattctttaatattcttaagatccttcagctgtataggttgccatacataagccatctgtccctgagggtgtttcctagaagctggctttcctaccatggtagctgggtagactaatagtgtacgagtaacaaccttagaggaatagtcatgatacctgggtggagtaggtgccttgattggagtgattctgcctccgaggcatcccaatcatctttaagcctagtaatgatatccccatgaaaagttttaatttcatgcatcgtaaaagattccaagcatgttagtggatctgtaaattgctctaactgctcatctacatgtttttctaggtctttaatatgatcatccttaggcagcatctggatggcatggaaactgccttctagatattggaatctagattcaaggtcatgatttgctgattttgagtcctcagcaattgaccgtatggacctttgtaatctgtcagccttgtactgtgattatcgtccaaacattctaatctagactcacatttgtgatctgctaccttggatgcttcaataattgattgaatggcattgtccaattcttcaaccctatcctgggtattttgcacctttgtatctaggacacagcgcctatctgagtttctagttgggtacagatattctttagtttgtcatgatgtctgacagcctagcctctaactcctcagacatggagcatctctgtgtttatcttattataaatacgctgcctctcactttggtaacagacagctctatctttagtagcgtattggagatagagccaagcttatcatccaacttctgttccacttgctgcacagttgtggcctgacctaatctgttttccaaaaacctcattgcataaagctgttatttcctgtaagtaggtggtaaggttatccttgtccctgttcctgaggcctctggctagtaatgttatttttaccagcaagctaactgccattactgcatagaggccggtaattggtagataagtgtcctcctcgaacactgaattcacgtaatgagcaaagatattaccaattgtgaaaaatgataaatattccatcatgattttacctgatttctactctagatgcagtaactatttttggccagcaggtggcgcaggcattcagctagtcctcgaggcttttggcaactgtgggtcaggcaagatggtggcagcttcggtggagctgaggtcacacaggcggctgcactttagctggaagtgtacggccttgcggctgcaaccactaaaaagccgcagctttgcagcctctgcagccaggggaagccgccgccannnnnnnnnnagaagccgtgggccctgctgaaagctgaggcctactctggaggcctactcggctcaagggcaggaggccccctggtgcgggtaggccacagtcagggctggtcccatgcacatagctagaaaccgtggggagtctgtagaactctcccagctgggcggactgttctgagaggctcggcagctgctcgtgtggcggggcgggtcagccgggagcacctgtggagagagggagcactttccccaccacgtctgccctccaggtaggacccacaggctctcccaaacgggcttaggtttacaagatcccacttctgacaaccacatattgcgcgaattaccaatacggagccaggtaaaaatacaagggaatttaacagggaaaagccttacttacagagcagggcagcagtcagtacagcaagccaaagatgaaatcgaaagaaggagcccgccacatgagtgtctctcactcgtaaccttccctatgtcacccctcgcaggcatggtcaggcacacctgagccagtccctaagcaggggtggctacaacatcccctacattggataaccatgcagagtgatttggaggcccagtcacaggtcatcaagggtttttctcatcatcgcttcccattaccccagcacatgtctacgtaactcttctcctgtttgttgtgagaatgagcacggggagggtaacttagctggcagggttctagtctaacacaagcaaagccttgggtttggggccccagctctgcacagaccaagcatggtgacgaatgcttggaatcccagcacttgggtggagaaggcaggaggattgggaatccaaagttctagactacaaaagtttgagtccagcctgaaccacacaggagactattacaaaagagaggctactctggagaacaccacacttgtgccccgggccagctgtggctttctgggcaagtggcttacccgagggatttgctgcctgagcagaagagaaatagaggctatattagaatatttaaaatttgttttaataggtggtattataattcaaaaagaatagaaagggctcctatcgagagcgtccagcctggagagatggctcagaggttaaaagcaccggctgctcttccagaggacccaggttcaattcccagcaccaggtggctcacaaccatctgtaactccagttccaggggatctgatgccctcttctgcctccatgcataccaggcacatacttggtgcatagacttagatgcaggcaacatacacacacacacacacacacacacacacacacacacacacacacacaaccacaacacacacacacacttcctctcccagtttgcacagcatgtgtccgtagctacaagtgacaagcgttttagaatctttacagggtttctctgtgtagcagagtggaatctggaaaatattatccaaagtaatggattttactgtgagtttttacacacacgtttatactttggtcatttagcctttcccaccctcccctgttctctttttcactccagatggttcccagttctgtttcacatcacatatcgttaccttctctttttctccttttaccctgtaatgtgtcttcttcccactcatggtgcgtgtcccatgaccctgcacacatgtactgtagtttgataatgagatatccaaccaaatattctatagctaaaattttcatctcaaaaactttagaactgaacttgacagtctctatgtgtcatattaaatttttagactgaaatttgtcagctgttttaatgccaccataaatttcctcaaaatctgactcggttttggttctgttttaatcctagacagcagaaggcttcctgttcatcgttggatgtgaaagagggcagattctcttcgtatctaagtccatctccaaaaccctgcagtatgatcaggtatcaaaccacggtgttctccacttggtcttgattcttttttttatttttattttttttattttttatatattttaattacaaagattgaattacatgacaattccagttcccttctccctctcttcctcctctaccaccccccaactaaaatcctacctatcatatgtcctttcttctaatctacacctgactcaacctttctgctccctcatgacctctgcatccttccttttcttcccttctcactctcgtagcttcctcccccctcttcccatgttctcaaatatgtattgttctcactggtttacctgattctttttttttaacaaatcctaatttgaagctgtgtctggccccttccttccctttgccactaagtcagagcttagagagagatggaagacagtggggaggggtgaattcttacgaccatcatcggtgtctccttcagacattgagaggtgacatcattttctgagccttagctttgtccaccgtcaggatcggtgcctgaagtcagggtgaaatgacgagataagatgtcatactggagtttctgaaaagtgttggtcaccttcctggtcccttcaagtggtcacgtcattgctcattactaagttataggcattgaataaaagcggtgatccaactgctgacaacacagaggagccacgttggtcgtgtaaccagcctgctactcatgtcctccaagttagactcctcttgagtcaggcagctactcagaagctgtccccaaggccggcctgcagagaacagctttgatgggaatgccttcccctgggttctgcctctttcaattttaggttagcagctaaaaaggtcaatgacagaaggggccatctgagcttctatgtgggagaccaaagaaccccaagctggagacagctgggcacacaaatggcataaaaacacatggtccatcttctaactggagctaagtggaaaatagcatgcacacatacacacatacatacatacatacatacatacatacatacacacacacacacatgtgtataacacatatacatgcatgtacatgtgtacactcaaatgcatatacatacatgtgcacacatgcatgcacacacatgcacacaaatgcacatatacataggtaaccaacaagattgccttaaattacagattagtgagcagggctgatgtccactgggtgctgatagcattgaagactccctgtcttctcaggaggttgttgggtttagttattggcttttcagaatcagaaacccgacactgctgagtgacttctggacgtggacttattatgttaacccagcatacaatagacggaacaaacggcagatcgctggggtcttagtctgagctacctaattggctggtccacctgttttgtctcctgtagaacatgtcctggagacctttgtgagagggtgggcttgtcatcaaagtggggtgactgtggcaccttcaggatgacaagaagacaggaatttcaggctgtgaatcaagagtctagagttcaagaagcagttggctgagcagccacagccacaggtaacaggcaggtgcctgagagcctggtcagtgctcaggaggataaggcaggaagagcctgagttttgggtcaacctggattaatagttagaggcaagaaaacaacaactaaagagaaaagaaagggattatttcacctgggcaggtcctgttccacttgacaataccagcaattattgccatcatttgctctgatcagatttgtaagtgtgtgtgtgtgtgtgtgtgtgtgtgtgtgtgtgtgtgnnnnnnnnnnnnnnnnnnnnggaagggggagggggaggggaaacaaaccatggattgagttagaaaggccaatgaattttacgtaaggcatgcctgcatgttgggagctgaggagtgggaagtcagaagactgttgggcttgcatcttcacgttaaagatgagcagatgttctgggcttcattttctgctatgatgtaatcccttgccttatattacaagtgatgaagtttatggctgggagatgctcagtcagtacagtgcttgctgtgtaaggtagggaccagagtttggaccgccactgcccatgtagctgggtgtggcaatgtgctcctctaatcccagcactgaagaggcagaagcaggaccatccctggttctctctggccagctcttccagctatcagtcagctccaggttcacacgtgcataatcacacatcggaacggatggacacactcgcacacagacacatacatattggaaaatgaagatgaaatttaaatcctaatgccttagaagcaaccctgaactgagagatattaagcaaggtctgcacagtaacaagatttaaaggaaaatcagaaaccggtgttttatgtggtttatatgtagctatcctgatatggtttcaagtacatttttagatttttatatgtgtgaatgtttgtctgcttgtgtgtctgtgcaccacatgtatgcattcgtaccgcagaagccagaggagggtgtcagaccctctgggagtggaatacagacgcttgtgagccgccgtgtgggtcccgagtcttctggagaacggcatctgcttcttaacgaccgaattgttctccagcctcagagtgcacttttgtttgtttttataaatgtcacccagaagctcaagttaatgtcccatggtgtgatgcacatatatttaagcgtaaggaacagtcccctctccagatggagatgtagctcaacggtagagcactctcctggcacgcacaaggccctgggtttgatccccagcactggggggaaatcagtctcttacaaggaacaggggtttatcgtacgtgtgtgcggaaatgtctaaaagcaacataactgatgttcagtgtgtgtctgctttctttgcagggcaccttggtgggacagaatttgtttgactttttacacccaaaagatgtcgccaaagtaaaagaacagctttcttgtgatgtttcaccaagagagaaacctgtggacaccaaaagtgagttctccctccgaggttcttacctctgtgctgggtacttttctgtagatgagataaatgactgtggccaaaaacaacctaagaagaaagggttttgttttgtttttaagtttacactttcagagggatagtgtcaatcacagtgggaaagtcgaagcatgaaggcagggacaggaaacgggctggttacagtttatccacacacaggaaatagagagaggaatagagagagagagagagagagagagagagagagagagagacatatacaataaatgtattctcacgaagatgatgtgtgggaatttatgattgcttatagttttcaatccaaatgaaacatttataagccagtattatttgtggttaaaaatttgctagagttgggctggagagatggctcagaggttaagaacactaactgttcttccagaggtcctgagttcaatttccagcaaccacatggtggctcacaaccaccttgaatgagatctggggccctctgctggcatgtagccagaagactgttcatataataaataaataaaatcttaaaaaaaaaaaagagaagaaatttgctggagttttattctctttcgtatatggcccaagtttgcctggtatgggagatcttgcacatttgcgcttgggaagaatatatgtattcattatccatatatacttaacttgtgaaaatgcttagtgccaaacaattatttatgatatggaaatagtgatttaggggccagagagatgtgaattcagttatgagcacttatggctcttgcagtggacccaggttctgttcccagcactcacagtgtccctcactccagccccagggtgtctgatgtcctcgcttgacctccatgggcatgcacaggtacacacatggtacacatacatccagtcaggtaaacacacatacgtaaagtaaaaataaattttttaaaacattaaagaaagaaaatgacctcgtcagtttttaattttgtgtttttatttgtttgtttgagacagagattcactatgtagcttttgctggtctggaacgtcctatgtagaccaggctggcccttgaacacacagagatcctcctgcctctatctcccaggtactggaattaaaagcatgtgtcaatacatttgggcctagccagattttttgtgcactctacaatcccagcatttagagcagtgaattatgaaatcaaggctagcctgggctaagaagtaagaaccttcttcaaaaacaaaacgaacaaacaaacaaaaagccaactatggaatagtggtgggctaagctagagatcattgttgcacttgagtttttcttcatttttaaatttcatttcatttcaattaaactgtattgtccactccctcaagaaaatattaagatagattgcaagtgctttgaattgttgagtatggtggtgcatgcctacaattccaacaccctaatggaggagtaagttggagaatactgaagttcaaggcctgcccagcttacagtgctggaccctgtctcaaaaacaaaacactgccaagcaaacaaactgcatatatatgatggtgggtggggactttagcaggggctgacgaggtaactcccaagttagagtgcttactgctcttcctgaggacctgagtttgtccccagcacccaatcaggccactcaaatccacctgcgactctggctccaggaggtctggtgccccctcttctggacttctcaggcacctgcacccatctctctctctctctctctctctctctctctctctctctctctacacacacacacacagacacatacacaaagattattctctatttttattttcttgtattttgttttgagaaagggttctccatatatcactgactatcttggaactcactctgtagaccaggctggccttgaactcacggagagccgtctgcctctgtctccagagtgctgggattaaaggcatgcactgtgattattctttttttaagaggagggaagaagagagaatgggaggaggtggattttaagcacgtctgtgactcgcgtttctcattcccgctgctatggaagcctctctgcaggtttacggtcacggccaccgtgggcgaccaagcgtgcactctggctccaggcgatctttcttcttcagaatgaagagctgtaaaatcccagtcaaagaagagcttcgatgctcaccctgctcaaagaagaaaggtgggactcttgggagagccggtgaccagagcctggtgtgaatcacaaggtcctagttagtttctctggaagaacatgtaaattccacagtcaaggcaagaaatagaatacaaagcatctgagtgagattgttttaaaccaagattgttcatgtcggctcacaagcaggagctcattctgctgcctggggttttcacggtcccactgaacttgtagcagagagagcctaagtttgattcagggccagatctggtgcactcaaacctcagcactcagaaaatagaggcaggtggatctctgtgagttcaaggctagccagggctacatagcgagactctatctcaaaaataaaataaaataaaaactcagacaacagcagagttcaatctctttttttaaagtttgtttttgtttcgagacagggtcccactttgtagccctgtctgtccaggaactcactctgtagaccaggctggcctcaaactcagagatctgtgaaatagatgacccagagacagatattggggttcagctttcaagctgaagatcagaaaagcaaagcagccggccactagctctcacctctagctcaggctgaaagggtggatcctgtctccacgagctctcaccaagcctcttctcagtgtgtctggaggacaaatgcctccactgactcctgataccgtcttacatacttcttacgagtcctgggatgaaaggtgtgagctataattctcttttagaccgatgcactcttgtgtagatctaggtgaccttgaacacagagagatccgtctacctcttaatcctgagtcctaggatgaaaggtgtgtaccaccaccacctcctagcttctggctgctgggattaaaggtgtgtgcctggcttctatgacttgtggctggctttgctttctgaatcttcaggcaaactttcctagtttatgaaagtttgttgacatcaaatgtctcccagctggattctgaggtcagcttaatttttctcagagacttattctgtcttccaagtattaagtattccttctttcatttttaaaaagaggttgcaagtgtgtgtgagtaagtgtgtgtgtgtgtgtgtgtgtgtgtgtgtgtgtgtccacagaggccagaagaggccactggattccctggagctgtctgttgtagagttgggaactgaacttgggtcctctgaaaaagcagcaagcactcttgactattgagccatctctccagcccgtttgtttccttttgagacagagtcctgttgtatagtccaggctggtctagagcttctggtgtgtcatcctcctacctcagcctccctagtactgagatttcaggagtagagcaccacagtggctaaaaagtggtctttatataggacttcatgattctgtttattcacaaattttggctccaatcctttttataaccatgcatgaagaaaatcacaagtgctgacatagtaagcacatggtcctgatactgcactgagcatttaattcttgtgaaaatattcttatatctgtcttagaatcaaggaggcggccctggagaggttaattaacacccagtcacctccctcttgcccatggctctctgtggtacagagcctagggcaggggctatccctagatgtagtttaagaaaagcagcctgcaagagaaaaacaccagccaacagggttccaacggaggtttttttgggggggatcataaaaagggaaaggggagggggagaccagcccccggggacagaagcagcaggagagaggggagggagagagagagacagagacagagagacaggaggatgggaggtgggcagggcccttagaaaggaacacagtgaatgtgcacaggtggtgctcttagtggctgcagctgagggtgtgtcctgtcagaaccccaaggacaggccagtacagatgcttgaatactaacagtagtaattgttgttttaactataggtagaccagttatttcttgttttcatgtaagggagtgaatacatacacagtgctggtctttctgatctcacatgacgctgtatcctccaatctctttcgttttaccacaaatagtgggattccgttttcctctgtgtaagaacggtgctccattgtttataacccgtctgaacctgtctgactgttgacgggttcttaggctgattcccatcttagcgggtatgaccgtgtgctttaaatatggaatttggtgtgtggggagagtctctctgtaccttgactttgtttctctggagtggccagatgtcatgatactgtagctttttgaagaatttccatactgttttccaccattgctattaacaatgaccccacacacacacacacactgtctttgtggctccctctttctccacagcctccccagcatttattcgtccttttgattgtggccattctaactggggtaaggtggaatctcattctcttttgagttcacatttttctgatggctaaggctactgatcattgtgttacatattccttggccatttgtatttcttcctttcggcggggtcttagttagcgttactattgctatgatgaaacaccataaccaaaaagcaacttggggaggaaagggctcctttggctcacacgtcctcattatagtccatcgacagaaactcaatcagggcaggaacctggaggcaggagctgattcagagaccgtggagggtgctgcttactggcttgcttctcatggcttgctcagtctgctgtcttatagaacccagggccaccagtttagggagggcaccacccataaggatttttgtttgtttgtttgtttgttttttaatgccttacaggcttgcctacagcccagttttatggaggcatttttaaaactgaggttcccacctcttagatgaatttagtttgtgtcaagttgacacaaaactatccagcacaaatggagactctttggattgatttctattttgttaagtttgtatgctctttagatatggtggatatcaacttttgtcagatgagtcaccaacaatagtctcaccaacaatagtctctgggttgtgttttcttttgttgaccattccctgtgctgtgaactagattttgagcctggggatcccacctaggtaaagattgcctgtcccagcatctggtctgcaatgtttcctatttgtaacttcagaagtctgagtcccacactgaagtcttcatacatgtttcagttgacatccgtggagggtgagagacagggcttgagtttcagttctgcatacgctgtccagtttccccagcactgtttgtggataaagctgtcctttctattttccacaccagttttgagaatcagctggcctcagacatgtgggtttctttctgggttcctcatgctgttccgttggtctgtgtatatattcttgtgccaataccatgctgtttttgttaccacgactcagtgctatattttgaagctagacactccagctttgctcttgggactcctttgtgcttccttgggaattttaggtggcttttttttttttttttgctctggtgaggatgtcattggtgctctgatgggaactacattggatccgtagactggaattttaggtggtttttttattttcatctgtggtgaggatgtcattggtgctctgatgggaactacattgaatctgaagactgcattgagtacagccaagagaacaaagctggagctattctgccgtggggtttgttttgtccttgctttttaagaggcatcaagttaggttgtgtatttgaatcctgtcttcttgaccttattatttttatacgagcactcattgctataaaattccttcttagtgatttttgctctgtgccaaaggttttagcccattgtatatatatatgtgtgtgtgtgtttttttaatttttaaagaattcttaagttagcatagaagatacctggtgtcactgtgggcatctttatatgtgtatatgttattcatgggttgtctcattggttcttctcttccttgtgcccctccccatcctaggttccttcctccctcctgtcagtcctcttctgcttcctcatcacagtcacaggtatttccatttctgtctgtttcaagagcatcttaaattccccatgcagtgggagtacactgtcctgcccccattcagatacagtttttagttctccttactgatttattggctcatcccatcgtgaccaacaaagatacaggatatgatctcatccctcaagcatttgttaagactacttttgtggcccaacacagtctgcttgagagacaattcccccatgtgatgaagaaaagagaaaactgtgaaccgcacagatgctcagaggccaagccagtctgtctacacttggtcctcagctccgccctgcatgtgctgtgactgtagcccctgcctgttcccaaagacaagcagacaatatcagagcacctcacagaactattaaggaggttaaatgagttatacaatcccagctgtaagaccgcccaacagacttgtggctcaccctcttcatgtctgtcctgctgctgactgtaactcttagggcaacctacagcattttctgttaaaagaaaaactaacgtttctttttaaagatttattgttggggaccacaacatgatgtgattcttaaaggcacttgtggcacaagcccagtggcctgagtttaatcccacaacttctcaaagttgttctccgagctccacatgcaggctcctgcacatatacccacacacacaccatacacacgataatagcaataatgaaatctatcgtgctatcagtcttcctgaataatgccaatttaaaacaatgcctgttcaggtcttctgcaagtccagtcacaactgaatgttttaaataacttgcattaggtttttctctgcgttttaacattgaaggcactttgtctaaagcatctaccatgtgtgcaccacccgtcttctgagcccatgtgaccgttccttgtttccataaactttcctcatatttgagcaaacgatttttcttttcttgttttcctttttggtgggttggtttgacaagctgcttcatgggaattagttgcttagaatttttttctgaaaagtcaaggttttgagtctttttaaaaatactttttattgtgtttctaaatgctcatcaagcatttctgtggtcctactatgactatatatgtctatcaatcatcatcacaaacaacagtaagatttgtttttcataatagacagacatggtggtgcaggtcggtaaccacttgggaggctgaggcaatagtatgggggttaggagatagtctcttatacataggaactgggggctagcctgagctacaggatgaatttgtctcaaaaaaaaaaaaattggaggagggaagaaggaaagaggaagtggtggtaacattggcattcatgttgatctaagtgtatttctgtggcttctcattagaccacaggaaattctacaccgtccattgcactggctacttaagaagctggcctttgaatgttgttggcatggagaaagagagggacagtgttaaagacagtggtcctcttacctgccttgtagccatgggacggttacatccatatgctgtccctcagaagagtggcaagatcaaagtgaggccaactgagtttgtgacccgctttgccacgaacggaaaattcgtctacgttgatcaaaggtgagcactcaggctgtggtgatgaggagccccgggccagttgaggttgtttcaggggtgactcggtagctctacaggattttccttctaattggggcttgaggatagtttaagtggcataaggctatggttgttggtcgttttggtcaagccagagggcaaacttggaaaagcatttcttagcagtggtgctgaggctgggcctgctccatggccactgtgttggccactgatgccttataagggcatcagctggacttcatggggcctcacctgggtggcctgtttggtggctctggtctgtggctggcggggaccaggcagtccataggagcctagtggtccacgtgactagctctttccccggggctgctgcctcaaagtcacacctgtgctggagctgctggattctgggagccatcaccttcagtaagtgccatgctaattttctgtttcaaaaccagggcaacagcaattttaggatacctgcctcaggaacttttgggaacctcatgttatgaatattttcatcaagatgaccacagcaatttgactgtcaagcacaaagcaggtgggtaattcatcgagagcataatttaaaatgacaacttcagccagatgtgatggatcacactcaaaatctcaggacttgggaggtggcagtagaaggatcaggagttccaggctagcctgagctatgtatcaaatccctatgtaaataaataaataagtgtcattgttattgtagtatcaactctcaatctctcgttccttatgaaaccccaaactggagttgattcacaaggcactggttttgggtttggtgtttgcttttgttctgggattcagtacgggcccctggctggcctagatccagcagctaccctcttcgcacaaagcctcccaagggccgggattccaggcaggaaccaccacacctggcttgaggtcgtttcattctaaaggctgctctgctgatcgcatcttttcttgcgaagttctgcagagtaaggagaaaatacttacagactcgtataaattccgcgtgaaggatgggtccttcgtaaccctgaagagtcagtggttcagcttcaccaacccttggaccaaagagctggagtacatcgtgtctatcaacacgctggttttgtgagtagttctctgtaacgataactctttccgccagccacctgtgttatgccgccacgttagggcccccaaataacacacagagacttaatattatttacaatgctgctggccaatgactaagatttcttattttctagctctgtcttaagtatcaaccataaccattaatctatatattttataaagacttatcttctcaaggacaccagcggcatgcatcctcttcctggggatcacatggtgacccctctttattacgtttcccagaatcctccttctttcctagtcctgcctatcttgctttcctattggtcaacagtgttttattcatcaaccaataagacaaatacatatacagaaggacttgccccatcagttctttgtcttcttatttgtcctactttcttttttttctttctttttttttttttttttttttgggctccatgtgttgtggtgagacagggtttctctgtgtagccttggagcctatcctggcactcgctctggagaccaggctggcctcaaactcacagagatccgcctgcctctgcctccagagtgctgggattaaaggcgtgcgccaccaacacccagcagctttgtcctactttcaagggagtgcctctgctttccttcagaagccaccaaaacttcatggtcctctggctgtgcggcagctcagtttggggatgggtgccaggagcctgcacggatgccagaatgctttgatctcccatatccatcctcagagcctgtcatcattagttacaactcctggggcaaagtaaagtcattaaatggctgttgtgcccgatcatttaggaataatgacaagaaaaaagtctctgtgtttaggaaagatttgggttttcctcctccagtatttttggtccacaattagtgatcccacagtcaaaccctgagtctgtggtggccactggtgcctgagaattttctttgttcttcattgatgttaagttgttcaagttaagctgacagttcgccctttgtaatctacccctttcgtgcttgatataatgtctggtggtaaaggtaggtaggtatggtttgcacacctgtgatcctggcacctgggaagtagaggcaggaggatgagaaactcaaagctatcgttggctacgaagggagtctgaggccagcctagactacatgagaccttgtctcaaaacaacagcaacaacagttccccaaaaaccaccaccccaaaaaccagaagacgaagaaccactgactcaatggtagagtatttgcctaacgtgtgtagggagtgatcctgattacaagcactgctgaccacgcctacttgggctccgtcacaggtacttaagaggggtttaagagccaggggggacaagcacgtgggtctctcgctaggctgagctgactgggaagcatttctgggtccatcctgctcaggtggaaacctggtcactggttcccttacgtgagtattttcccctaataaactactggttattacctatctctgactgcactatgtaatcatcaatacaagtgcatgaccctgggttcagtttccccagcacaggtggggagagggccaggcacacacatttaatgtcagtactaaggaagaagaggcaggcaggtctctgagttccaggtcaacctggtctacatagcatgggcaggccagccaggaccctgtcttgaaacaaaaacaaaacaaaaaagaaaagaaagatgtatcttctatgcctgtggccagtactgccaccaagtagcagaaatctggccttgtcttcaggtgaagtgcctacctttagccagctcagcttagcctaagcttcgttgctttgctaagtttataagcgggtgtaagggtcactgttgtgggatattttcaccctcggacactgccaagactgccagtgaagttgactttgaatcagagggtggagctagctactagctgaccaaaattagccatgacctatgacatagagagagagacaggaagtagcagggagggcctgatgggggcaggagaacgagaaggccgctggtcacttctccactgtttctctgatcaatcaggctcttaccctgatatctgactctgagtttttgttgataaagataattacataaacacttcatgtcacaccagttccgtttgcttctctatcacatgtagtttaaacatcaccaggaggtgagtgtgcccgtgttccctgtcagccatcccagtacagctgtgaaccttagcactggattgggagccgagcaccatcactgtgaaaccgaccagtggggcatttggctcagatcccagtcttagctgacggtgtgaacaataaaatactgatgagtggaaactggcagatcaaacacacggagccagtgcagagcttcattggttccctcacctcagagaatgtcacctatgctgtttctgacttgcagggggcgcagtgaggctggtgcaccatccttacttccctgcagcagccagtcctcagaaggtaagccggggcctcgggtcggggttgcagctcagatgcatcgtccagcatgtgttttatgaagatgtggttttccttctaagagaagggattcccaggggaggtgagaagacagctggactggacagacatcgtgcctttggttacaggagaaggaggccaaggcaggagagacgacccagtgtgtccaggcccttgtcacgtacagagagtgacctgagttcaacccccaagacacacaaggatggcagtggactgagatcacagtgctgtcctctgaactccacaccatacacatgcatcatacgtgtacatgtcatatacacacgcataagcatataaacaccatcatacatatacacgtcaaacacacatacattatacacatggacacacatcacacacagacacatcacacatgtgtacacaaacatcatgtacacattatacatttgtacatacatttcatacacacattatatatttgtacacacacatcatacatacatataaacatatacatataaacatatacacacaaacatacatataaatacaaacatatatcatgcatgtgcacacacattatatgcacatacaatatacacatatatacaagtacatacatacacacattatatgtacatacatatgtcatacaatatacacatgtatacacaaatacataaaaaactcccaagggtctgtgagatagctcagcaggtaaaggttcttgcctccaaacctgacaacctgcgttcagtttccagaatagactcccacacatggtcctctgacctccaagtgtgtgctgtagcatgtgtgcagccactcacatacattatttacacacgaaataatgaataagagactatgttcggagggcacatagatcccatagggaactttcaagaacgccccgctattcccttcagctgtcccagcacctggttcatacctccactctaggggaacatggtaccacacgtaagtagttgcccacgtgactggtttcctaccagtggagttactcatggacaggactggtgttttcacatcgtctccctgcagccactgtgttcattacatgtcactaggcaaatgagagacaatcgtgaagggtgtgtctttgcatctctctctcttaaccatggggatgtgctcatgtattttatgcaaaatattttttctgagtatctgaatatggtggtggcacacacatgtaatcccaacatttgggaggcagagtcggaaagattaggagtgatcttgctcggttacttgagaccctacttaaaaaacaaaataaaaccaaaccaccaggaggcagatctctaagtctgaggccagcctggtttacagagttattgtgggacccaagagacaatccgtaatctgtaaggtcaagatatctttatacctgtaaccaacctctaacaggcgtggcttactgtccccttcacagagtgagttccaagacagccaggctacacagagaaaccatatttaaaaaaaaaaaaaaaccaagaagtcaaaacaaacaaataatctaaccaaacacttgcggctggagagatggctcaatggttaagagcactggctgctgttgtacaggacctgaatttggttctcagcacccccatggtggctcacaactgcctgtaactccataggtactgtatgcgtttcatgcacctacatacatgcaggcacacactcatacacatagaataaaataaaaataaccgcacacaaggaactacaagctataaagtggcattcattgcctggctctgctgtaaagggcaaaggaaaaataccatgctgaaggtcatgggtggatccgtgatcctactcaaggtctctccagcactgggaattctgtgatgaaagataagacgttttccggcattttaaggtgtggattatctatttcttttcaggagaaacttggaaattatttaaaaagaaaggaagccactgactagggctgtataccctttaacatcctctattgagttttctcttgtgctgttgcctagactcattcagacagtcctgcgtcagtgtgcctggcatatccacggggaccgtacttggtgctgggagtattggaacagatattgcaaacgaggttctgagtttacagaggtaaagttttatcattgcaaatattctcatataaatggctcttagttataaaccagtacagtgtgtgtgtgtgtgtgtgtgtgtgtgtgtgtgtgtgtgtgagagagagagagagagagagatccctcaggagggtggggcggagggtgggtgggtatgtacataagagtgttacacctacaggggcatctgatcccctggaactggagtcacaagcagttggggccacccacataaggacttttatactcttaacttgtcaagttgtctctaaacatcacaccaaatgcagaattcaggaagaaagaattgataaatgtaattgcataaaagttcaaaattgaagcaaaactataccttacaataaagttaaaaacataaactggaaaatgtgtgtattttgcatagtaaaacagactatctttaacttataaagaattttatatcataagtacattataaatttcatatagttatatgtaaacttcatgcatagcataaagaagagttattcaataactgtgtagggggctggagagatggctcagccgttaagagcactgactgctcttgtagagagcccgtgttcagttcccagcacccacataatggctcccaaggtctgtaactccagttctagaacacacatctccctcctctggctgctgagggtactgcacactcgtgatactcatacatgcatgcaggcaaacatgtgtggccataaaattaaaataaataaataaaagcaatttcttagaatggacaaactacattgaagctaaatagtgggcatgaagagaaaaatgcaagagaaaagccaagaaactttaaattgttcacttgcactcatatttaaatatacacatgccataattaagacagggttaggtactttttttcacttagattataaaagatttgaaagttttataatcttttgggagagattccccaattctttctgaagtataaattagtggagtaactttggatggcaattggacaagatgcataaaacaatagaaggaaaaaccaggtgtggttgtgcgtatctgtcacccaagtcctcaggaacctgtgctgcatccagagaatttgtctttaaaacaaaacgtactgaggtggggtatagtggtgcaagcctttaatcccagtgcttgagaaacagaggcaagagacagtctacacagtgagttccaggccagccagtgataccaagtatatctagtctgaggctcggaacaagctattttagccaaccgtgcaagaataagactgatgactgcactgctgaggtggcaggggccttaaccagctaagtaattccctccagggagttaggtagtagaatgctcttcatggtaggggccggagtgattgtagtgagatatccacctggcccgcacctgtgagtttagttctggggtctggacaggtggctcgctctcttgcttctggtcaagtcacagaggacagccagggcagatccttggagagggaacctgtggtggtcacctgcttcttgtgtaacttctccccaaataaagttcacttaacctgtatgtactgagtctagcgaatcttgattcccacacaataagtgatggcccagcagttagcaggacccaagttcagttcccagcactcacatggcagttcacaaccatttaaacctcaagtcctgggggatctggtgccctcttcagggctcccaaggcaccaggcaggcctgtggtgcacagacatcatacagggaatcactcatatgcatgaatatatatggtatatggggaaagggtacagaaatggagaaatagaaaaaaaaggatagtatgtgtgagcctgcacctcgcttgtttggcatcttagcctcaactacaagttctatgtttcctcctgttgaaggtttgcaaccagggatctaggtaatggtgaatctgcttgtgtgtcttactttttaaaaaactacatcttgtctgcttgttttgtgtatgtgcatgtgtgtgggtgagcgcgtgtcatagcatgtgtgagggtcagaggactacctgagaaagtcagttctcctgtgtgttccgggatcggcctgatggcaggagcctgtacccacttagctatctcccttgcctgtgtttcactttttaagtaaaataaaatgcccatggtggcatttgctaccttaaaatacacaggggctggagacatggctcggtggctaaaaacacttggtgatcatctagaggggaccccaatttattcccaccgttcccaccaggcagctcatagttgcctgtaactccagctcccggaaatctgacgccctcttctggccagtgaaggcccttgcacacacatgtgcatacacacatacacacaacataaatcaaaacaaaatcttaaagtgcacagctcagcaatgctccatgtgttgtggtccatactctcctgaggcttctccatttaaccttcccctccccaacttctcccacagccacagccacctcgtagttcctagttcctatttcctatttcctatttcctatttcctatttcctatttccttgcatggtttcagctctccagaatcaaaaataagtctggtacctagcaagtcagcctggttgtggggactgaggtattcagtgtggagctccttgctgtagtttatctgttggtcacgtgtgatgcatccagaggagaaaatttccttctaaaatcctgtcagagggataaatatctcttgtcccccttctcaggctgcatgcgtcatccccagaagatttaaatccttcagaaacagagggagatggccacagtgtgaactgcaggaacgccagtgtgcccgtgagtgaagaaaatgttcactggtcattacttcctttgagaaagaggccagtctataaaaataaatggacctttctggggacttggtagcctgaaggggcagtacaggtcagtagtcacaggagccatggttagaagaacacggaggggctccaggttgtgactcaaatctagtctttgtgacgttgggttcagaatttgaactctgcctcagtttccttacttgtgaggcaggtatggtaataacagcccctgggtgaatatgagaattaggtaatgggatataacccaaaaccactttttgagatggggtcccatgtagcccaggcctgggtgacttcaaagctagcttaggcaacttagtgagaccctgtctcaaataaaaaattttaaaaatgtaaaatgtaaagggatggatatacagcttagtggtagagctcatgcctggcatatggaaagacctgtttgattccggtaactggggacgctgaacctcatgctatctggaagtctgaaatagattataatcctagcgttgtgtagagcaaacaccatgaggggtctagtcagctctgtgccctgagagtgtgggaggaagacgatgaccgggggagtaggggcccgaaagtacaaacctcacatgatgattgtatgaacgtataactggtcttgctgtttatgtattcgtttattcatacatttagtgaataaagtgaccccataggagcggacatgtaagttattgtaataaaatcttctggcctctgcatgtgcacagctgtgcatacatgcaagtgcactcgcacacgtgtgcacgtgcacacacacacatacacacacacaatgcacacacgtgcacacatgcacacacatgcacacacaatgcacacacgtgcacacacatacacacatgcacacacaatgcacacatgtgcacacacgtacacacatgcacacaatgcaaacatgtgtacacacatgcacacacattgcacacatgtgtacacacatacacaatgcacacatacaagtgcacacacaatgcacacacattgcacacatgtgtacacacataccacacgtacacacatgcacacaatgcacacatgtgcacacacatgcacacacatacacacatgcacacacatttcacacgtgtacacacatgcacaatgcacacatacatgtgcacacacgtgcacacacatgcacacacaatgcacacaatacacacacatgcacacatgtgcacacacacatatacaaaaggatctcgactttgcagtaggtgccttggtttggaatctggtggtgacagggaacggctctctctcggctctttgagctgcagctatggaaatgtgtgggtatcacaggctgtgcatgaggcaggtcctcgggaactgtaatggaggttctggtgccggccggctctgaaaccacccagtggttctccctgtgctcaaggcttgctgaccggtcctgtcctgtctttccaggtgtccaggaaggagcacttttcaccgagccctgaaacaggggagctggaggctgccaggcacccccagatcactgaagctgcccatactcaggggtcactcctcagtaagttgtccctgtcaccggccacgatgtaacctttccaaaacctctttctccatcactgagttcttatgtgcaggagattttcaaagaaacaaatggctgtttttgtttttgtttttgttttttccgagacagggtttctctgtgtagctttggaggctgtcctggcactcgcactggagaccaggcgggccttgaactcacagagatgcccctgcctctgcctcccgagtgctgggattaaaggcgtgagccaccaacacccggcgcaaatggtttttaaagtaatattttttttccaccaggcatggtgacacatgcctataatcccaaaacatgggaggttggggcagaggattgctatgagttcaaaaccatcttgggctatatagtgagttgtaggccagccagggctacatagaaagaaagccacccccccccaaaaaaaatccccaagatttctccacttggaatcctaatacaataatcagcaggtattactttttaagatttatttatttatttttattttatgtgtgttgttttgccttacgtccatgtctgtgccccacatgcgttcagtaccctcaggaaaggtgttgtctcccctgcactggagtgacaggttgtgagctgccacatgggtgctgggaatcaaacaagggtatgaatgtcactaacagcacattggccacgggtcaatcatcttaagggaaagcatgcctccatcagactgtgaggaccctgtgcgtcactcactgacccattgtgagagtagccatcagctgagccagctttggcctttgctgaatacacataacttaaataaaaacttaaaagtatttccacctaggaaaaagtcccttctcaagaattatcaagaaatttaaaaagactcatgctaaaatataaaataaaatataaaggtaggggtcacagagagatggctcaatggttaagagcgcttattgctctcacagagaactcgggttccattcccagcacctacatggtggctcgtaaccatctgtattaactccagtcccgggggatcgaaccccgcttctttctggcttcctcagtcaccaggcacacacatagtgctcatatatacaaacaaaacactcagacatataaaataaataaatctaaaatgcttttttaaatttatcttttatgtatacagtgttctggcatgtatgcatacatgccagaagagggcaccaaacctcattacagatggttgtgagccactatgtggttgctggaaatgaaactcagggcctctggaagagctgccggtgctcttaacccctgagccacctctccggcccactaaaatgtttctaaagtgtaacatttaatcgctcactttaaagtgtttatgcaaagtctgaatcatgcaaatgcggtaacctggcttctcacctcctgactgcactgcttccatccatcaggttctcctgactttgaagagacccggaaaacttggattgctctctattgtattttaacctttgctctccagaacttggttgtatctcgaacttaaatgtcacctccagctccaccctcacttccttttttaatctccaactcctcacatgaaaactgtgctttggaatttgatgctttctccccagcttcacattttagcatgaaacaagaactttgttcacagtacagatgaatcaaatatcttccgggcccctgggcacacagcctctaactcccaacagcctgggagtctgtgtccgtcatctagcagtgtgattttctactacaaaatgcacaaaactggctcatttagaaaaatgtcaggacagtgttggagagatgatggctcagcagttaagagcactggctattcttcctgaggacctgggttcaattcccagcacccacatggcagctcacaactgtctgtaactccaagatgtgaaaccctcacagagatacacatgcatgcaaaatacaaatgcaaatgagataaaaataaattagtttttagaaaggaagaaagaaagaaagaaagaaagaaagaaagaaagaaagaagtcagggccctggagagatggctcagtggtcaagagcacagactgctcttgcagagaggacccaagttcaattccccgaacccacatggcagcccctctggtactgcatgtacacgatgcatagacatacgcgtgggcaaaacacccatgtatataaaataaaataatatagaaatatatccagatttgcaatttaagacatattttaccttcccaaattgtaccatgtgacctctgtctggctttatctttttttattttaggtaggtgttctaatttcattcctgtcacaacaatgagaaaccttgacaagaaatggctcaggggagaggggtctattttagcccacagttccaggtcaatggtgcgtcactgagggcaagtcaaggcaggaacttgaagccatttgtcaaatccataatcaagaacagagagaaatagttgcatgctcagcttgcttcttcatgcttacaccatttagggcccagtccatgggatgataacaccctcggtcagggtggcgactttggcaaaggtcttcacaggccttcccacaggtcctcacagacagtccctcattgagactctctttccaggtcctggagtagcaaggtgacaattaaagctaagcgttacctcttgtatcccaggttgggctcaaacatctatgttgctaaggatcaccttgaacttccggccctcccgcctcatgctgggataacaggtgtgcacagccacacctgatttatacagtaccaggcactgaacccagggtgtcatgtatgctaggcaagcacttccccagcagaacctcagcccctgccaatggcttgctgttcttgactacagttatattatttaatgtgtctgagagacttgcctacacatatgtctgtacacatgaggccagaagaggttaccggatcccctggaactggagttacaggtgtttgtgagctactgtgtggagctctgttagagcagccagtgctaaaccgtttctccagactctgcccacagtgctcccctgtactgactcacgtagctggtgttattttattttattttatttttacttacaggtgatggtgcccagctggactttgatgcgctgtgtgacaacgaagacacagctgtggctgcatttatgaattacctcgaagcagaggcaggtctgggtgaccctggggacttcagcgacatccagtggacactctagcgtttgaactaacatgagagtcgtttcagagtgtcccatttacaaaacactccgttcttccgcactgtctccatacttcctatctcctactgatagtctaccggtttttatacagccgcaccttcctctcacagggctgtgggggagtaaaatgttttcctccacggctaaacagtcaagttcatcaaactctctttacttagtgagctagcctggggtcaggctgtggtatttctactaaaaccttctgaccataaaatgctgccaaccgtattgtttgggctttgcttcttctttttctttgtctagttttgtttttgagtttgggcattttaatatattgacgttttccttgtctgtggcctaagagactgataatgtgggctgtcacgctgtggcatgcgcccatgcttgagcttttccctaacggatgaaagagctgggtgcttctggggtatggtgagtacttgaacatttaaaggggcagcacagcctgaggtcagactgacgatgagctctgtacattgagcctttgtaggacttggcaagacttgctaggatgttgaggttctttcggctcaagaagaactttgagggagaggacttcttgaaacacagaaaaggccaaagttttggctttgtttacgtaagagggtggaccctgagcccttgatcttggcaatgagtctttgcaagaggatgatataatcactaaggattttcactgtaactagaactgccttgctggtttctcctgttgaagctggcttatcaatagatacggcctggaggataaatcaggcccaggcagattaaatgccctgtggaaggtcccaccttaaattcataggttgttagtgcttaatgtagataagccagtttcatttgtaaaggccacagacttgctagttccctgatgaccacactgacctaggaaacagctgtagcctgctagataatcagtggttagtcagcattgcctgcagccaaagaaatgaaacaaatggtaaatacagtcatttgttattgttttgttgtatggatttacttggggtttttgtttgtttgtttattttttgaaacaggatctgtgtagcccaggctgttctaaaacgtactgtgtaggccaggctggccccctagagatctacctgttgctgcctcccaagtgttgggattaaagccaaacatcacaattcccagattaaacacagtcctttaaatcaggaggcaatgaaagatcacttaaaagccaactttcttgtaataatttaaactttagaaggcattttaaaagcagtaattaacccatagatgcttctgatggagtgtaagaattaagacgatttaaaattttggcctaggagtgcagctcagttggtagagagcttacctagcgtgaacctgggcttggttcctagcattgtaaaccaggtgtggtgatgcacacctctaatcccagcactcaggaggcaaagacgggaggatgggaagttcaaggtcagactgggatccacaaaaccccatctttaaaagtaagtaaaatgagaatattgcttagatttctatctatctgctttcctgaagaatcatactttgttttgttctgtgtgcatgggtgttttgcctgcatgtatgtgaaaccaatgctcacagagcatctctccagccccagagtggtactcacgtcctcacatttaactgtctttgctgaacactggaacggacccttccttgtgctttacagagtcactcaggctggaaaggaacagggaacctcagatctaatgcaggtccagacccacttttcttccctgtggtcctgcatcttcccagggaagccactctgcacccctcaccctagtgacctcttgtgaccttgtgtgcgggtcattcacactatagatgatcaagcagaactttcaccaggtctgtgactgacaagcgtcgccagcttgccagagttcctggtgtgcagttttgtagtcactgggtgcataaggttgtgtcagcacgctgtccccttgagctgacacaatgaccttgttgtgggacattttgtcaggtgtatgttacaaaatggaccaagggttgagggatgaggtgattcactattgtaaccccagtccttagagactcagtcaagaagatctctgagaattctgggccagcctaggctacacagtgagattttgaagttgccatgaattttattatgtgatgatagcctggaattaaataaaacttgagttggatattgacatcatatggtcaataaatacatatatttattgggagaaaaaaaacaccaggaaatgcagaagaaagagggactggcaaaatgaggagggaagggttgtttgtagtgtcccactaaaaaagtcacgcctgcagccccagtattcatgaagttgaggcaggagggtcactgttagtttgaggctagtctgagtcatatgatgaggctgtgctctgttgaaatcagaatatataataaactggcattgaagtctgcaggatcgctgggctcagcggtgggggtgttagcctcctgtgtccctggtgtcacgtcagggctgacagctagaactctccagaagctaccagaaagagctgggtagctattatatgcctctctccctcctctgaggggctttctttggattaattcccaccccggggcctgagagacattggtggcctccctgtctggaatgcagtggccctttggctgttgagagatgtctgtcagaggactcttgagggttcttctcatgctgtagagagaacttcccagatgtgccagccagtgcaaacctcagagaccctggctggctggggtgccctctgacctctggagagctgtcatcatgcaacgtctttactgaggatttgtatgccacacccaacactttctaactttcttgttcttgtctatatgtatttactatttttaaaagtctgtggtagataataaaaagagtgaaattatattttatacggataactagtttgtgggtttttttaatttaataaactttctccccttgacgacatgaactagtttctaatgtagaaccacagattaagaaaagggttggcattaaaatcttgagccaaaacccagtggtggtgaaccacggctttaatccttgaccgtttagattacaatttgatggtagatttcccactgggccacagcgtttccttttgtcttatctcttctttctggaatgtttttaaaaattgataattttttgtatgtacttatttatgaaacataaaaacagtaagtagtggagtggtgatttgaaagaaaatgactctaagggagtggcactgttaggaggcgtggccttgtctgagtaggtgtgtcactgtggaggtgggctttgaggtctctctctctctctctctctctctctctctctctctctctctgtgtgtgtgtgtgtgtctctctctttctgtgtgtctctctctgtctctgcctctgtgtctctgtctctgtctcagaccacttcctgttgcctgcatgtcaaaataaagtaagtagttccagctccagccccatgtctgcctgtatgccaccatgtcacaccatgatgacaatggactaaacctctgaaaatgtaagccacccaattaaatgtttttctttataagagttgctgtggtcatggtgtcccttcacagcaaaagaaacccaactaagacaagtggctttttctaacttcatttcctttttatatgtgtgtatacatatatggccctccagtaaatgaactacattgggttgcacttaggaatggtttcagtttcagtgtgtttagcgtcctgcctgtattaattagggttctttagagtaacagaacttgtagaatgaatctccttacatagaaagggtatttattagaatgatgttcaggctgtggtccagctagtctaacaatggctggctatggatggaaagtccacgaattaaaagttgctcactccatgaagcttgatgtcttggctggtcttcagtatacattggaatcccaaagaagtagactctactgccactgaagaacggatttgctagtgaggggagagcaggcaggaaagagcaaacgctttcttctctgtgtcccttatctaggcttccagcagaggacatggcccaaatctagattaaaggtgtgtcttcctacctcagagatctggattagaagtagattttccctcttcagattaagcagaaatccctcacaggtgtgccctccattttcaggttttagttaattccgtacgtagttaagttgaaaaccaagaatagccatcacactgcccaaatacctaggatttatacaagtccacttccagcaggattgtgcttggaatagcccatccagtgctacggttaattcttttggtgcttggagtagcccgcccagtgctacagttaattctcttgagctgctgatattctggggagacctaaatctaacccatatttgatttttcttacttcaggctcagatcctagccccactgaagatgcatgatggcatcaccgttttacacaagaggaaactggaactcagagttgagcagcttagcagcgtaacccaattcaggtgctgggttggagacccagacccaagcagtctagactgctgagcttttaaacatatatctgtttttattttttaattatgtgtacatgtgtgtgtgagtgtgcacacgagtagaaatacgtgtgtgcacacatgtatgcacacttgagtgcagtttcccgaggaggccagaagagagcatgagatccccctggaactgcagtgtaagcatttgtgagccgcccactctcttaaccgacgagccacctctccagctgcccagccggtttctcacgcgtctgttatgttcactaacttgataagacacccatggatctttctagttttcgtcactcccttaactccatacacagttgttttgtttgtatgaggtgaggtctcactgtgtagcccacgctggtctcacagttctcattggtgctgacactttgagcctgtgttgctctaatgttttctaattgtaaaagacataaaaatgtactatcctacccattacaggtacagttccattttgagcaatagccaccccattctgtggactctagggcttctcggcacactctgaatgagttgctgtcaccagcagccccctactttgttcctatgtgtctgtacaaagccactgtgaagtggatttttttttcaagtggctaatttcacttcccacactatcctcaaggtttattcttcttgtaccaggtgaccaggttttcttctttgagattgtgtaattatgtcgtatgcacccattcacccattgtggatagctggatatttggggcttctctgtcttagctacagtgaatgtgatgaaggtggatatgtagatatctcttcatgatgctaatttctgtgtgtgcctacctgtcacccacctctatccatatccatctggcatccaccaatgcatctatctgttcatctgtctatgtatctatcatctatgtaccacctatcgtctatctagtctatatatgttatctatctcatctatctgtctatctatgtatctatctatttatctatctatgcatctacctatcgtctatctatctagagagagaaagagatgcagtaggattctattataaacatttttttttttttttggtttttcgagacagggtttctctgtgtatctttggagcctatcctggcacttgctctggagaccaggctggccttgaactcgtagagatccatctgcttctgcctcccgagtgctgggattaaaggcgtgcgccaccaccgcccggctctattataaacatttttgcagcacctccacacaactttccatacagtttcactattttatattattaccaatagcacacaaggttgctagtcctccaccgtcgccaactctagttactggctttccccacccgtgttcatcctgatggaccattggtaatattgtggtttcaatctgtgcaaatcttgttgtcttttgtatatattctttggagaaatgtgtgttcaggtcctctgaccacattttgagttcattgtgtttctaaatttttatttttatgtgtatgagtattttcctgcatgtctgtgtattccatgcatgcaatacccaatgaagccacctggggatcacggaactagacttacagatggttgtgggctgccttgaaggtgccggatcaaacctgatttctcaggaagagcagccagtgatctgaactgctgagccatctctccagccctctttttattttgaatgctttgatctgtgggagcacaggtgtgtgccgccaaagcctgctgatccttataattcttgatgcctgtgttcacacagctgtggtgtgttcacacatcttgtaggctggtcctttttaagagattggagaagacaaaacactaaaaataacactagcagtgactgtgaccaagcaaggcaggaaaacagcttcagacttagggtttttcagtcacctaagttcacagaaataccaattaaaaagtcactgtggcctgttttgaccgatttgtttttttcccatgtagcccaggatagccttttcccatgtagcccaggatagccttttcccatgtagcccaggatggccttttcccatgtaactcaggatggccttttcccatgtagcccaggatggccttttcccatgtagcccaggatggccttttcccaagtagcccaggatggcttttagctcagtctgctactaaagatgaccttgaacttctgatcttcctgcttttctttctggtgttgctgttacaggcctggtccatcatgccagactggctgttccttatagcgcatgctatgtatgtgctgctgaagaacagagccatcgtaaacatagttttttcatcaaaaagaacggtaaagagccgggtgctggtggcgcacgcctttaatcccagcactcgggaggcagaggcaggtggatctctgtgagtttgagaccagcctggtttacagaactagttccaggacagcctccaaagccacagacactgtggcaggagaatgggaaatttgaagccagcctgggctacagtgtgactgtcaggagagagggatgtaacatccacagtggtctcgggctgtgccatccgtgtctgatgggattgctttagaagcacacacatcaggacaggttgacagagtgcagggccctgccgcactccccacaggatcatccgtgataggttgggaacagctcatccggctcaccaaggcttctccttctgcatgactggggagtggctggctcctccagcctgcaatcctctcattcgtgggatgtagagaccggaggctcgtctcctgggctcagcaagtaaataaatagaaaaaaaaattaaaaacaacaaaattcccccacaattttagggtcagaatagagacagcttcccaaatagaacacactgaacaaacagtggatgacccttttgcccacgcacccacgttgtctttgtattttcagaccaaggaaaagaaaactggctggcgtttggggaaaacaaacttaaaacggctttctcttttacctctataattagacagtctacaaataacgctgaaagcccagcaggattgggactttaactacggagtggactaatgactgtgatagcttaaggggaaaaaacactatggccgttcccagctatgaaccggtccaatcttacaaaaacagaaccggggtttctaagatgtgggggctgcctggagtcagacaagaggctgtccttgctttccggggcagaggcagacatgtgtagcaggctgcctaacatgggtcatgttcagtgtgagccaggctggcatgctcatgagctccctgtaagctttccattcagggaccactcgccgtgttgaggtcaccatgaccacagtctagtggttctgagtcagcactgtgagcatctgagacagtcctgctgtgcacctagagggagcggccactagatgccatcggcaactcagtgtggagaccaaaactgtgtctatggactgactgcctggaaccctgagtgccccaaaggagggtcaccctaggctgtgacggtttcactttcctttgtggaacaaggaaggtgggggaagaggaagcgtgacaccctccccacccctcccctcaccccctcacccatacactgttgtcctccatggagacctaggctctggtggctctcggccctgcccaccagctccctgggtggttggtgtctgaggtcgtgattcttgctctgataggagggaggccaggagcctctcaggccagaccaactcagtgacagtgggtcaggtcacgcccctctccccccacccgcacacgcaccccttcctgcaatggccagtttggcacagcctgggaagaaaggctcagggaggaatcgtcctgaccgggttggcccacggtgtctctgaggtgtcttcatagttagctgaggaggaggcacctgcctgagtggacacacccgtcctgagcacatgcacacaagcacgcattcatctccctgctcctgacacggctgtggcgggactctgacgttctgccttgacttcctcaccatgagggacgtcacctgctctgcatggtgagttcaagccagccagggctccctggcaagacatgttctcagaaaaaccagccagtccattgatacatacagccagctgtcaccactgtgtcacttcccctgacatgtgacacttcccctgacatgtgtcacttcccctgacatgtgacacttcccctgacgtgtgtcacttcccctgacgtgtgacacttcccctgacatgtgtcacttcccctgacgtgtgtcacttcccctgacgtgtgacacttcccctgacatgtgtcacttcccctgacgtgtgtcacttcccctgacgtgtgacacttcccctgacatgtgtcacttcccctgacgtgtgtcacttcccctgacgtgtgacacttcccctgacatgtgtcacttcccctgacgtgtgtcacttcccctgacgtgtgacacttcccctgacatgtgtcacttcccctgacgtgtgtcacttcccctgacgtgtgacacttcccctgacatgtgtcacttcccctgacgtgtgtcacttcccctgacgtgtgacacttcccctgacatgtgtcacttcccctgacgtgtgtcacttcccctgacgtgtgacacttcccctgacatgtgtcacttcccctgacgtgtgtcacttcccctgacgtgtgacacttcccctgacatgtgtcacttcccctgacgtgtgtcacttcccctgacgtgtgacacttcccctgacatgtgtcacttcccctgacgtgtgtcacttcccctgacgtgtgacacttcccctgacatgtgtcacttcccctgacgtgtgtcacttcccctgacgtgtgacacttcccctgacatgtgtcacttcccctgacgtgtgtcacttcccctgacgtgtgacacttcccctgacatgtgtcacttcccctgacgtgtgtcacttcccctgacgtgtgacacttcccctgacatgtgtcacttcccctgacgtgtgtcacttcccctgacgtgtgacacttcccctgacgtgtgtcacttcccctgacatgtgacacttcccctgacatgtgtgacttcccctgacatgtgacacttcccgtgacatgtgtcacttcccctgacgtgtgacacttcccgtgacatgtgtcactccccctgacgtgtgacacttcccctgaaatgtgtcacttcccctgacgtgtgacacttcccctgacgtgtgtcacttcccctgacgtgtgacacttcccctgacgtgtgtcacttcccctgacgtgtgacacttcccctgacgtgtgacacttcccctgacgtgtgtcactccccctgacgtgtgtcccctgacgtgtgacacttcccctgacatgtgacacttcccgtgacgtgtgacacttgacctgaacatgtgacacttcccctgacatgtgtcacttcccctgacgtgtgtcacttcccctgacgtgtgacacttcccctgacgtgtgtcacttcccctgacatgtgacacttcccctgacgtgtgtcacttccctcacttcacctgaacatgtgacacgcggtcctgttctgaggcagcagcagcagcgaggaacagcacaggtcatagggtcccagctcctttgcggttcctgccaccccacagctctcctgaccagcagtgtcagcgtggcctggtgtgagccccacacagcgggtgccatgtacacagagcaaagtgctcaggcccctcctcaccatggctgcaaccagggccggaccccttgaacaagagagccaacgtcagccacgcctggcccagtaggggcgccacactcactgagggtagacagagtgcaccccacactctgctgtcttcacgagtgtccccacttgtgagccctgcggggacatgatgtgcaaactcaccgcgtcaggatttctgacatcacagcaggagctcagaacagccacacacgagcagacacacggtaactacgagggtcctgcccgtcccccggtctccaaggcagagactttggagcttggccaatgctgcttgtgaactacggccgtcttgagtctgtgaccactccccatcctgctttcctctggctgcaggaaagcaaaagcaaagaaaaatggagagtggaaccgaaattaacgttttctctttgtgtcagaacggcggactgcttgatctctagacagcatgcttgcgtgtccgtttaaccttcgccacagcctttgtatgaagtggattggcaaatgaactattttttcatttatctgtttgtttccattgtagcctgggctggccttgagctggctatacagctaagatgaccgtcaggttctgatctctcctttcctctatctcccaggtgctcaccgccgtgcccaggtcacggggtcggaacccagggcttcacgcttgctagccagcacagcacctaccgaccgagttacagcccaaggctgacaggtgaactttggacagaagagtctgcttagcatgaccagatgtagggtagcgtttgcatccaggaagattttctggtctttctgacccttcaccttgaagacctaagattgtcccagatcccggctgctctgcaaggtttttatgggtcaggcagccgcgccactccatctgaagttatattcagatgattataattagtgtccgccctcacaagcagaggctgctgctgctgggtgagccgtgagggtcgtaaagatatttcttgtaacttcaatcaaagccgatggctctctgcacaaacatttggatgaggaggcgttctgtgctctgggcctccagaggcagccagctttcgattgcaaagacattcccagagggcagaaagttgtggcatcagttgtgcccaggacagggggtgctggtggaaggttccagtcaacacagtgagtgtgtgaaagccccccccctctctgcttccctgtgggggacttttcctcacctttaaagcacctttgtctcagatggagttacacattgtgtctgaggagttacttaaagaacagagagatttaataaagccactgagcagtcaggcactgtggtgcacacctgtgagcccagcactcaggaggctgaggcaggagggttgctgggagggtcagtccacctaggctacatagtgagaccctgtcttaataaataaaatgcaggcactatgtatggtggaacactcctatattcccagcatttgggaaatggaagcaggaaaatcaggaattcaaagtcatccttggctacatagtgagtttgaggccggcttgatctacgtaaggccctgtgtcaaataaataagttataatataatataagtcaaccaagtaatccattggcaacacaaaccctgtcactcttggctttattcattgtcactaaggttctctggcctcccactgctcccataacagaaccacaggagtttatgaagccagcacttcccccataaacaaccaagaggagattctccttcttggcttcagtgccttgctacctatgtctaaaatctctagcccaaactggacgtggttgtatatgccttggaggccaaggcaaggagacctcaaattaaaggccagtctggaatattcaaaaagacccaataaaaaccaaagccaaaacctctcgagccatatcacacttgcagagatttcaaagctcagagcagggcccttgccagcctttctccctctcattcgtctttcagttttaggtcacggtcatgactcctaccaggacagcttcccctcagccgaccttaccgaaagtgctgttgttatctctgggagccacgaggagaagtgtggggttaagctgggtctcacaggcccatggaggtcattgccctggaagccagcctgtttgtcctgtgctgagggtcataactggtgtcctgctctgacttggccttctgatgtgtgatgggtatcccacttgtgaacttgccctgtggggacttcagaaagtagcagagggggtccttcactgctgaggaggatgctgtgtaaacaaacatttgtttgtcatcccaagtcttcttggaaatcgttcttcaaaggcagtagattagcatgagccaaggttctcagagaaagctctgccaggcacagcagagtcacaggcagggatgatcccctaattagttaggcactgtgagataatctcaccaggctggtgagatggctcagtggatgaaggcgcctgccaccaagactgacaacccgagtttgattcgctccccaggggctgcccccatatgagtaacgttgcatgagcttgtcccctccatatagacaccgaccatacaaatgtctgcgggagatgtgtggctccagagaagctgaatttcaaacacgaacgtgtcacataaatttgaggaaacaggagaaagttaaggtgtcatgagcttggtctttgtaggtaaaatggctttcctggctttgtatgctcagtgctacaaaagtgcctcctgaaaaggcatcacccccatggagacatttcctcggggaagtgaaggaggagctgtagaattttcctgagacattgctctgtctgaaggggttcttgattttggtagactccaaactgccaggccagtccttcgtcgtcttctctcctgtggatgacagaggcacgaacacaaacacgcctgtctttgtttcatcaccattgtccgggctttgtcattttgggttctccttttagacattcagaagcagtcagttctctcctctgttctttccacctcctagatggtggtccctggggagctgcagggtcggggcccctgtgcccctctgctcacattgtcatccgcggatcaacccatagccttggtttatgtgtgctcctatttaaagacatattttgtatgtatgtatccagggctggtcttgaactcatgatgtagcccagaatgactttgaatttctgatcatcctgtttctgcctcccaaatgctggcatcacaggccagcaacaccacgcccggcttttaacattgttgattcattggccttgaactcagcagccagcaatgctgaagtttatctttgccttttcaccctgaaggacactagccagcagcccaaagctgcgcttccagatgcaaggctgcagaaaataacagatgtagaatctgaacagtgtggggtggggtggttgatgaggaataactaacaggtcacccttgtccttgtgcccggccatactctaccagggcacaagggctctctttttcagccttctcttctagatccttcctgggcctgtcttcctgagctggtatgttcttagtggaagcctctccctccccactgctagtatctagtcctctccacggccagtatttgtgagtcaagaagagctggatacagtaaatgcagtcctaataaagaagtcctaggttgggcagtggtggtgcacgcctttagtcccagcactcggaagccagaagcaggaggatctttgtgagttccaggccagccaggtctacagagtgaagtccaggacaggctccaaaactatacagagaaatcctgtctcagaaaacaaacaaacaacaacaaaagtcctagctggtgtggagcttgtagtttataaggaacccttcattttaagagaactaccgcaggacagggagggccctcagtaataaatttactcctcacatcttgttgtaggagggactcactagtttgagaatttggaattttcttcctaggcctgtggttataaactgggccctggagtttgatgtcagtggcctcagagcccactctccctggacatttcaagataataccttgatgtctaaggagaagctgagacacctcaatgtcccaggagaggtaacgagtctggcccaggtactcaggtaggtgaggctctggagctgaacttccagcgtgtccctggcctcagagcacagcgtctagaaactgtgtgaatgggagagtcatcccatgacattcttcctacgtggccaggattctgtagcatggttatccagtctgaaaagagagttctaaccagaccctgcccagaaaaagctgcttcccctctgggcttccgtggctgtctgcaagctctgaaaatcttcacattagcctaaagcccggctagagaatagagctctgctcatacgtatctccttaaaaaagtcacagatattcaaacatcaaagagaaaggctgactggagcagttcccccaccccaccctgctgcctgcctcatggaaatgaactgaacagcaggaagcaggagtgagaggaaaccgggtgagggttggctgcacattctcccttcccccaagccctgtgggtctgacagccgtgacttctgggctccctctgcctccctccccagggagacacagccgagcaaggatggaaactgtcgtaggaagccagaagaagcttgcctcttcttatttaatgttcattttagtctgtttttgacacctgtttcccccaattgcagaaggtgttaagctcatcatgaagatacccgacctcctgagagggttagtaacaatagataacgtaactttctgtgtgtgtgtgtgtgtgtgtatgtgtgtggtgtatctgtttcatatgcaccggtactctcagaggccctgagggagcaccagagttcctagagggatgcttgtgagctgcccaacacagatctggaaacaggactcactttgtattattcactttgtatattcactttgtatgggtgagtatgtgtgagcatacatgccacagcatgtgtgtggaggtcagaggacaatttgtgggagttggttctcttctcccatcatgtggatgcaggaaattggattcaagtcatcaggcaagtgccttaattggctgagccatcttgctggccctgggtagggtttttgttgttggttttagtctttttaaggcatggttttgccatgtgatccagggtgacctcaagctcatgtatagcccaggctggactcactttcagtctccctgcttccctgagtgttgcggggtcaggcatgtgctccatgctcagccagggtgagtgtgtgcggccagtttctcttaaccaaatctactgtaggttattttgttccagttatcatagtcaaagctggagttgcgccaaaagaaggcgcagcggggttcctgcaggaaaatgtgtggaagcttctggagagggggctgggtggagaaatagcgagtgagagttgtgggccttcgtgaagagagcaaggggagtcctgaagcacgtcttagccacagctgcacacacagtcttggagggctctggggcagcagtggcggaccgctgagccccgggtgattctgcccacatgagccgcctccacccagaagtctctgttctgaagctccctgttcactggcaaatattccgtctctcagcatcctggtccaggggctcctggtaccctcactaggtccccctcctttggcaggtggcattccccacagacctcttcagtgtcgtcattctcgtaattctgtctcaaagtcccctccctgagaatggagatttattgtgttgtatcttattttgagaaagagcaaaatatatagttcagactagcttttagcttgccccggcatcccaagtgctgggattctagacaagagacacagcaactagaggtgacatttcttctttctttcttttcttttcttttcttttcttttttttttttttttcgagactcgatttctctgtataacatttggagcctgtcctggaactcactctgtagaccaagctggccttgaactcacagagatccacctgcctctgcctctcaagtgttgggattaaaggtgtgtgccacacctagaggtgacatttctttgttgcatgggaatcaagattcactagacccagtacatgataaaggaggtttatttgcagagattacacttacacaagaggcaggtggctgtcacaggttccagctccaaggatcctcccagaccagcattgagagctcgtgcatcccaaagccagcctaaatcctcccctcctgtacacaactgtgaccacgcccaaacaggcaaggtcagtgccacaggtgctgagttagatctctctctacatttctttctttcttttaaaagatgtatttatttattatctatacagtgttctgcctgcaagtttgcctgaaggccagaagagggcaccaggtctcattacagatggttgtgagccacatatggttgctgggaattgaactcaggacctcaggaagagcagccagtgcccttaacctcaaagccatttctctagcccccgaggtgacatttcttatccatctgtcatatatctgtgtgtactcgacggttttgtgtgtcaacttgacaccagctagagtcattagaggaaggagtctcagctgaggaaatgcctccagagatccagctctaaggcattttctcatttagtgatcaacgggggagggcccagcccatgatgggtggtgctatccctgggttgctggtcctgggttctataagaaagcaggctgagcaagccatgggaggccagcaagctgcttcccttcatggcctgtgcatcagttcctgactctgggatcctgccctgtttgagttcctgtcctgcctttctttgatgcggaagtgtaagccaaattaaccctttcctctccagcttgcctttgggccgtgtattttcccacagcaatagaaaccctaagacactgcgtatgtatctactgtctatctgtcatctattaagtttgttaattattactgtgatcaaatacctggcaggagacagcgtaatggggatggggcttattttggcttacagtttaggaaaatacggtccatcatgatgaaactgtggcaggactatgaggctgctggttgcgttgcatctttatttgggaaccagcaagagatgagtggtacttagcttggttgtttttatccagcacttagcccgtaggacagtgctacctacacacaggatgggccttcctccttcagctaaacctttctggaagtaccctcagagacccccaggtgatggacactcgcccatcactcagatgtgtgtttccatggtgatgctaagcctcatggtgttgacaatgaagagagatagttaccgcactgtctacccatctgtctgtggatccagacagtaggtgtgtggacaggactgggtcttagaaacaggagcagtcgcagcacgaggcaaacaagaaggaaagaggggagaccacatggtattggctgtgtgacttctccagggaaatcaaaataacccatgtctattcacccaagataaagaggacacccacagaccaaggcaagattgtggtggtatttatttatgacttattaaagcttgcctgaaggttcagaaagcaaagtcagacacaagccatagaagccaggcacacacctctaatcctaggacttgggattaagaggtagacagatctctgctagttcaaggcaacactgactacatgaaatagatccagtgctaagagaaacagctcacacaaagatgatctcagcacttggtatcacatgcctttaatctcagcactatcgaggcgtaaaagacaggaacagggtcttcagtaggctcagactccggattctccagccactctggggagaggcagcagtctgaggcttggtggagagcttgtggaccagccctatcagcaggagctagaggtggcagccagtggccaactgcttttctttcctgatcttcagcttgaagcttgaaccccaatatcagcctctgggtcttttatttatcatgctacacaggattccatccaagggtgacttggtgaaccagtgagctcgttcatgttacttcaggagcatgggtaattcttgggcagctgtaccaccatgaagtcctatactccacatgtgcagctcacataaaactgaaccttgaagaggcaaaccaaaaacaattgcctgtcttttacataaccacagggagaatctcatgagggccttcaagcctcttctccctctgtgaaggaaagttaagaggacccatctcttgaaggtctcgtttgcttacagctgcttcgatccaagaggacaatagttgtgtccagccttgaagaaatagttacactagagggacaatattataatagtgtgaacttttaaaactccagtcatagcagacaacaccagtcagaggaacaggtgagtgacctgccagccagctgaactgccccactccctggatcaggtcccaaagacccaacccactgccccccctgtcccaccccatcccctccactgctgagaccccaactcaggtggacttctgctgcccaggaggaggtcacaccagtcagaagaacagataggtgacctcaggcagagactccttgctggaccacagaccacccctgcttccagaaccagagacaggcatcccaccagtggatcctccactcactcagagctccctatcccccaccccttcctcattaccccacaacttgaacagagacctcctgctgtaccaaagcccaagtttaccatcagaagtccagccccctatttggacagagactttctacttgaacagaggtcacaccagtcactaggaatccaggccacaaagacctgaagaccaaagaggaaacagaaaccaaggaacaaaacacccatacaacaaagacaaactcagaaatcatcacctagacttacaatcaccccaagcccagattcgtgaacaccagtgtaagaacacaatcaaccacagccagggcaatatggcaccatgggagcccagcagtcctactacagcaagactattccagcacagctgaagcacaagaaaatgacttaaaaaccagctttatgaaaatgatagaggtccttaaagaggaaatgaaagaaaaaatcccttatagaaatggaggaatagagaaagaaaatatttggagtatatcaataaatcccttaaagagtgacaagaaagaaagccaagaagggaaaaaaaaacagataaaggaaatgaacattcatttcttaaaaatggaaatagacgcaataaagaaaacacaagccaaggaattctggaagtggaaaaatctagaaaagtggcaggaactacagacacaaccgtcactaacagactacaagagatggaagagaaaaatctcagatgctgatgatgcaaaagaggaaatagattcatgggtcaaagaaaacattaaatctaaaaaaattcctgatgcaaagcatccgggaaatttgggacaccatgagaagaccaaacctaagaatagtaggaatagaaaagggagaagaatcccagatcaaagacccagaaaatattttcaacaaaatcatagaagaaaaccttcctaccctaaagaaggatgtgcctacaaagatacaggaagcttacagaacaccaaatagattggaacagaaaagaatgttccctcagacataataatcaaagcacaaaacacacagaacaacaacaacaaaaaacattattaagagctgcaagggaaaaatctcaagtgtcatataaaggcagacctatcagagtcaacagacactctaaaattcagaaaggcccaaagagacagatgtgctgcagactctaagagaccgtggatgcccagactattatattcagtgaaactttcaatgaccatagatggagaaaacaatatatttcaatcaaatttaaacaatatatatccacaaatccagccctatagaaggtactaaaaggaaaatctcaacccaaggaggttacctacacccatgaaaacatagttaataaataatctcacaccagcaaaacccaaagaagggaaacacacacacacacacacacacacacacacacacacacacacacacactaccaccaccaaaataacaggaattaacaatcattggtttttgatatatcaatggactcaattccccactaaaaagacaagggctaacagaatggatgtgaaaacaggatccatccttctgctgcatacaagaaacacatctaaatatcaaaggtagacattacctcagagtaaaagattttcccaagtgaatggaccaaagaagcaagctagtgtaactatgctaatatctaacaaaatagacttcaaaccaaaataaattaaaagagatgaagaaatcatctcatgctcatcaaaggtagaatccaccaaaatgatgtttcattttttgacattcatgccccaaatgcaaaggcacccacatttgtagaagaaacattactaaagcgtaaactatacatcaaacctcacacagtaacgggagacttcgttaccccactttcaccagtggacagttcatccagacaaaaactaaatgggtggtgggggcggggagtgcagtaatttaactagctgtacattcatccaattatttttttaatctccaagtttgtgtttctccagggtaaccctgaggtcatattaagaccttgtcgcgtggccttagagatgctgatatgtgctgtcactagagttccctggtatatcaaaaaataactaacacaaaagaaaataaaaggagtctcagggggcttgtcagggaaaactgacctctgtgcccaggcatctctgctgccttttccagcagcttcctcttctagacccctgagtcctgtagcttgccacggttagacgtgccttgtacagaaacctctcatctacaccatggtaacttggttgtctcctgacgggggaggtccttctgtgtatgtgtttgtcttattggttgataaataaagcactgttggccaatagggaagcaagttaggcaggactaggagagaaggaggattctgggaaatgtagcaaagaggagagtcaccatgtgatcccaggaagagaggacgcataaggctggagtcctgggtaagataagtccttataaaaacatatagattagtagttatggttgataattaagactgagctaacaaataagaaatcctagtcattagccagcagcatcgtaactaatataagactctgtgtgttatttgggggccctaaagcggaggtagaacccaggcggctggcggaaagagttatcgttacagtctccctgtcccctgcctttctgaaacctggactgttgtagctctcccgtttcactcttgttgcttcactgttataggtcttcagtgtgtgtgttcttacttttccttctcctagagcatactagatacttactatctttgtatatagttttgtatcaagcctgaatctcgttctttagactaaaagggaaattgtagtgagagatccactcaccctcacctgtggcgctgaccatgcctgtttgggcatagtcacaggtgtgtaagggagcgtgtggtatttggtctgaggtccgggacagggtctctctctcttggctccggctgggtcacagagagcagcctggatgtgggtccttggagctgcagcttgcaggtctcctgtttcttatataagtgacttctccctgaataaacttaacctacatttaaccaagtcccgtgtatctaatctgtgcttctacagactgtagaaaaaagtcttaaaaatttcaaccaccctaaatagccccccactatgtgtgtgtgtgttggggtgtgtgaatgtgtgtgtggatcactgagagggggctacgggagaatgttggggtgtcctgctttaccactttctgtcttgttcctctgagacagagttgttcactgaacctagaatgaggctggtgagcaggaagccccagtgaccttcctagctctgcccctcacagtattggctactggtatgcaaaactatggataggttttcactcgggtgctgggatttgaactcagatcctcattcttgcacagcaagcactcttaccaaccaagccatcccccacggccactttttacaatttttatttttatttcattgcgctgttgttttgcctgcatgtatgtctgtgtgagggtattgggtcccctggaactagatttgcagacagctgtgagctgccatgtgggtgctgggaattgaacttgggtcctctgaaagagtagtcagtgctcttaacagctgagccactgccctatcccacagtagtcgcttttaatcttggaagaacataaccctaaccctaaccctaaccctaattcttaagtaattgtgtccccatgactttcattcctgtttaagttaaagggataactgacttacaaatgagtaaaaggcaccaaaattgtaccaaaaaaaaaaaaagctaaaactaaaactaaaatcaacaacaataaaaccccccccaaaaccctatcatctcttcatcaaaccccgcctaagtttcagcttctgaccttggcgtatcctccgtattcttcatttacttgtcagttatttgacttgagtcccatttactgtgggaaaatcttcacaagcattagcaaagccaccgatcccacgcagcttaccgtccccctacactcctgcagtgtctggtaggccatccatctcattaggcaacactagcatgttagtcctgtctttctaagtggtgggcagagctggtcttggcatcgaattgttacctgccttacttagcactctgtccttaaatccaagaagctcattagtatccgaaaacagagatgaggagacgattgccactaactaagggaattcaaccgagatttcattcctaaatacgtgatggggtgggcactatttgccctgatttttctcctatgtgctagaaatttctacagctctgacgctgacataactcttcttagagttgattgtataaaggaacttccacatcttggctctctcctaacattcaggatgggacttctcccccattttctgaacccagtctccttaagaacggtaagtgaccttgtttactaatgggatgaaagcaggggcttcccagatgtgtcgggagaatccattcttcctggtggtcaggctgtcacttctcagtgccggcagtggtccacgatccatccatgtacatcttgtaggatgccagagcagactttctaatgtcgagacctcattattaaagcaccaggatcccctaaaccagggtctgtctaaaggagtccttgtgtgtggaaaggacatgggaaatgaagagggtaaatgctcatgttttgaaccgaggaaggctgcaaaggcgttgtttggtagtggtgagccctgtcagctggccttgatcagtgccatagcttagcagtggatcacacggggagccagcaggacagaagacagctgctggggctcacgtgttttggagtcaacaagaaatgccaagaagttttgctgagtaacagtgagaaactgggtgtggtggctcatgcctacaatctcaatgcttgagagcttgaggcaggaggattgccatgagttcaaggtcactctgagctataaagttttcttgcccagaaaaacagaacaaaaacaaggaaattatgtgtgctgggtgttaggtccttccgtgggtattcggcttcccgtaaaagatggctggaagtgacagagggagttgtaaacttggcactgaagtcccgggaaagggaagtgtgtcgttcaagaatgtagttagaggaagtgtgggcttcgggggacaggaggggacagaaccgtggcttgcaaccatggcttgcaaggtcaaccgttctgttgagtggagagagctgtagctcagctctcccggtggcaggtttgagcgcctgtgaggaagtcagaggctccatggtaaaggacagtgggagctgacactggggttgaaaggggaggggggcgggggagctgaggttagagcacatcccaggtctctgtgtgtgaggccagttgatggatgaggagagggctctagccctagaagagaaaccacgaggctaagaggcaagctggtcagagacaggcctggacactgctgtcttccttctcaggagagggagttaagagcttcgcatgctgggttccaagtagaatgtcagagggaacaggcccaactgcaaaccttcctgccctggatgtggccacactgctaggcccctgtgcctcaggtgctagggaacacaggctctatcgaacagcccagggaaacaagcgctgcctcccgggactctgaggtacaaatgatggcaagattaggaaggacaagagtatgggtcactccatgctctgtttcatagctgtgctgcctcatcaaagccctgattattcaaatcatgcttggcaaatttctgagatcccaaattatccatcgaaagggctctgaagagggtaattagggttgggggggtggctatcgaataatccctcacaagtcaactgtcttctaatgttgtcgatcagttcctttcattgaaacacttttttttttttcaaagtgataattctaaatttttggtggtagatggagaaaggaagaagggctggaggtcaacagtaaaaacaaagaatggggtacagggaagagagggagcgcttttaatgagaatgagtgcttccaaactttcccgtgcacaggaaccacctggccttgttgaaatgaagacactgatccggtggagctggggagggcagagattctgtgtgttcagcaagcaccgggctcatgagcctctgtcacagaccatgcttagagtggtgtgcttcttcccgctggacggagacgtacaagttagctttagaaagtgggctgcctcggaggtcagcaggccgttttcaaacctaggaaagcagagtgggcatcaggttcatgttcacagacatctgtgaagctgtgaaaccaaaagctgaagtctcgcttatatcatatcttagcaatggaactttgggcaaatcgtgggccattgctgactctgaatcccttgatttaaaaagtagaaatggttaggacctgccttgtgtactgcccgcagggtaaagatataatgaaatcatgtaacaaatgtgcccaggtaaccaaagcgcctccagtgtgtaaccaatgctattatcgcttccactgtgctatgtgaagttgaggaaacctcccctttctgtgtgtgtgcacacctgggtgtgcagatgtgtgtttgccacccactctagttctttaaaatcaatcaattaatatttatgcacgtgaccattttccctggtgtgcacgtagaagtcaaaggacaagtaggaatcagttctctccttcaagcgtttgggttctggggatgaactccggtcatcaggctgggcagcaggtgccttcacccgctgagccctcttgatggccgtggtggtttgaaagaaaatggcccacaaagggaggggcactattaggaggcatagttttgttggagtaggtgtggctttggtggaggaagtgtgtcactgtggaggcgggatttgaggtctcatatatgctcaagccacgcccagtaacacttcctgttgcctacaagccaagattttggacactgggctacttcaccagcaccatgtctgcctgcaggccaccatgtttcacaccgtgtgataatggactaaacctctgaactgtgagccaccccaattaaatgttttccttttgtaagagttgcggtggtcatggtgtctcttcacagcgattgaaaccctaactgagacaatggttcccactttattctttttgagactgagtttctcactgatctggaggtctggattcagtaggctgggttgaatggccagcaagacccagagatctgcctgtctctgtgctaacagaaccatctccacatcacctccttacagcttttcacaggtgtttctgtcaccctcctctgcctgtttgttttgtggatcattggttgttttgagacaaggtctcatgctgtagccccagctggcctggaactcactatgtagcctgagctggcctcaaactgatggtcatccccctgtcacagcctcccaagtgttgggagtctggatacaaaccacgggtaccttctttccacttcttctcaggcaccctccccttccatgagattctttgctctccagtgagctcacctggctggaggtaagagctgggctcacacacacagctgccagcttggcagtgtgggaaacaggccacattctccaaggaagaattagctacaggtgaggagacactgctgatcccattgacagccctcctgctattgtccttgcagtgctgaagtaatggctgtcacacctgagatgtccctgcagatgaggacagctgtgaagggacaacaagtgactgggaagaacaatgaccttctccaaagtgtcagtgtggctgaagatgtggagtaagtcagggacctagagacttcctggggccagcaggaggcagataatgagatatttcaagttcagggtcatctaattttaactatcaaccgaagtagccttatgaggcgtccatgctgcctctggccagaatgaggcctcatcaggcagaacgggcaagccttggatttccatttgggaaactggttgtttcatgttcattacttcacggctcccttatccatagctgctaaagatatagccgtttggaatgcatagttacagcaccttggttacataatcgtgcatccatcagtgatggaattgggtccttaaacaggccaaagggcacctcctgttgctgttggtttaagatagtgtctcactgtgcagccctggctgatctggaactccttaagtaggccaggctggccttggattcagagaggtcggcttgcttctgccccccaagtgcagggattaaggataattcgcataagtgtatagatgccatgtgtgtatgtgtgagtatttgttactcttctctcactgacaaagcacagtttatagaaggaggagtttgctgggctcacggttccagaaggtgaatccatggtggtgcagctcaggcagcaggtgatagatgtgccttgaaccaaaagcacaaagcagagagagcaaactggaaatggccagagtattgaactctcaaagctcacctccagcctcatactcctccaacactcctaaatcttccagacagcaccatcaattaggaccatgtagccaaatgtctgagactatggggacatctcattcaacccaccagagcagcctaggtgtgaagtgtccccagcccatttctgggctcagggtccacagacatggaatgacttactaaagacatacattgtaaggtggctgtgattcagtttttaaaaatgagtatatgtgtcacatatatgcagttggtaaaataataacagcttagtaggagatgggcagagggctctaagactgttgtaacacaggagagaagaggactgggctgtgaacatacagacacaggaactccctgtccctgtgctcgcatgtacacacagcacacagacacgggaattgcctgtcactgtgctggcacacacacacacacaccagataaaaattgttatgcttccccaacatagtcacgtatgtggagcaggccttatgtactagtatgacttcagaaagattattacaaagggaattcaaagttcagacttaaagtatataaatatgcccatatttatacagacctatagaagcttgcatgcttggcatgctttctgtggaagaataaagagtaaagaacaaaggacagtgtggatggactaaatatttagagctgtcatggtttaaatgtggcttcttgtgacggtgctgtcttgggggactgtggggcctttgtgaggcccagcgggaggaagtaggccactggagagtgagctttggagatgggagctgggtccttttctctctgggtgatctgtgcttcctggctgctgactggatgagagcaggcatctgatctgtgcttcctggctgctgactggatgagagcaggcatccttaagctacccctccctatgccttcttcaccaccgtgggcggttccctcactgctcagttccaggagctggccatggctatgagaaaggtaacccctgtgtcttagtttcttttccggttgctgcagttaaataacagcgacaataaaagcaatccctgacagaaagggttttttcttggctcacaattcaaggcacagttggtcttgccgggtaaatcaaggcactggaagactgaagcagctggtcccattgcacccctaccacaagagacagagagccgtgaattcacacatctgttcagttccttttctctgtttatataattccagaatcccagccaggggagggtgccgcccgcaatgggagggtctttgcgtcccaacccattgagtcaagatagtgctactcagtcgcgcccacctccgtgtttagactctgatttttgattctgtcatgttgacggtactgtcacatagtacaagaggccaccacagacctggtcctctttgactaatcactctgtagaacctgagtttttgaggctctactctttgctgtttgtttattgtttatctctcccacacttttatatgtgtaaatacgaatagcagcaatttggaatctcattgttaagaaatttatggattcggccaggtgttggtggcgcacgcctttaaacccagcactcaggaggcagaggcaggcggatctctgtgagtgcgggaccagcctggtctacaagagcgagttgcagggcagcctccaaaaccacagagaaaccctgtcttgaaaaaaaatatggattcagccaacaaatatttatgcagttcttctatttctcttttgcaaaagtcagtagagggtagcacgtgtccctggggctgggggttgtctctcaggtctccgttaacagaggaccaacctaaactcctatggtacagtaacacctgtgtttgctttgtgtcctttgcatttgctaagggaaattgtcaaaatggagcaaacctcggacagaccagatgaaaaagatgaatttcctgaaaacccgcagacggattcccttcacaaggtggactctgaagaatgggtaagcaaagctgggcctgatgaagtgtgcttgtaatcccagcctgtggaggggaagatgggagaatcaggaggcgctcaaagtcagccttgggtgtaacggaccccaaacgcaagcagacaaaaagccaaaggaggtagagagacgcaaatatcatagcaggcagagaaataacctcacctgcgcctcaaaggaggaagaaaatgcccagggctttcccttgtaggtggagcactgagactgagaggcgggcctggcactgtttcccacactgctgtctacacccgggggtcttcccagcttcccgacaccccgtctgtgtgtgttctgtgctgtctttgtctgtgaggatcagttacaactggcataggttaccttagagcagatgttacatgtaaaatcatcccctgcttgtagaaaggcttccaacagaatgtgttcatccaacctcgatttcatctccagggggacccccctcctctccctggtggtgccaaccccctatccccctgccccccgcttgccctggctggcgctgcagtttctgtcaccatctccctgcactgttcccactgctatgccttctcctctgtctcacattagggtcttcttgctgggtttgggagctgcccagattatctacgatgatctgattgcaagctcttataactcaacgacaaagtctacacaggcttttgtccaaacaaagcggcatgaaccgtgctgggacatgggcagatgttcttggtgccagctgtcagtctcctgtgttacatgaacttggtcgagccacctgctctcaggctgagagcatttccaacctgcccgagtcccctcaagtctacttgaggatgcagactccgctttctgacgggttagcgctgaggcgtgctcctgtggcctcggctggggtttatgcaggtgtcttggtaaggaacgccctcctgcccaccccatgcttttcagtttaagatttgtcttattgaggcacaggagttttgcttaaaatctccccaaagaactattttacagtagagttaaaaaaaaaaaaacctcacgggtgttctgacataaattattgtcattttttggtaattttttgcatgtatatacagttgaaatgccagagaatgactttaatataaaaaaaaaaagcaaaaagaaaaaaggagagacaggagaaacaagaaggaaggaattttatttactaaatacaatagagtaaggctctttctctcaaaccctaaccctgaaataaataaggagagaacacagaagcacaatgaccagccatgctcctccagccacaccttaaaacagtcaacagccacggcattcactttatctctgcatgtataaatagctgcaatttgctgagccatttaaaagtaggacaaacacaacagtttgtccctgttgccttcagaaagcctctctaaaaataaagattgtttcctacgtatccaaaatactgtcatcacatctagagaaattagcagtttagcacataaaggagtctaagcttctcatctcagtattccagttttcctcaactatgcctcaaatgtttttagagctagtcatttttaaagattcatttgtgtaatttttttgtcttgtttttcgagacagggtttctctatagctttggaggctgtcctggaactcgctctgtagaccagggtggccttgaactcacagagatccacctcctctgcctccttctatgccatgcgcttagttttcacagctcagtatattgtcttactatgagacttgtactttgcttttttgtgaattgaggccccaccatttgttttgttgtgttgtggtcttgttatgtagcccaggctggcccagaactcattgtgtgccctaggctggtccagaactcactgtgtaagccagacgggcctcatactcatggaagtgtgtcctaccccactgtgggtcctggaggtacagatgtgcaccctggtctgtctggtgttgagtttttgaagagaccagaagagccgagtgtcctttgactcaagttttggagttcatggttggctgcatttctcctgttcacccagtccttcctgggaggctagtactggaaagcctgcccccaatctgctgcaagccaaacagaggccttgtttccttccctcatccacgcactagaaggccgggcctcagacaggctgtgtcaggtagggctggaggagccaggatctctctcaattacccatttgttccaccatcgttttatgcaggacaggttggagcaggactctaagcacagccaggacccaccgatcaatcaggatgagcaagaagcaactcttgtttgtgcagaccctcgagtgtcactgtcacagttttcagagacgagcacccttgcaccgtaagctctgacatgaccccatggagagcactgggtaatatggggtagacgagcaagcttagtaaggaattcagagaaatcctgttgaaccacacagcatccacgtgtgtggggactggctgaccctgcccagcaaggctgaagagttaggcagccctggcctgaagatgctgacacagccatcaggtcttctgagtatccttggatttggagcttagaactgacaggcatctcaaaaagtctcagataactgcttatatatgaaattcaccctgatcattactaaaagcctgccattaagcccttgagtgctgcctcctgttgtacgcctctcctcccctggccgctatcctgacccaatagctaacattcattacatagagggagatttcaaatatatctgtttttagggctggggcaatagatcagtgatagggtacttgcttagcatgtgtgaggccctggggtcaacccctagcgttgagaaaaatataaatcactcttttaaaaaatagaaacgtttcagaaaaagtatgtgtgtgaatgttttgcctgtgtcatgtatgtatgtacactgcacacgtgcctgagcctggggagctcagaagaaggttcggatcctccacacctggagtttcggatggtttatgaaccaccatacggtgcttcgagtcaaacctagcttctgtgcaagagcaaggagtgcttgcaaccaattgagccaattctccagccccacataacactttcaaaggctgggcatggagctcccaggtagagtgcttgctttgcgcaaggcccggagttggactctcagaaacacgcatgcctattttgcaacattatttgctttacccaggcttttaaagacctgggtttacacagatacataaaataaatggccaccgtggcccatctccatggcaggaaacacatgtagagatcaacttnnnnnnnnnnnnnnnnnnnnnnnngctgtgtgagatgtttgcattgatcgggaccctgtttcctcaggccccccgagggctcggccctcaagctgagatactgggatgcaaagatgggtctacaaatgaaggaacttggagccgaccacgacaactggttggagaggatcaacaacattatacaaaggataaacaacacagagagtacagtgaagaggtaaaggctggatattgggacgggaaggaaagtggtgggatgtctcatggcttcgaggctcacaaaaccatctctcattcatcagtgtggcctcaagacaagaagcgcagcccagggttgcaagtccacatcccaggctcacatcccaggctcacatcccaggctcacatcccaggtctctcagtctctcagtggtttctcccacacactttttatttaaaactgagttatttatcaaaggggtgcacacagcatgctctcatttttacctatgtgtgtacgtgcatgtgggcacacacatgtatatatacgtatgtgtgtacatgcatgcaagcacagatgtccaggggatcagaggtatcagatcccggagcttgagttacaggcgtctgtgagccgccatgtggatgctgagaaaccaagttgtccttctgcagaaacagcatgtccttaactgctgagccatctttcccatgccaccccgaagggtctcttgttgcccaggctaacctcaaattctctgtgtatctgagcataattatgaactcctaataacccctgcctctacttacttccccattatggaatgtgctaccacagcctgtattctgctgggatttgaacccaggtcttgaagaatgctaggcaagcaccccattaactgagctacacctgccttagagagcctgagtcctgaaggcccacttgttgggcgaattaatcgacctttttaagggcttgcctttcctcatgtataaaaagttactaatggtgccctcatcactggctccattgagagggttcaagtgtgaggctggtacacagccactggttaacaaacagaagctcttattgggaatgagtgtctgaatgaagccttgaatttccagaccatgttccaacctctttcctagaacaagggtacggagctcctagctgtttcctctttactgtcgcaaagctgtctgtccattcacaccccatccaggtgggccttactgtcctccaaagcgttaaaagggaacccaagtcccacacactatgtattttctcttttaaagtataattatattacacgacaattatgttttttataatgtgaggtcctgtgagtttcacaaaagcttatagttataatactgacatgatgggggaagtacttctgtgtatgtttatcttattgattgtttaataaagttctgtttggccaatgaaacagcaggttagacaggactaggagtcaaagagaagtggtgatccaggcaggaagtgacatagcaaggggactcatatttcaagaaggagaaacaggaagcatccccttatccccctctgcacctcctccagcggcgggatgtgagccaccagcaaggagggacgccaataaggcttccgataagataagtcttataaaatacatagatttatgataattaagactgagctagcagatgggaatcctagtcattggccaagcagctttgtacctaatatgtctctgtattattttgtccatccacgcggcgggcagaacttggacagctggcggagaccacccatgtggtggtagggctcgggcggctttggcggaaagattgatcgtaacagaatggtgtcagagatcgggatgaccccatgccccaaggttcccagagaaagaggaaacctgcggccacagcctgccatgtcaggccgcataccttgacccatcacaaaatccattattctcttctttccttgcatttgttttaagactgtgtcttatatagcccaggctagcctgacacgcttgatcccccttgcctccatctcttgagtagggtttggtgtgtaccaccaagcccaacttgctactgagttgaagattcttgatacagtctggataaaaacccagattcccagtatttggatttttgaaacgtcactgtccgggctgtggccacagcgcagtgcctctcctgcacgagtccctaggtccagtcccttgcaccttcccttcccacacttttaacagcacctctcaaggagctgaggcgcgtctccttactgtgcccttctatgtagagtaacaacaatgtttcacttttgaaagacgggacacctctcccatgtcggatgactgttttctcaatccataggacttagtccatttcttcatctgtttgtagcctgttgactgaggtgatatccctggaaaaccagtctgaaagtttggaggaccctgacgaggaagcaaacattgaggtaagccgggttccgacttctgcctccacctccctcctcgggtgccaaacagatcttagccagagggagatgcacctccatcacaggggagctctggccactctgctaagccccttcctccaggggatactgcttcccttgttagacactaggaatcctggactctgccttgtattcctcctcgtaggcggctggctgtcttgacaccctcgtgaggatacctgcctgtctgactctcagaatcccagccctgctagttcagaggaaacatgtaggaaatgggaatctattaaccgtgtcctgagaaattaaggactaagctgactgtgcggcctctgatgccctcttgacatgttcttgtgttatttccaaacctccaaagtctcttatttctttatctctacgtgttcttagagattcttttcagagaaaaggttatttttttaattttttgatgtttgtttttaatttttattgtatttgtgcattgtatgtttgtgtatgtgtgtgcatgatatgtgtacacatgcgtgtatataatcatgcatgtgtgcatgtgtgagtgtggatgtgcatacgtggaggtcaatgacaacttgccaggttttctctttctaccttgtggggcccagggctgtaagtaggttggtggcaaatgctcttagctcctaagccatctcgtttggtctgattttaagatgtttttgttttgctttgaggcgaggatcttcttttaaacatgggttagtctggcgctcattatgtagactattgtgtaggtggagttttcctgtcctgacttctgcctccaaaataaacacacagagactcaatattaattataagtgcttggctgatagctcaggcttgttgctagctcactcgtccattttaaattaacccatttctattcatctaccatcccccacatggcgttacctctcttgcaactggcacctcctgtctggctctttcctctccatgtctggctggcaacttctcggactgtgcccttcttcttcccagtctccttagtctggttctctcgcctaacctaatcctgtccagctattggccagtcagcttctttattgaaccaatctcagggacatgcacagtgtaaaggcacactccacactaaccttgttagtttgtgctgacctggagctctcagcaagacagctgctccccagtgctgtgttgacagtggtgagtcaccacacccagggagatttgtaatttaagggggtgggggacttgagatcattggaaaggagaaggcgtggcacacatgtatgaaactgtgctggatctacgcattctgtgtgcccgctgagagcgaagcataccaaatgccacacatgagcgtaagtcccagaagccggtcaaatgcccaccggtcgatagacagataagataagccatatcttgtgggcacaagggaatgccatcctgaaataaaaaggaacaaactcttgactctcccaacagcatgagtgaactaagacacagcaggctctttgaaagacaccagctcagattgttacagactttacggtccatttatgtaacaaaaaggcaaaaccatggggacaggagatagacaggcagttgctggagctgaagggggaagggagggagcagttaagaaatgaccctgtaagtctgctgtcccagcacctgggagacagaagcagaggatcgggagttcaagctcacccccctgatagttcaactccttattaaaccacgtcactcaggggctggtaatgaactaaagcagtacaatacaagggtgaatctgtatcccaaatgtgaccacgtgctgctgaaggttgctggctgctcagggtggccagtgctgctgttacttatactggaccagcccaatgcctagctcaggggtcacctgtataggatgtggccaatcacaccttttaaaaaaagttttgtgtgtatatgtctgcctgtctgtctgtgtgttccatgcatgcagtgctcacagaggccctcagagggcaaggggtctcccggaacagcagtcacaggcagttgtgagccaccatgtaggtgccgggaatcaagagcagccagtgttttaaccactgggccatcactcttcaccgccacttgtatcttagaggcgtgattcgacgctgtcttttataaaccagcctttatgaggggaaacagctgtgaaatctggttttctgaccatgtgtttctcctgaaaactttcctccttcaattccatatgtcattccttctaacttgtgttgttcatccttgtgttataggagaagatcacagaaatccgaaagcaattaaaagaaatgaacataaaattggcccaggtaatgagacgcttttttagaccaggaggcacacagaggcaggcagatctctgtgagctccaggccacccaccctggtctacagagtgagtttcaggacagccagggctatgtaaagaggccttgtctcaaacaaacaaacaaagaagaactgcggtccttcaaagataagcaccatgagcacatgtgtgtttatcttcttctgacatcacatttatttacacaccgagtactgttgccacgagatacatgcttgtgtgtgtgtttatattctgacatcacatttatttacacaccgagtactgttgccacgagatacatgcttgtgtgtgtgtttatattctgacatcacatttatttacacaccgagtactgttgccacgagatacatgcttgtgtgtgtgtttatattctgacatcacatttatttacacaccgagtactgttgccacgagatacatgcttgtgtgtgtgtttatattctgacatcacatttatttacacaccgagtactgtcgccaccagatacacacttgtgtgtgagtgtgtgtttatcttctgacatcacacttatttacacactgagtactgtcatcaccagaaacacacttgtgtgtgagtgtatgtttatattctgacatcacatttatttacacaccgagtactgtcatcaccagaaacacacttgtgtgtgagtgtatgtttatattctgacatcacatttatttacacaccgagtactgtcatcaccagaaacacacttgtgtgtgagtgtatgtttatattctgacatcacatttatttacacaccgagtactgtcatcaccagatgcacacttgtgtgtgtgtttatcttcttctgacatcacctttatttgcacactgatcactgtcatcctcagatgacatcacacttgtctgcggctagcttttcacaggtcacttttcttcaggattctctgtgccagtgagatgtcatcttccttcactgctgtacaacctgagtctgatgtttgagtttatgggctttattttcttggactgttgggattttgaacatgagtgtaacccaataaataaaaggcccagaggctgatattggggttcaagtagctgaagatcaaaaaagcaaagcagccaagccactagctctcacctctagctcagactgaaaggagatcctggctccaccaaacctcagactacaatcccagaccactatgctctcctcagcgtggctggagaatcctgatactgaccaccgaagaccctgctgggattaaaggcatgagctctgttattcttttagactgattcagtctcgtgtagccctgggtggccttgatctcagagagatccatctgcctttgtctgagtcctgggattaaaggtgtgtgccaccactgcctgatctctgtagcttgaggctgactttgctttctgaatcttcaggcaagcttcaataaatcataaatatcaccacacatgagtgtttaccatgagaaactgagcctcaagaaaccaatcctggggctagaacactggggctcagtgacaggcacagatagggcccagcgttcaatcatctgctcctcgtaaaccaggcctggtggcacaaatgtgtgtgtaatcccagtgtttggaaggcaaaggcaagaagatttggattcaagttcatgcttggctgcacagcaaattggaggccagcctggaatatgtgagactctgtctgaaaaaattaagaaagaacagacgaaaaacctccacctgctcctgtgagcattcctttaagaatcaagacaagactacgcattctcttccagatgacctgagagggggtctctcggcaagtcaactcctgacaggcagttgctggagctgaagggggaagggagggagcagttaagaaatgaccctgtaagtctgctgtcccagcacctgggagacatacgttcttattttctcagaagcctgctctttcaccagcttctaccttggtgcaagatttttgtttttaatattaagtatggatgcttttggcagcatgtatgtctgtgtaccgcacacatgcagtgaccatggaggccagaagaggacgttgggtttcctggaactggagttacagacggttgtgagccgccatgtgggtgctgagaactgaacacgggtcctctggaagagcagccagtgcccttacttgctgagctgtctctccagcattagaagatttttaaaaattatttattcttgttttatgtacattggtgctttgcctacacgtatgtctgtgtgagggtgtcagatcttaagagttacagatagttgtgagccgccatgtgggtgctgggaattgaacctaggtcctctggaagagcagccagtgcttttaacctctaagccatctctccagcccatagaagatttttaaggggcatcaaaggtgtaacaaacagaaagaatggcttattagaggctgttgtataaacttacacgtgtgtgtgtgtgtgtgtgtgtgtgtgtgtgtgtgtgtacgctgtgcatgagtgtgtgcatacatgtttgcatggacacaggtgtgtgtgctggtgccagtgtgtttatgcatgtacttgaggtctgaagtaggtatcaggcatttttctcaattgttctccgctttattttgaggcagggtctctcgctgatccagaatgctctagttctggccagtctagctaaccagtctgctctgagatgctcctgtgtctgcctctcaggccgcccccaggcctgtccagctcccacgagggttcctcacacttgcaaggcagatgcttcatcaactgagccaacttctcaccccaaagttatgtattcatttatttttgtttttgctttttttttgaaacagtctcactacctagccatggctggccttgaacttaccgagatttgcctgcctctgcctctgtgtgctgggattaaaggcgggcgccaccatgctggggaatttatacttacaaaggactaaaaacaacccacactgaccttggctattcttcttacaatatacagttcacaccctggtcagtgcgtgggctgtttgcctcatgtttgttccaccaccattttcattcattggcttttgtggtgttgagcacggagcacagggccctgtctgtggtagacaagcactctgccgcagtgcttgttccctcagacccagggaactatgtcactgagtaaacgtcgctgtctcagaacagccactctgcacatggtacaaaagcgagaggttttaacatataaaccagaaagacgcccttgtcagtgtactcagacccgttgacatctttctaggtcgatgcctgcaacgaagcccgtgaattaaaggagaaactcattgaacggatagaggtgagatgccccaagtctacctctccaagcaggtcagtcgggctcctgctaagcctggcggctatttcccaggaagccaacctacacctcattctggtctctggctggtcacaggtcttcttttccatccctcaggcttctttctgccttgggccgaaagaagcctgacggtttctggagtctctctctacgcctctgcttctcctctcttagtcacccggagctttcctccgtgtccatgtgctctgcattgcacaaggctcagtgcaaatgacacctcttccccagacctcccctgtctctctcatccagagaatgagttcatctttgagttccttccccgacaccttagacgtggggggaagcatgacatgtggctgaaacagtggacagatgggctactaccgtcctactcagaggtgctggctcctcagcgtcactgggtacttggtccacaccccaccaagctcggccccactccttagcgtgcctctcgctctcatgcatgtggacggttggctgtgtgttacttgttgcacagccttacacgagcacctgtagttggcagtggattcctatctattctgtgacctggaggagggcctggtgggcatcactctgtatgtgtggcgtgggtggccacactgagacagattcagtacaggggtgtcgtttcaatagttaaaggtttctcctgtcttcccccactctgcatgggtccactgactctgcccttgccattggccacctgagttgtcacagagggataaacatcctcctttgcctacaatgcaacaatgagaattttttaaatttttttaaatttattttaaagatttgatttatttattatgtatacagtcttctgcctgcatgccagcagagggca

SEQ ID NO: 11 - DNA, 126887 bp, Cricetulus griseus
  source 1..126887: mol_type = other DNA; note = ERE67000.1  Contig Sequence
  misc_difference 1..126887: note = N can be a, c, g, or t
ccaaactactaagtccaaggctcaacagggaactaatgaggaatgactatagagagatgacctctgccatgacactcagaaggtgggagcactctagaaagatgttccaggtgcaggaaaatggatatttattttcatgctgcaatcagctgtgttgatatttttctcaatctagtaaaacatgaaacattagaggacctgtgctctatctaggcacagcacagactggaccaagacatatcatttctctgtgtgtcagtttatttacatatgaaaaggtatttctaaagtcacttttcacacttgcctctattgtcctttacacacagatacacaagacagtctccacaaaccagactactaagaaaatataagaaagtagttataaatgagcctaaattttctgactctggatataaatgcctattcccatctactccatctaaaccgtgaaaaactcttgaaatgtgttttgaaggcaaacctttatgtagtgtgtaatgtcaaatgtctgggttggacttcaaattcctgtgtggcacggagtgggagaagaggtaatatgcagttagttaatagtaacatgatcaaagtaaaaagaaacagtccctacagtcatttgtagggactgtagggcagttttatctgataagaaccagagcttaaacaataaattcacaatggtttacatggtttttcattcccaaactgttcagcatattgtgaaagtgctctaatattcactttttcatgaatgttaagatctgtggactctggacttcccttctccaccccatccatacacattaaaaactaaaaggtctgtggctactgggactgaagcaggtattgcacttgatgtggctggccattctctgagcaggcacagttgctgctgatgtttcccttacagtggaacaaggattagaaatctagttctcttttgagtactaaatatcaaaattccacaccaaaagtgtagcaataacactaactagtaaatttcaaaaaaacaaaacaagaatccacatctgaattgattcaaatgtgtgtgtgtgtgtgtgtgtgtgtgtgtgtgtctgtgtgtgtctgtgtgtctgtgtgtctgtgtgtctgtgtgtctgtgtgtgtgtagaagactcctaaggcccttatacatgtactcacatcaccacagcagacttgtcctcaagtggcttttcttgggaatagaataaactaggaataattagggacaaagtcagcttccatggacctgatcctttggcatttccaggaaacttaatgctgtctaaaatgaagccaaaaacttttggctagaccccacacagtacaaaaaaaaaaaaaagtggtgtaaatccctactgcctcgaaccccacaatgacgactaacagtttttttataattgacaagattttcagcatagtgtgttggaaagttgtttgtcaagattttggtctcttcataagtaattgggaattctgccagacaacagactacagtcattattgctgaaattcagatagaaatgtgaagatatatttattcaatagtcagtaccaaatagcaactactacaaacagtacaattaatactattaattttcatactatcaattataaatttcgatcaactaaagttaagttagcccaaataaagaaagtacatggtggtttccttaagaaagctatggctcaaagggttttgcaatgaaagtatcttggcaacccgggccaaggaataccacaaaattaacagcatgcaacagacttcatgtaagagatttattatgggattggggggggatacaaaatggctgcctctgagccaggatggagacagaaacaggctaggctgtgatggttggattatatggagtacagagcattcgaatagggaaaatttggtgatggaaaaatgtctcattggcccatagtaatagtggttgctgtcactgagtcattgaaggcaggcaggaacctggttccagaatgtgggtgaaggacttttggtgattatcagtatgcccagcaatagcaaatttgaaaatgtcaataaacccaaagagaaataatccaaataatgaaggatattattgtattattcagtactatgtccaatttttaaataattaattataacacattattatcatcaacctctttttttgtctttttcttttcttgtcttccttttttgtttgttagttttttgttttgttttgttttcccagacagagtctcactatatagctctggctgtcctggaactcactgtgtagagcaggatggccaagaactcagacatccaccttgcttctccagggattaaaggtgtgtgccactatgcctggtttgtcattccctctcttgcttcaacagtttgcttctgttaaaaccaaaaggtgacaaatgctgtcttcccatgctgtccttaagaactaacagcttatctctagcaagattttcttctggttcacagctctttgttgtgtttcttccacatttatgttacctactggtttgtattacaaattcctcccgataccatgacagactgttggaagacattgctggctggtcagaggtctctgtctccccatggccaggcagcttatctcaatagctcagcagcttggagctccctccctccagcaagcttcctgctctctacctggccttatctggagaatatccctggacctggaggaggactgacctaatctctaaaaccagatgcctgattcatccttagcttgacctttggcacaaatccctgctgagaagtccctgctagggctgtgagatgggatcctactgccacatactaaacttgataggggcatggtggcacttaatgcaaattagggcttgtctccaggctccccatccctttatatttctcaagatctgtctcctggaaggctgtttcctatgggatgccaaagcttttttcatcccatctgcctctttcccctcctagtcagttggccaactggcccgggggaaagaggaccccaacaacagtccatctattacacacaggatataatacatcactgctttgtgaattcagttccctatataattctcatagaccacaaataagcttcttcccttcatcttgaatatgaagactatggtcagaaatggagtttccaaatagatcagcaattacttcaagaggctgatggctgaagcattatttataatttataacacatcaaatgtttaatactgtctcctgacaaaaatctcaaaatgaattctttatgataatgaggtatgtttgatcctaaattaatgtgggtattaatgtgggtagtagttactaaagatatgaagaatgtgtttttaccaatttcaaaagagggaaattacacacatactagaggccaaaaattatttgccaatactagaatatctgattttcaaaacaaaacataataactataatcatatcctctttttacttactcaaaacatttttcatctctaacaggaggacagataacttcaatatacacttcacattgctgtatatcctcttaacttagaaaatccctgatctttccccacaattcctttgtctactaagttgtgtttatgaaaacaaaaatctaagatgtatattaaatctctaagaactagtaaatcacaccacagagaaaatttggtttggatgagtagataagcaattttaataaatagtccaattcagaggaagaatttgagcaagataccccagtctaatgtatgaaatcggcatttgtctttctcatatacttaactctacttctgccccatatgaaaaagcttaatagtgtcaagtaaattaattgaaaagcttagccatcgttgtgatccatttctgcagatgaatttactagaaatcgtgtacctgaagagggaaaaataatttagatttatgttgaaccccaaggagagaatgagattgtgtgtgtgtgtgtgtgtgtgtgtgtgtgccacacacgcgtggcaggcatgcaccttcacataaatgatgtatgtgtgtgtgttgggaaagctattttaaaactcatttgctcaacagataaaatacaatataatgtttcattttattgtgactctgttgagtgaagcaaagaatgacagaagctccccactggaggttacaacaacctaaggaaggttgaatgaaaatatgtaatgatgattgataccagtgctcactgttatggcttcttatcctatgaaacttccacttgaaaatttcattcataacaaaattcaaagactaatgccatttaaatttataagagtcctcaggagattactataattgccaaaatacaatgaaagcaattcacaaaagaagtagattaattccacacatgcatttcaatgtgagaatcctaaataaaggatagacttcagtgtacattaaaacaatatcattaaacatattacagtgttaatgaatttattgtgctactactattcaaataatatactaagaattcaagggtggcttaatatttaaaaagtattcatagaattcacattagaagaaaaactataggttaataaaaaacctggaaaataatatattaaaattctatagtcacaactaattttttttgaaaagcaacaatgattcaaatgtatgagcttccttgaggtaacagataaacttagtgaaagcacatttgatatctgtttcattgaacttcaggaaaaaataactgtagctttcaacatgtaaaaagcatgattacttagtaatgataaactattcttgaataggtttatgtactttgactaacagttggtatgtatatacttaaacagttccatactccctgaaatatttacaccaagctgtgatacaataaaccaaattgaatgctgaaataagaaataaaaaacattattaacttaaataaacattccttaaaagatagtgggagtgaatcataatttaaatacatttttgagaatttcatatatgagtactgcatttatataattttacctctctctttccaagctctaattcctcctatgtgcccaatgctcatgttcacggcttattttgtaattatcattgttaaaaacatatatcctactgaatccattttgtattgtttgtatatgtaggtgcccagaactgaccacttgcaattagacaacttatgttggagttcatccctggaggaagctgattcttcttctctgagcagtttttgactgccttggctttacatctagggttgggggccttgtgagatttcccctaattgtgtttgcttgtgaagtggtgctatctttgtaagtgttgtttagtcaaccttattgttgagatttcataggtagtttccctatcatatctagaagatgcaatgtcactgcaggtgttcttctcctctggctcttacagtcattctgccccacccctattccataatgttctcttagcctgggtgtaggctttgtagatgtatcagtgggaattgggtaccccatggtcacttatcctttgtattttgaccagatttggatctctacagtagtttccatcagttgcaaaacaagcttctttgaagagaagaatcttcactcttttattccagatacagaaacaatatggtgctagggctttctacatgctaggcaagcacttcagcaatggagcacaggagaaggctttgataagcaagtagtaaaatatagatgatagttaagtacacattgttaagttgcatatatatgaattttaatttctttacagcaattaattgttgggagccaaagatctcaggacttggcttgagatcctaggccatagttgtatattaacctttacatagcagctccttagaaccttagctcaagaaaataaacaacttgacctagtcctccacccacaggctcagtcacctaggcaacccttcctggactgcttactcataaactctttaaacatcctctctttgtggtttcctaatatcctgcttatgctaacacctggtgcacaaacaacccattctacccctccccatatcctgctctactgactatataagctaacctgagaaaaataaagtttgccacttgatcagaatctgttgttctttctgtgtctcttgtccccattccctatccctgactctcttgcctcaggttgatgtcctgcaggtcgggacaattaatatgttaaacaaagccaaggcacaaaaaattagaaggacattttaaaacacccaacaatggacaattgactttaacacaggattatttcttaaaaactggtgatgaaaaaaacaacaaacccatagaaatgtttgtaaaatacatgaacaaataattaatgaaaaagaaaaagaaaaacctagcaaacatgtagctaaggatggtcaaaattaaattcaaagttcagtcaaggtgaaattcatagtagatttgacacctgtgggatttattcctcagctcaccaattttcaccctctctttctgggtggaccctcacaacatctaggacttcaactaatactcccatgtcaactgaatattcatcccagacagcctcctagctctcagaccatgactctccctctgtcctgatactctagcattctatcaacttcatatctcttcaaaccagtgttttgtaaatagaaaacaacagacttttttggttgtgaaatcaattaacaaggtatgaattactttttaatataaaatattactaagtaacaaagccagtctgtaaagatgatggatcatattatgctggatgtatgatctggaaaggctgaaactgtgtatacattaaaaaggtagccaagggtttggatagaggaaggaacaagtaggtataacataaactttgtggggcaatgcaacttttctgcctgttgatatgaaagtagacacatgtaattatacgtattttaaaacctacagaatacacactgtaatgtatttgatagaagacagtatactattggttgttagtagtcctcctcaaatatattcgttgaaaccagaagccgcagtgtccctgaatgtgacttcattcaaagacagcacttccaaagaggcacttatctaactactcagtactagtgaagtcatgcttattggaggggaatctacaattagtttgctaagccagcataatctttaaccaccatctataaacatttgtatagtcttcacccctcatcaaggaaacttctctttgcaacagacagaaaccacaacagaaaaacacaaccaatcccaatgtagagttgtggagatcaatctcaatgaatttgttgcacctaagactcaggggacattgcggtagagggaaagattttaagagccatcggatcagggagtatactatgagactgtgcctctctctaatgtcagaagtttcacccagaaattctcaacagcatgattgcccaaaagtgagctgaacaaatttgacaccatgctgactgaacagaaaaaatccgacaaggcctcaaccctacacaaagcactataggcaactgtggaaagctgcaagtggaatgataaaggtggtattcccgatggaagagcacatcatttggttctttggtgccaaatggtctgccctgaaagcatacatacaagtaaaattatatggactgagtaggttataattaggaatatatagctaaatgaagcactcaggataaagtagactcatatgggtaaatgataacctggtattatttacaagagaagactgggcatatgaaaaaacacagggaaagaccatgagaagaactaggaaaatgacaaccattatcccaaggggagatgctctaataacataattttattctccattaacaatgtcttcattcagacctttgtcgtatattgtggaattatctccaatgctccacacatgatctcatttatctcttgattcaacagatatatatttaggaatcaccatgtgcaggtactttccatgacatctctatgagtttaaacaatacagaaacagtccctgttgttattcattcattgtctaatgccaccactgccattcatggactctctgttcatttactacaatcctgggaagaatccagataaagcatatatgagcactcaaatctgttcagtgagtatctgctacatcctttcatagctctagacactgatccttacaggggcaacaagagaataaaaaaaaatatgggcacacaggtagatagcctgggatcagagagaatttcataatgtttgttttatacagttgaacaagaagtgagtgttattccatacagctgaagcaaggaggcagctgttatggtatacagctaaacaaggagacaggtttagataatcttgggaaaaatggtctctgtaggaaagtaatcttcaggacatgaatatccaagagtgaaaaatgccatgcgtattccttcacacactttcaacattcacatttggacaaagagggaaggctttaactattaccatggggctgaggcactggggtccttgacctggttgtggctatatcaatagcatacatttactcggggcttcattaattcaaggcttcttcagctccccacaaatacacatcagtgacttgccaatgaaatgtgtaatggtgtgaactttctcaactcacaaaagagtttagattatatagtacctgtttgctttctgaacttacctgtaccttactttctaaacaattaatattgaatgatatatattacaccttccttatatgatgttcacacctttgttcctttctatgacattagctatcttcttcctttgcctttgcccattgacaactgttagacatactttaaaacccaatccaactgcagtttgccatccccctgaatccctgcttcctactttaaactcatcaacttcaaaatgctttctgtcacccgggtctaaaataacagcctgaccatatctcattatttacctattaattttactatttttgtgacattacagaggatgatcatttagttgcatttctactatttttcatgttagcatctttcttggatgaatacacatctatttacttggaaatccttgaaatcattaaaattggtcatcaaaactttttgaaaaatgaacataatataatgaaaatctgcttgattaatggcatgaaggaagagatgaaaacccagggcataatgtagagatactgttataataattatatttaatatatttatggactagaacataggtgagtcatgaaagatgatcccagacatacagggaagtaccacaccataaagccatctgtgagtgggttggctttgcaatttttttttgtaaaactcacagtttttttttttttgtaaaattcaatattctaatgattatgtgagtgactcagtttaattttcagatcccccaaaacactgatagaccattttctttaggagagttttcccaattgcctgaacatcctctaattgtttaaatacagcaattaatgagtaatataagtaatgaagaaaaataaatctgacttggaaaaagagcatatatacatcatatattgcaatgtgacattaacaataaagtgcaatatacctatgcaaggttttgattattttccaaataaggttttctgtgtctacatgctgttctctaaagactgtaccctgaatatcatcaaaatggaagactagaagtgttagggtcaagttttgataaaagagccatcacatgttttaaatctgtgctttacacctctatactcacatctttaaaccagtgctgatcttacattaactaaataatgcaaggaaaataagggagaaagaaaaggatgatatcaaagaaagggatttttataaaggatgtaaatgatgaataggttaggccagttgcctctttttggtgcctatacaatttctgctttccatcatttgttattccttaaggaatcagaatgtcttcagaatagagtatgtcatgataagtattggtagataagatgacaggtaaatagataggtggaaagacagaagatagatgattaaatagattatactggtggtgatggtgatagataaatgtgtaatggatagaagacagacacacaggcaaatagatgatagatagatagatagatagatagatagatagatagacggatagaagacagacacacaggcaaatagatgattgatagatagatagatagatagatagatgatagatagatagatagatagatagatagatagatagatagatagatagatagcagatgtacatatacatatatgacccacccatgtaatgtgtttatcagaggatttctgcatgaattagcagaagatgtgctattttggtcttcctgaaaaactaatattaggtattatctaatataatctcttgggaaataaataactgcattttaattttccatttatattttatgtgtatactgttttgattgcatacatgtcatacctattttccacaaatattagaagagtgatcagatcacccagacctggaattatggatggttgtgaggcatcatgtgggcgttggcaatagaatccaagttcactaaaagaacaagtgctgttaactgctgagccatctctccagtccctgagataaacaggtttttgtgcaccacacacaaaattctgtgtgagtatttttcagtggtgatgagtttaaagtccatctcattatctgtgtttttttttataatttgaatgcaaatctatatattctataacctaaatagttgaccaaaatttcattgaataagtataatctccagtaagaggcatagacaaaattgagtcatgcaaatgtttgaaatagtggtcctccacctgttacaataaatctttccgccataagctgcggagccccactgccacgtgtaagcttttcgctagccgcctgcccgagttagggcccaaattaatacacagaaacttgtattaagttcaaagctgcttggcccatgactagaattctcatctgctagctcagtcttaattatcataaatatatatattttataagacttatctcattggacaccttattggcatccctccttgccagtggctcacatcccgctgctggaggaggtgaaggggaaaggggatacttcctgtttctccttgcttatgagtctccttgctatgtcaattccagcctggatcaccacttctctactacatttcccagaatcctctttgactcctcgtcccgtctaacttgctgtctcattggtcaaacagtattttattcaataatcagtaagaagaacatacacagtacattccccatcatctcctcttttctgtctaaataaaaagtataacttatcttttataataactgaagaaaactataaccataactatctgtctttaattctatcaaagatcacagaaggataatatataaactctagaattgacaggacatctcactacctggacagtcacccaaagttcctctgtaacgttgggacatccatcttcagcccataggccacattgtgtctggcacacttctccatttcaacaggaaccctttagtactgtcttgttttgtaagttcagcagtcactttcttgtgggttctgcatgtccagtttatatatgtccagtttatacagcaacaaacagtccaggcaagagaagtttcttgcccaaatggctaatcttgccatgttgaaagcaaactccataacgagtttcttcaatgcccgccctcctttctgatgtaattggtgtgccaggcgcagttgtgtctcactgccaagaaaaatcctaaaccatttaaatgccatatttctgtcttccaccaccagcattctcttcctgatgaaatgacccctcctctctcataatgcagtatctagattatttcatctgttctgaatattctcatctggactgatgcctatcatctttatcactaccaaactgatacggatacagtcacatgtgtctgatactgaaggagactaagacctttatgtgttctggatttgttagaagctaaagattgtgtcagatatcttatcaaccttatgacattatgagcccatattgagtttgcatcaaataaagccccgacgattgctttccatataactatcattaatctcaaactcataaactaggggatttaaaattttaaaaggctaattaattatgaggattctttccaacttgctagaaatcttcaagtctgcctttattagccgaaatatcatctatagaatatacttctgtgtgtatatttcataatcatttacgcatatgaaaatcaatcctctgtaacttgttttgagtcaccagtgagaaattgaccaagagctcagtcacaggattgacttctagtaggggaatttcttgataatattgattcaccagttaacacactgtagatgtagttgcttcacaatctacaatataacttaatggcaagattattcagtccagatattttcttgctttccattaataaacagcaaatgcttataagatgtttcactgaaatttatttgtcataaatttcatacagtcctctgaagcaatattccttgacgagtagggggggaaatctggttaatttgtcacaattggtttcagcactatatggtttatttactgtccctaaaatcaacaataaatactagtctggattcgggaattaaatcagaactctcagaggtctctgaagtcatacttattcataaaatacttatattcttttactcattattttagtgtgatcattaattttataagccaatgtgactgggctaaaaaaatgtccagatagctggtaaaacattatctctgaaggggtttctgggaaagaataatattaaatcagtaggttatataaagaaaatctcatttaaattctctgccaaccagtgaggctaggatctctctttatatacttccagaaaattctccgccattttccataactctaccttttaaaagtggattgtttcacgatgttctaaacataacaccgtgttctttgaaggtttatattgctcactgcaaagctgcattcctaaatgtctgttcattaaatctcagtgatacatggtagtttatgcttactgctaaaattaaatcttcaagtttattttgtttgtcactggccaactgagaccagaattttcagccctgattatctcccttattattggcacatcctccatcattgttcttctacctacagacatctgttgtattccataatagcttgaacatacagctcctaattactctaggaatttatcccgactccctaccggtttcagtttaattgagtagatcaccgccttttctgataatcagccttctcgatttttatagtatgcacttcatctttcctcaattatggtccccagaaattcattcttcaggaaagaaatgtttgagatagaatgaaaatcaatcaaagtcataaaaatcataatacaaactggctgaaatgtttaaaataacacccaagttttatgtgactgcagcctcctagtttcagacttcaggaacaggatgtggaaacagcttgtgtctttggttatataatttgcccccacagaacttaaaagttattagcaattagtagacttttctatgccaacttttacaatcatatcttagacacttccttagaagttgtctaccagttaagtatagtagagcgtcccatcaggaaaacatctccaaacaatgtaagtcccgcctggactttgggacagaatttcatatctctgctggtacctgagaacattcctcaatgtttcagtggtattcaaatccaattcacaaagtccaatttcatattcaaaacactataagtgatttaggttaagaggttagtagactagtttatttcaaatacacccacccacacacactcacacacacacacccacacacccacacattcacatacacacaaacacatttatggtgagtttaaacctccaatatcaattctctctttcttctttactctcctcatttattttgtttaaaattttaactatcttaataagtaaccgaaatgcattctccaaatgcctaccttcacctttgaaatccatacatatttgagcttatgtaattaatttcaggaagaaaaatttaaaccattttgctcctagtgattacttcttttatcagctccaaaactctgcggcatggggtaaccacaaattatttctggtgattctttgagatgacttcactgttctgcttgctccaccaacatcatttccagaatcacaggcaatgtgacaccaaatggctaccaacagaaacatacctgggtgaggccaataggaataaactatctggagtgtggactgtttagggcatgagctatagaactgaaaagcaattaaaatgactagaagtttccctcttttgattatcatcacaagccaacaaatctactcggtgtcaataaccaactgttatttcttgagtaaaattaatatagaaaattatattgataatgattccttgttttgtattgtattttgcattgatatagtttttcattttttcttttgtcctaaaatggagtctcactattcaggctggaagacctagaatggagatctgcctgactctgctgctcaagagctggagttaaaggtacacacaaccattcccagcttgtaggtctggtttctaaataatgagtagaattcttgaatttcaataacaccttaataggttctaaatttgcatattgtactgcttatcttttaataaaatttatagtccacatggaaattcatttgtaaaacccacttcaatcactccccccccagtccattcagtgtcagttaagcatgttttttgagattaattgcataatgattgagaatagttggagcttagtctatgtacagtattaccagtctatgctactaaggtgctatgtttaagcagaagatgtgaaattaaccctgactgagtgacaggataaaacttacatcctctttttttgtttgtttgttttgtttttgtacagtcactatcctaaaacaattgggtgtattcacttgtgaaaacaaacaaacaaaaacattaaaatttaggcaagtgagactgtcaaagaacaataattttccttggtaaatatggtttttagttcataagtaaaatatgcgcagtagagctggattccagtttgatttccagcacccacatggcagctataaaccatctgtgacttaaaatccaggggatgttatgttttcttctgctcttgtcaggcaccagtcatgtacatggtacacagatgtgcatactttgaatatatatatattcaaagagtaaataaataaaaaaaataaaataaaatactgtattcaatttgattgctttaaatcacatttttttcattatttggcttgctatttattatttatttttatgtagaatctgaaaactgctaaaacttgatccttctgtcttcatcttcaaatgctagaattatagatactgttaggagccaaatctcatatggggaggggtagaatgggttgtttgtgcaccaggtgttagtgtagactggatattaggaagccattggcctaatggatctcattggcctaatggatctcattggcatgagatcctaggccatacttggccggccacatagttatatattaaactttacacagtagctccttagaacctcagctcaagaaaagaaacaactcaacccagtcctccacccacaggctcagtaacctaggcaacccttcctggacctcttactcatgaactctttaccctgccaaacgtcctacttgtggcttcctaatatccagtctacactaacacctggtgcacaaacaacccattctacccctctccatatcctgctctactgactatataagctagcctgagaaaagtaaagtttgccacttgtgccacttgatcagaatcctgtcttgtggtcattctttctgcatctcttgtccccaaattcccgatccctgactcttttgccccaggttgacgtcctgcaggtcaggacaaagcacgaacccatacatctctttttatgtggtgctggtattgaacccaaggtttcatgcatgtcaggcaagtgttttccaattaagctatactccagacattgcttattatttttgcataaaataatgtgtattgccaattatttcgaataaaataatgtgttaatacattatataattattattcattattatagaatgtaattttaaccaatgattagaaatgttgaaatgattcaaaactgagttcaattcctgagtacatcctgagagacaagacccaagatgcacaggctcatatgcctgcagtgctaccactctgcaaacgtgtgtccacgatcactttctcagcttgtttgttgttggtatatagaaagctacagatttttgtatcttgctacttcgctgaaagtgttattcatttctataaattttctggtggaatgccctatcctgcaaaataggaataattcgactatttcttttctgatgtatatccccttaatttccttctcttgccttaatgctctagctagtgctccaagtactatgtcgaaagtgggttgagaaagtgaacatgcctatctcattcctagttttagcagacatgctttaagtttatctcctcttaggatatagtcaaatatagtctatattatgatgtggtaggctccacccagtcctactctttctaagacttgtgtcatgaaggcatgttagattttgccaaaggcctttcctacatctgttgagactatcatgccaggattttgtttgtttttaagtccacttatattactcattgtgtttagtgacttatgtatgttgaaacattcccccatggtaaacttggtaaataatctgtggtattcttcagaggaaaaaaaattacctaaaatttatatgaaatcacaaaagactctgaatgtccaaagcaatcctaaggaaaaaaataacaataataaagggattaccattccatatttcagggtatattacagaagtatagtaataaaaatagtatggtactcatacaaaacaggcaggtagatcaatgaaataaaatagaagatccagatataactatgggcatctgatatcagacaaagaggccaaaaatacacataggagaaaggcagcataattaataaattgtgcatgggaaactagataaccatatgaagaaaaatgaaattaaagccatatctacaaccctgtatcaaagtcagtttgaattgtattaaagaccgttttgtgaaccctgaaatgttgaaagtgctagaagaaaacataggcagaagtctgtaagacccaggtatatgaaagcactaactcctctggattctaattgtccaagaattaaggccagcaattgacaaatgggaaacaatcaactgagtgatgaagaacaccacagagtataagagaatatttaccaattataagtcagatagaagattaattctaaaatatagaaagaactagttaacaagacctaacctttaaaaaatcagctatggatctcaacagaaagtcctcaaaagtgtaaatggctaatgtgacaagcatactcaacaactaagggaatgcaacctaacacaccccatgttttccacatcacatctggaggagatcagtaacatacggaattgcagtaaataactactgatgtgctaatggatggatgtaaacttcatagtataccaaagttcatgatacaccaaaaatttaaaaaagggtacaacccttaccaactcttccggagaggttgatattatcatggaagatcagctgactgggcgaaatcatgattgaatttgtggacttggattctgtatcgggttaattttttatcggcttaatctaacatcctgtgccaaagaaaatcattattccaagtttcttgaggcgtaaagagaaaatacacagtgcacacattcatttcctgaaagctacaatggagatggcaacacagccgcttaaaagctgctttccccacaaacactgctagacctcgggaatacacaattttgttctctaagcctcttcatttcctcaagttccttatctgctacctaaagaatgagtattatcttaaagcataaacgatcattgaggaaatgaaagggtgcaatgcctgcaatcaatcttttgatgaatctgtgtaatcattacatacaaaatcggtgaaaatgctggaatgttttgcatgtttaagaacacataaataaatatgcccaaagatccaaacctgcctcaatctgtacaaagttcattagctcagttgatattggcttcatttgatccttagtagcttcacttgttaatattccttaaagcagtgattttcatagtgtagctaacatcagcatcacctagaggacctgttaaaatgcagattactgggacccactcccagaatttctgattcaggctggaggcagggacaaaaaggttgtggttttgaaaattacaagtttacactgatgtttctgtacaaagagtacactgtgagactctctgttttaaactaactgtccttatgcacatgcccaccacctatcagtccactttctaacttcagcctcttctatgaatgtctacaataattctgcattattcattgcccagaaaagctttaatattataatctctattagttgagctgcatctatcattaataagtatgcaattaaagataaatattaaaaacaatccagttggtagtgtcacatgaatgaatcctaaagtttttttcaagaccatgtcatttcactacatcatatataactaatatttaatataaaattaatacaaattcaatccacttcaataaatagaaataatcatgcccattagttcaataaagtggtttatgatagtattgtatctgaggtggtttcactttgagggtagggacagagaagttgccaggatctctaatggaagaatgttgagaccagatatcttccaggcaagcaccacaaacaaaaatgaaggagaaaaaaaaaacctgtaaattgccagaatgtcttagttacttttctaatgtggtgacaaaacaccatgtccaaggcaacttataaaaaagaaaagaaaaaaaaaaacatttaatttggtgctcacagatacaaagggttagagtccatggctatcatggcaggggacatgaaagcaggcgggcaggcatggcgctggagcagtagaaggaggtttacatcttgatccgcaggcatgaagcaaagaaagctaactggaaccggcatgggccttttgaatgctcaaaattcaccctcaatgacaaacctctaacaagcccacatctcctaatccttctcaaacagttctaccaacaaatatgtgagcctggtggggaaggggatcatcctcaataactatcatagaatacatgagtaccgagtgagcctggtggggaaggggatcatcctcaataactatcatagaatacatagccctttaactagtgtttattgaaaaacaaataacaaacctaaagattggaaacccagaagatgggggataattaattctcactcttgaactgggaagatggtttgagggctgtggacactagtctcacatgtagagttagagaaaggtgagccccacatagagctgaggctctatgtgaacatgggtactcaccacaagattccaaagctccattcatacaggccacaataggatggaactccaaaactgcgggctaccctctgcctaactgtacacagagaacctctaaagtatctaagagcacaaagttagagggagaccctgaaagtagaatctaggctgcaaacgagccctacagtgtatagagtaagaggtagaacattggagggaggcaaattctgattaattctttcctgtgtagtatgtgtaactaagttaatcactctaaagccagtttatttctcctatgagagttcctactttacagaacacctcaatacacctttctgttgggaacaaaggtcagtttatatatagacaacatggcactgatatggatttccggattagaccacagaggagggtaggtactatgagtcagcacaaaaaatggctggcactagacgtccaaggtgctctgaagtaatctgttatataactattttttggcaaagttccacttttatgtgaatctgtgtaaatacagccttggagaggcccgcctggccacctatttgtctgcaggcctatgtgcctacatctgtgttgcctgtttgcttgtgcaatgctgtgtgcaacaagcctgggtgcctgccagctgctgtctacccagcagtctgggtggtgggctttgagcagtgtaaataaagtatgtcttatctacctgacactcctcaaaatcccttcaaccacttggcttcccatagcttttcgggtctcctggctttggagcttggtctttacactttcttaacctgtttgacctctctgtgcccttgacctacttctgatgtcagtaaacctgggactgaagattcaagtttattatttgtgtttctggaattaacccttacctaactaatccagactctcagatactctcctgctatgacacaattgataggttaggccttttgtatcacagagaaacatattaggacatagtctgaaagtaagtacctaacagccatctttctaaaagaaaaaattaaagcagcactgacttgtagtgtttgccaattgctgtggtgtaatgttcccaacaggccaatttcaaaccactgacatgtaatccctgagcagagttgcataaggtacagggatcagctttgacaagattgacctggcatttagtgaagctccccaaggtgataaaggacactcactcctcccagctatattctaccactctcttgtcttctgtctttccttccttttatggtagcatctcacaaatcctttctcctttcttttttattggctaattcttgagaataatcagtatcattcaataattctatcaactttgcctagccctgatgtatccctaaaattctacaattctattctctgctccaaaaacacacataaccaagagagtacacaattattgtcactgaataagtgttgaaagttaattgaggcctcaggagaaatttgctagaaatgaaaacaacaagacaaaacattagatttgtccttagaatgagccaatagttgtcatttccatgtcttctgcttttacaaagatactgcaaaattttcactaaaacatgaaagtcactaaaacgtgaggaaatagatgccagtgcagatttagatctacaaacccaaggctgccatggattttccttgtaaaatttacatggacattcactctctttcgttatagatgatgtccaaatgctcctctgggtaggattatttccaaagcactgcatctgtggtggcttgaataggttatggcccctatagactcatacgtttgaatgcttggccctaaggaagggcactattaggaggtatggacttgttgaaggaagtgtgtcactgtggggttggactttgagggctcatatatgctcaagccaggcccagtgtaatattgcttctgctgcctgtggattgagaagtagaactccaactccttctccagcaccatgtctgccggcatgctgccatgcttcatgccatgatgataatgaactgaaccactgaaactgtaagctgggcccaattaaatgttttcctttataagagttgacatggtcatggtgtctcttcacagcaataaaaccctaagacaacaacctgcaaggttgttcctcctaacctgttctagctcccctcagtattctttccaatgcctttgtaattaagcctgtaatcccagtctcctcagccccatatcatcctatgcccaaggcccccctgctaagcaggcacaccacataacatcacataacacaacacaaaagcatctcaagctaagtgagtttctacccaagagtatgcagggctcctgggagccgcaccacatagaacatactgtgggctgtgctctaattcaaggcctcctgtcaactgcttgggaattcatagtcaggtacatccagacaagaacagagtgctcagatctgcagaccagtaataaagctctttctggaaggtgcatttataagttttctgcctagtttcagagacagagaaacaaacttattatggggctcatcttattcttaggcatgaattgtataattcaactctcagaaatctacagcagaacaattgcttcatattagtgcagcttcattttatgctctgtgctttaaatgttcgcctctctgtttgggtgctctcagctcctaataagaacactttgaaaagaaggcagcattgtgaaacaaccttgggtttaaacttctggctggattgtaaatcaaggtgcagtgccatctctttaaaaagctactgaactctaagggaggccacataaaattctctgtttctaaacaactttgctttgagtgatatatatgccccattttctttactcagcttctgttattgaatttttgttcatttatttcattcaaatcagcctatatacatgctgccctagtttagaaatagttaaaagatgatcactttgcaggtgctgcatgctttaaaaatatatgcaataaaatacaaagacaattaaaaagtaattgtttgcatagaaatagactaattctattgtaaaaggcttagcatgcattcagaaaagtactgtatcgtgaaagtacagttcacatgttatttatttattacaaatgaaggcaagaaaataaccaaatgaagaaaactgaaaacatatgaaagctgaaacaaaataaatacttttcattgaagtaataaatgcaactgttgacccaaatactagcaacaacatcactgataaaatctctaatggcacaaatactgtaggttcctcttttgagtattttagctcatactgaaaatgtagtaaaacttctctcaatggtcctataggggtaacccagataatccaactccatcggagaatattagataggaataaaattctgtgttcctgctggcatgccaaaatcatattctgctaatatgaaaatcattcatctttgagccaggcactgagagcattaggagattaatgtgggagaagggcagtcatgtactacatgcctgatgaccagaattaaaggtgatatgctgggtgcttaacgtgcagcctttggctcccatctatttggctttaaacttcagttcaacctctcaatatctgtggacttgtgggaattatttaacttatctgaatctatttcatttctctgcagggtgcgcatttgttacctgcctctagatcattgtatatttaaccaaagtaatgtgctaacacagtgtctgtgaaaattgaactctcaagtattaactattgttataactgacctatgggcttgaagcacagtgatgacacatgaaactgattcccagacaggacacattgacaatggctcagtcttctgtaagcacaaacaaaagcaagatgtggtcccctcagggaagcacatgtctaagtgactggctgaaaacttacctgtaactactgggccactatcaggtatagcctgagtgatcaggaactcttgggatcacctaataaaatattataaagtgtctcaaggggttaaaataaagtggggattgctaaggtgaacacaacttggagccatgtctctaaaaagttgcagcagctacttcaaatgaattggtatgccaaagagtactagtttcttcctcatgttggatccagccttatattctgcagaactgcaaggatatggccaagctcataactgtcctctactaatatgcaagagtagactacaatgtgataacttcaatttagacagtattgtgaaacatcaatatatatgtacatacatatatacacatatgttccatatatataatatatgtatgtatattccacatatatatgttgaagccttaactgccagaatgattatatttggaatagggaattgagattttacaaaactatggtgaagctttgactgggcctcctggctgagattatattctctccagactttatagactctaaacactgcccataaaccaaccttgaaatattcctagttggaccaactgtgccttatccaggttccttgtttctggacttctgttcccatgtcccatctggcacagtagacttttttgagaatgagagaagaaagtggaagtagaaataacattgactactactaccacaaatgggtatctaccccaacacgagtgtccacactgtcttgtgcacattacttggcattcccacaggcttgaaagttagaaaaccatccatcagaacttttcatgagccagttctctggcttgcatagtaccctttagaaatgtatgaagttcacatgtaaacaggtagtaggtgatggcctctggggacaaattatagcccagcaggacacataatactaaaatcaaacattaataataaaaattgctatcaaaccatgagaaatatgtctctgtctctaggactcacagagtagtgaggacctaaatgtgtaaaataagcaagaactctgtctagagaaaataaaggtctaatgacagactggagtttttggagtctttatttcagcattctttcaataaaaactgcctcttggattttgccctagttctttttccctcaatttttcaatttatattagaaacaagattgttttacatgccaatcccagttccctctcccgccccacctcccctgccccccactaacaccctacctaccccataccaattctgctccccagggagagtgaggtcttatgttaacataagaccttgccctagttcttatataagccatgctttgatagtaaaccctggctaataatccattactcatgctaattctgagaaatgaaatcatgtatataagaaaaatatacatactcaaaaaagttggttcctttatgtgtagagaagcattggatataatgaaaggaacattgctccacagagcacagaattagaggcagtaagagtttctacattaagtagccagttgcctgaagactaaacaagaaaaacagtaaggtttgtctgatatggagacaaagtgggacaggcaccatggcataagacctgcttaatcctatcctttatctagtattatgtgaccccactggaagctctctttttcagctaactttcttatttggttccactgcattcagcctcctgcagaggttgtccaaaacatgaggagaaataccagacctatcagcaaagccgtaatgtctccgaggaaatgatggcatgttgaacatgaggtaaggctaacaccatcctaaaaatggatcagagatgagataataaatgtagaggcactctggaagaaagaagcagtatgcttctatgtgttgctactattaatgaggggtgttaggttcagaccacacatctcctggctggacccaaggtcacacaatcaaacctcagacaaagcatagacagttcctgtcctgactgatgagccaaagccttcgtcatcctttctctgcatagacactgaatgttactcagaaagctgtgtcattcttctttcaaagtttctgatagtttctgaatgaattttaggtgatacctcagggtttctattgcagtgaagagacattatgaccatggaaactcctttaaaggagaggttcagtccactatctcattatggtaggtcacagctgcatgcaggcagacatggtgttggagcaggagctgagaacactgcatcttgcaagcaacaggaaggcaactgacacaatgggtagtatcctgagcataggaaaccttaaagcccacccccacagtaacacactctaatgaggccatccctactccaacaaagccacacctcctaatgtgccactccctatgagcttattgaggccaattacattcagactaccacaggtaagatctttcattcatgtccctgtagaacacccctatgatgtatggggggtgaatctctaatatccttgaccttagttatttttcctatcacatctttaaaccatttatgttcattggactaagcataaggacacagttttaaattagagatcaactcaagacaccaagcaagtgggagctgtagggggacagtgtaagccacacctgctgatatctcaagatgatccatagtttgtaaggttaagatatctttatttagataacaccagccaaacacaagccaggggcagcaaggcagggaggccagagagaaggggctcccatgtgccttgcagccccttaaaaccttaacacgaatcatcctgaccttaccttgactatatcctgacaggcgtggtcaggcacacctatagccagcttctagcaggcagggcttacactgtccccttcagaagcctagtgagttttctggacttcaattattttaaactaaaccacagcaatccctctagacataaaaggctttgcctaattttatctttttcctggaaatgttcctctagaaatactagaactttaaaagctattctgtaatctatcattccttcacccttccacctgccaaacaaacactctcaaaccacagtgcttaactatgaaccctacactaaatactgaagactacaaaatcaaaacaaaccattttaggtaaataaagcacccaagataatcttaattattcatcccaatatttgttttcatttatactcaaagtacaacagctacactataggaacatttgtatataagactacggccacaggtcctcataaatctctaataagtatattgattagcattgaataacagaactgaatcataaagatctgtattgaaagcaccatggaacctatggggtctttaaaggccacattgttcaacatccacatcaagaagcagcatgtgagatgcagaggaaagaatctcttacctttggccatacaactgggctataacctgacctttgtcattaagccaagaggaaagcttgccagtccatctccctaccctccaaaaaggaaagcatctttcctgattctgagacataatattgttgcttttcagatattctaacaacaagaaaactagagaaaatcatcagtaccatattttaaaattggaggtcataaaaattttaaggtttctttttagagaagataacacaaggtcacatgaattaaaatatgtatttaattatggaaattattcataattaatattaaatcacagaatgcagagaagtagcaaggatttgggaaaaggcttattatcaccaccttctcctcaccaccctctcccacccccacccccaccccccactgttcagtcacagcatggcaaatagctattcggaaacgaaaattctcataaatatatatatatgccatcctgagtacccctccatttcaataacactaattgccctttttttccttgctgctcctagccatatttcttggaaaacaacagctgtgtttattcaaatagcagcatactgatgacttgatgatagggtaatctgctggaattccaagtgtgatggtcccagagacaacttctcggcataccagaaaagtatcctttgcatagtacaaagctttagaaaggaatccccacttggttagcatgggactgggtgttccttatttcagtctcttccagtgaggatcatagattcttgttcttgccaagtcatctttccatgcaccattgtcataaagtaaatctgcaacatgaacattttcactccaatagcttctaagccatggattaaacagtgccttgaattacaatgaaaacaggcgaatgatttagttcaaaatcaaaacagtaaactccacttgttattttctctgactcaatgggcactggaggggataataacagagtcagaagtcatttactggaaaaacaaaatgaaacaaaacaaatgagcaaacaaaaacctaaatacccatgggaatgtaattaattagcaaagattaagctcccactgtagcaagggttaagttctcacatgaccttagtcatcttccctgatgactagcaacatgttacacaccaagtgtaacaactataaagcatgcatagaaataaactaacttccaaaatcctgatcaacatttaaaaataattgagtagttggcctcttttaataaagataatgtgtataacttggtaagttctagatttctcctctgatggtatatatcaagaactgaatgctttgctacaggtggaattacaccaatttaaagaacagaattggtatactgaagattatatttaatggcataacaaatctacatataatgcaaaatattttaggtgttctcttatgtacctcaatgtacattagctctttcagtgaaaggatttttttattttcttacagataagaaatttgaagcacacaaatgttaccttttgcccaaagccatctggtcaataagggaaagagtgaggcttggtccaggcctctaattctgtgacgcctgttcttcccccagacaataagggacagagtgaggcttggtccaggcctctaattctgtgacgcctgttcttccccaggacactgtgccactcctaaaaaaataatatgcaggacccacacacacacacacacacacacacacacacacacacacacacaaaacaatcaagtaccaaaagcaaaaaccattacagagaacaataaccacgtatgctcaaagaggttttacataagagctgtatataacaagggccatgctaatggagactggatttcaggggtctaagcacaaacattttgatgtacagataaacctgatgcatgagagattcaaaattaactaaggaagccgagctccagcaaggagcttggaactttttcaaaaacactgttctctgtgtttcctggagagaaaaacaggaaatgggcttctaaaaaagtctgttcaggttgagttggactttcaaaagacttccttgccaaatgagtttctaaaaggatttatggaaattgttcttttagatacatttgcatttggtttggtttggtttgatttttaatatagtaaaatgctaccggactagactggtttagagaattccagaaagagaccaaactcagccatgtgaaggcattttggtctttggaacaaagtgagataagtactcaattgggcagaccatgaagtcacactctgtttcttctgttgctctagaatattctaaacatcattaaacaaattctgaaactcttctgcatagattttatctgctgcagatttaaagaagaagaaccatctacaagaaaaatggcaatttcagagcaaatggcaattagctaccatgcatgagagactgtcttctaaattttagggaaattcccaaggagttggtaaaataatatcatttttcttctcttttctcactgtatgtgtttctacataaatctgtacttactatatacttatatgtgtatataaatacatgaccatgagaattattgttttctccttattgtgtatgtgtattaatcagcatcccttaactacaaaaaataactataataaatcactttgtaatgaaaacagatttattgtggctcacagttttgggagttttcatccattatgaattggctccattgctcctggaaacatagtacatctcagttggaaatgcccagaagatgaagtctctttaccttatagtgaacaggaagtgaaaaaggggaaagactaatgtcccacgacccacagcaagagaacacctctgtctgaagatttctattgctgttgagcaacaccagggacaaggcaactgtaataaaggataatgggatggtttacagtttcagagatttgatccattatcttcatggaggtatgtaagcagacatgatgctggaaaaggatctgagatttctacattttgatctgcaggcagcagaagtctgtgttcacaatgagcaaagctttagcatatgagacctcaaagctcactcccatagtgacatacttcctcaaacaaggccacacctactccaacaagatgacactttctaatagtgccactccctgtaagctaatggagaaattacattaaaactaccacaaccttcaattacctaaacttttccagtaggcaacacttcttagagctttctactaccttgcattggcaccaaagtggtgaccaagtctttaacatgtgggcctctaggacccagcccagagccaaactatagaaatgtgtgtaaaatgataagtataaaatgtgtgtaattatcataagtataaaaatcaaagatcagcctggcatagtagaacaggcttttaatccaaacacttaggaggcagaggccagtctctgtgagttcaagtccagcctgatctataaagtgagttccaggacagccaggaatgttacacagagataccctgtctcaagaaacacaaacaaacaaagaatcaaaatgcacaaatcagactcaaaattgtatcaattcccaaaggaactaaagtaataattaaagatagaactaaagaaaacattccaaatctgaaaaaaaagtcataaaactatgtttcttaaatagttcgctatgtgtcccaggaaattttaaacaaaaaatatcaatctagagaaatgcttgagatccaaaatatcttataagtatttagaactatctatgtgtattacatgtgaccacgacactgaaaagaacaacaacaacaaaaaaggtgctttaaggcttctgctttgtataataaagagtgcaatggaaaagaatcttcttctttggttccttctttatcatttttcaataggattttattaaccattctacaactactaaaacatctaaagactgactcagccaacatagtgccagagtgtgtatgtgtgtatgtggtggtggggaggtagggtgactcttctgtttttctccttaagttggtttcttttgtgaaatgactttgaagcctgcaacttacattgtcttctcttgatctacaagattctggtagtatgatgacaacccttactgttctttccatctgatatgaccttttgtttttcctccttgctaattttagccttttcagaatccaattgacgtatctctcattataaggcctatgtgctttaagaagtaaattctttttggctctcttatctattttttaaatggacaagtaattttttttcttaaagtcgggggtctcactatgtatggaactttccatgtaaactagactgcccttaaatgcaacttggtttcacctgcttctgtctcctaagtgctgatgttaaaggtatgcactactacacagcctaaaaaaggggggggggttaggagtagggtggaggggtaatgggaggggaaggagagggagaagggattgacatgtgaaacaagcttgttcctaatttgaactaaatgatcctttcctcctttcagaaaacacattaaaaatcagtcagctaacttaattagaaaattatttttcaagcccgatccccacatactgaaacctcaaagacctggcagcaccctcaatcatcacccactgcatcagtgaccaccagagccttggccctgcctgcacctggatgaggtaagtgtgtaggctcctggctggatggccttgctctctaggccatagccccaggtgacacatcctgaattccacccctccccactgaagcctcagagaccaggcagtaaactcgacacagcccaaccatcccccactgcatcaacgaccaccagaactgtgaccccacctgcatctggaggacgctcagagacctggcagcagcctctccacagccccaaccatcccttaccacatcaacaaccaacaaagccaaggtcccaagtgaacctggagaaagaccacctaagccacagaccccacctgcaccaattggaggaagaggaaccccctgaagcacaggccccacctgcaccaattggaggaagaggaactccctgaagcacaggtcccacctgcaccaattggaggaaggaatacattcaacaacataagaggattactgcaccaccagaaactagtggctctacaacagcaagaactggacatcccaacacaaatgaagcagaagaaaatgcccttaaaaataacctcatgatgatgatagaggcccttaaagaggaattgaaaaattcgcttaaaggagtggaggaaaaacaaacaaaactggaaggaatcaataaatctttaaaaaaaagcaacccctccaaatcaaacaggtgaacatttcaagataggggattcaaagaaaacagttcaaaggatagagctttcaaggtatgcctgttattgtaacagaactttgtgttacccttcataatataactagaatgcaacactcctgaactcccactgataacgaatgtccattctgaatcaaaaagtacaatcacatttatgctttctgaactgaaatcgcacaaaatgttagctctgtggcctccacacacagagtaactgatttcattgttggtagctcacagtacacgtttagataggaaagcctttgagaagtcctttgaaagagaaatcactacaactttgtttacctctgttttcacaaacttatttcatagcagcaaattccttagttaacaaaatatcccattcacccatgtgtgtattctatcgaaaatggaaagaaacacggcatgagatgaagattcagaatatagaacaaatacacaggttttgctgtgttcagactaaatgctataggcttgcaaggaacattagaatctacattttaaaaagcaatatcatttgcaatcacaccaaagatgagatttagtcataaatttgcttatgtgatctaagtatatgcaagagttgcacgttagaaacagcaaaatactgacaaaggaaatcaaaacttaattagaaaaataaatagatacagggagctggcataatggctcaaccagtgagtgacggtgcttatctggcgagcccaacaaattgaatgtggaaggagagaattgactccacagaacagtgctcttacctccacaagtgtccatacacatcatatccatacacacaaatgcacatgatagattttaaaaagaactttcaagagaactaaacatggatattttatcacaactttatatactttatactttatatactttttatactttatatactttatactttaaatggtccccaggaatggaaatggcatgaactcccgaactaattgaaaacaaacaatagttgaaaatacacaagtgggtagagaagcatttgattaataaccatatgtacaataaatggaaaagtaaataatgctttcacacagaattaaatacctggaaacctnnnnnnnnnnnnnnnnnnnnnnnnnnnnnnnnnnnnnnnnnnnnnnnnnnnnnnnnnnnnnnnnnnnnnnnnnnnnnnnnnnnnnnnnnnnnnnnnnnnnnnnnnnnnnnnnnnnnnnnnnnnnnnnnnnnnnnnnnnnnnnnnnnnnnnnnnnnnnnnnnnnnnnnnnnnnnnnnnnnnnnnnnnnnnnnnnnnnnnnnnnnnnnnnnnnnnnnnnnnnnnnnnnnnnnnnnnnnnnnnnnnnnnnnnnnnnnnnnnnnnnnnnnnnnnnnnnnnnnnnnnnnnnnnnnnnnnnnnnnnnnnnnnnnnnnnnnnnnnnnnnnnnnnnnnnnnnnnnnnnnnnnnnnnnnnnnnnnnnnnnnnnnnnnnnnnnnnnnnnnnnnnnnnnnnnnnnnnnnnnnnnnnnnnnnnnnnnnnnnnnnnnnnnnnnnnnnnnnnnnnnnnnnnnnnnnnnnnnnnnnnnnnnnnnnnnnnnnnnnnnnnnnnnnnnnnnnnnnnnnnnnnnnnnnnnnnnnnnnnnnnnnnnnnnnnnnnnnnnnnnnnnnnnnnnnnnnnnnnnnnnnnnnnnnnnnnnnnnnnnnnnnnnnnnnnnnnnnnnnnnnnnnnnnnnnnnnnnnnnnnnnnnnnnnnncatactatgatatatacatatacatgtatatatgtttatgtatatatcatggacccaggtattatacacacacaagaaaagcacaacaaaatattaatagcagttacttctagaaactgtgatcagacaagttttcactttattcttcatacttttcaacatcttaatcaaaataataaacattagcttcaaaagacacacgaaacagaacaatttcttccttctaagaattctactctgtccttcaggtagcacaccattattaataatagtgcttattgagcaggaataatctcttttcagcatgaaacattttgtattcgtgcaaaaataattgtaacacctattagtcttaataagaaaatgtgctcaagttggatctttttcttttttctttttcttttctttctttttttttttttttaccaaatacctaatgttagtatttaaaggagagtctgactggaagaggaaaaaaaagactatgacaggcaccaaaatgttaaaaccattaatgagttaaagagaggaggatggaggctggaggctagaagcaaggaaattggcccaaagattcagaatccatctaattaagacagccaagaagcaaatctacatgtaatgcagtagattttaccatcaccaacacactgacactcagacacactgtcaggctccaccacaaaagtggcttccaagtaattttctactgtttgttcagtgagtcccttaagccccccaggtgcccagttttccctcacaggatctcctactccaaaaatgtctccagtaaaacacatgtctaggggacattttccctacattatttccaagaccagtaagtgacagaccatagctttgctaggagttaactgtttgatcttctttgtaggtaacattagggcatatgctagtgatgaaagctgctttctggagcgatcgtttctcattaagtaatatttctcccatagcctccagattattgatttttcttcctcttttgttttctttaattgtatctttccatttgaactttgcaactctaatatatgacatcataaattgctttgggatataaattgtctctgagctctgtgagcaagacatttctatcccttccaagaaccagacaactcaacaggatgaacctgggccattccaatgtgtgctgttccttctcacacagattcaagtttcaaatggctgtaatggcctttttttgatatgacggtgtgctcttctttagtgatcttttcagctcaacttctgaaagaaagaaaagtgaatctctcagcgcatgcacttatattcgaaactttttttgtaaaggttttctcccataaatataaggggaacattcattatcattatcaattcattggatcccagactgatgtagaggggggaaacacagcctttcaattacattgaggttcctgtctcagctccacagaatgtttaatgactccatgacatcatttaccctctcaagtctccatatacttttatgcaatgaaagtttaaaagtgcctttctcatgggatgtaatgatgaacaaatgacattaattaaccatgctctgtaactgttaaatttttcacaattattttattctactttgatctattatcatgaaaagttactatccctattgtgtctgacagagtccaagagaaactcacatnnnnnnnnnnnnnnnnnnnnnnnnnnnnnnnnnnnnnnnnnnnnnnnnnnnnnnnnnnnnnnnnnnnnnnnnnnnnnnnnnnnnnnnnnnnnnnnnnnnnnnnnnnnnnnnnnnnnnnnnnnnnnnnnnnnnnnnnnnnnnnnnnnnaatatacggatatatatgtatatatatatatatataatatatattgtatatgtatttatatgtaatataaatagggcatttttggaaacaatcattttacatatcaatcccccatcccctctccctcccatcctcccatacccgctaccaaccctcccaacccatccccacccactccccaagaactgaggggacttccatgggggatcatcaaagtctgtcacatcatttgggggagggcctaggccctcctctgtgtatctgggctgaaatagtatccctccatagggaatgggctcccaaagtccatttttgtatgagactatcaatatgcacatgtgtttgcacagatacagaagtatctatgatgttctctctttgtattcgtgtgtatgtgtgtatgtgtgcctctaaactacatgaatgtgtgaatacatatatatatccatgcattgatactccatgcataagtgacatatcaagcttctgtgttgccaatctcaatgaacatggtaactccccactttgaagataagaaataccagcaggcttgttgtgagatgtgctttcaacatgatcacaacactggttgttttcaaagctgttggagaaaaaggacagagaaaaatgagtacctattacaaagtcacagacatactactggaaaaaaatctattttgacctttgttcacattccatctgttctagtaactagagtgagtttacaggttcacaatgactcaggtttcatttacatcctcagaaaaaatagcaattggcaatacttggcagtcaaggtggaacccaaaatgagtgacagatttgttgaagacattgtcatgagctgggaaaatgtgataaagatgctatcctgaactcatgcattgaaagaacctcatgaaagacatgttaccaacttagaaaactgtcaactaaaaaatactaaaagcaaccccggaatagtgataatccacaaaattctatattccgagtagaggtataggcaaaaaccccaccctgaagatggggtggggctccagagggagcttctcagagattccacatccatcaacttggtccaacctaccatcatgtcctgttgaacagttgcactattagcatcctagctgttctcatcctccatacttgcatccctacaattctacacacaagcaaccagggaaatgcctttaaagaatgaatataagcatgttacttctctagctacagctcatggaaggccttctataaacatctgaggtaaaatcccaattatgtgtcagagcaaacaaggccttaattgatatgaacttcttctagatctttgttccctattcctctgcctcaaccacctgacctccttgctcttccatagactctacaagtgcccactggttttagcatcctagaacttgctaagctctctgcataaaatgctcttctaccaacatgctaaaataataccttcaactcattacaagagacaatcttagggcctggagagatggctcagaggttaagagctctggctgctcttccagaggttctgagttcaattcccagcaaccacatggtgcctcacagcaatctgttatgagatctggtgtcttcttctgatgtgcagatatacatggaggcagaatgttatatacataataaataaaatctttaaaataagagagaatcttcagactgatatatatcccattcccgtcccttatatcccatcgatgttcttggcatcatatgcatagttgtgttgtttgtttattttctttcttccctaactagaatgaaagctttttgaaaatatattctgtttatcatcatcactataacatgtctaaaactgaacacaatgcataacacatacaaaatgcctaatacatgttgtgaatgaatgaacatatcaatataattcctgttttcaatgaacaatcagccagtaggggcgatccagacaggcacggctagctataatgcaagccaaggggatttaacaaattatagggtagtacaatgaagataaaattaaatctagctagggttagagaaggggcagagttttctcacacataccgacacttggacacacacctgggaatttgaattaggctgaaacagatagatgagatttcaataagaagagacacagggaccagactgggcccagcacaaaaacctgattgcatagatagatatgctcagtatgttccaggaacagcaaacagtcctgggagaatgccatctttgagctgaatacatggaagaggaaacagagcccaggaaaaagggatgtagattttaagggctctcaacttctagaagtgatgctgctttatgcagtcaagaaattgtttaagaacttgtttcaggtcagactccagtcagtgctagaggtacagaaatggaattccctgtacccatgtccaggatggatacatatacaaatggacaatcaatttcaactatgcaccctaacttgccaaagctttctaaaacttagggctcaatatttaattctccagaataatccttgactcctgcccaaacatataaaatctttctagaaaactctcctctgctaccttaacgcctcactcttgtatcctgtcgtctattcataacaactgttataagttattcagattagggtcaatagctgatctgaaaggggaacatcctgaaaaagggcaattttcttcagggtctgtttttttttttttaagtctaatcaaattactttagagctgaaaataaagacatctcaatcctatctcctacctaatgagtgttaagccaattgaaatgtgagtggaagaaaaaggcaaaaagaaactcacacctgatgatttattacaacatcattataacatgtaaggaatcttttctaaatctgtgcaaaaattcttaaaataggagtagaggtagaagaatataaagcagtagttcacatgtaataaaatattgtgtggtatcctgtagaccagtatttataagcatgtagttagatcacagcacagggttgtatggtgtgcattacttgtgcttatatattctcaccagcttaataatagccaaatggaagagaatttgtaacattctctgctcccaaccttctgcaaatcctcttcaagatgtcaagatgttagttctgacaagttcaagtcgtaatcatgataattagtatttgacactctgcagcctctttgccaacagtgcatgttgttcatttgtcaacatatagctgcaatatagaaaatatttatcacatgaaccacattttgaatcatttaggaacattttgataagctaaacacactgaagggtgcttctattactggttgttgtttctttccccctctgagctatcgctatttcattaagatacgattgtataagctaaacccatttaatactcattttgcttattgagttgagttccttcaaattcttccctgatatgtagacatagcatcacaaaattgacttgctaaccttaaaagattaactttgaattgatataattttcacacagacaactactagactctgtcaggtatccatttcctagtcactgtaagtgcatgaaaaggatacatgattattctgtgtaaaggttcatttcttttttatataaaacagtgtgagccatgtgataccacaaaaccatcagtaaagtcttacggtatttttttatttgaattagaaacaagattgttttacatgacaatcctagttcccttctccctcccgccctcccctaccaccctcccaactaaaaccctacctgtcacatatcctttctgctccccccccccggatggtgaagccttccatagtatgtcatcagaggctatcatatcctttgggatagggcctaggcccacccctgtgtgtcttggctcagggagtattcctctatgtggaatgggctcccaaagtccacacatatgctacggataagtactgaactactataggaggtcctgtagattaccgaggtttcctcaatgaaatccaggtgacatcagtcagtcatcaatctcattatcaagggagggcatttaaggtagcctctcctctgttgcttagattgctagctggtgtcatctttgtagatctccagacatttccctagtgcctgatttctctgtaaacctaaaatctctccctctattatggtatctccattcttgttatcttttattcttcccctgactcaagctttctgtcccctcatgttctctgcatcccttctcttcttcccttctcattctcctagttccatcccccgtcttcccatgttttcaatttgcttaggggatcttgaccttttccccttctccaggagaccatgtttgtctcttttagggtcctccttgtttactagcttctctggcagtgtggattgtaggctttactctctgnnnnnnnnnnnnnnnnnnnnnnnnnnnnnnnnnnnnnnnnnnnnnnnnnnnnnnnnnnnnnnnnnnnnnnnnnnnnnnnnnnnnnnnnnnnnnnnnnnnnnnnnttttttttttgctgagtagtactccattggtaaatgtaccacattttctctatccattcttcggttgaggggcatctaggctgcttccagtatctggctattacaaatagtggtgctatgaacatcattgaacagatgtccttgttgtatggatgtgcttcttttgggcatgtgcctaagagtggaattgctggatcttgtggtagactgattcccattttcttgaggagtcaccatactgatttccatagtggctgcacaagttggcacttccaccagcagtgaagaagtgttctcttttctccacatcctgtccagcagaaactgtcattggtgtttttgagtttagccattctaacaggagtaagatggtttctcagagttgttttgatttgcatttccctgatggctaaggatgttgaacacttccttaagtgtctttcagccattatataaacgattgttttctcatgggagttcaaagctaatgcgtaccttctgatttaaaaaaaaaaaaaaaacaagtaaaaatttaacttagaataatttaatgaaatttcttttccagaccaacataaggttcaagttcaagaacctatggcacctatgttggttatccaattgagaaaaaaaaaatcacaaatgttatgtacagtagtgaggacttctatcatgttaagataaacaccagctacttgtattcacaagtttaatattggactatttaaaattcttccaccatgttaagcagtctcaatggtctaattactgtgataagcctatgtatcaagacctgtgaacctcacttagtttacttcctcttgttaccaaggagaaaaatatagccagtccccgacactgaccctctgtgtggctttaatggctagttcagtatttctgaccatgggtggcctggcccccttatgtagaagctgataaatacctgctcagagatacccggtatttccccataatgtcagctagaaactacacagtatgtacacccaagccctgtagttttgacatttaataaagcattgtatagagagcaaacaaacataatcagggaaagcatatgagcaatgagataacctccttacagaaatgacatcacagcatattcttaatagcaattcccctaaaactgaattccaagattttttgccctggaattctgatacattattacagtctccaggaatgaacatttgtagattaaaaatactaaaaacaatacaagcttgtgaaaaacttcaattgaatcgaaaaacatgaagggattaggtcacaaaaagataaatttatctttaagcaatgtgtacctgataaattgtacatattcaaaagtccacccacaattccacttctggctaaccaaccttagaattaagaaacttacaaaaaatgttgtagttatgtatctgtattggaagtgggttgaattgcttttgcatttctgtctctttgcctatatagtcagtccttccttgtaaataatgaagaaaagaaggaagaggagaagggcaaggaggaggagaagggggataagaaaatacatccagaaactgcataagcagctgtatgaatttagagaaactcttcagtatccctttttttgccaaactgttttctaaagtcaggtttctgtttagtagtattcaggtattataatacttttatctctgacatttataagctattgttctccagcagtggttattagaagacagccatctacttaaaactttttaaacatatctgcattttcctctagagctctccagttggggatctttatcagcatctagttactagtcttgttacactcatctcattatcttcttcatgaatccatgacttacacagcctttctcttgataaatggcacaaccatgcctacaatcccaaaccacaaacctggttccctcattagtttctttcctctctcatctggactgtacttggttctgtttattttatttctatgacattacaccacatatacccccccacacaacatatacacactcacaggcatacatacacgtacacacactttgctctagctccattgctcttaatccatttgttataggtaataaggcctggaattcttgcagggactcttcagaagaccccagggataggtctcagttattaagcatgatgcaattagtagttattccatgagttgccctgcaaccttatccaagctgcatctcacttcttttaagaggcctccaaatctcaaagtcttattggttcacttttcctcttttgaacattctgcatgatgtgcaccttccctaccctacccctgttctgttctatcatccattcatggctacattcacagacacctaactcccctttcatgcacaagtttccctttccttgccatggttattggcaatgctattacttgggatcattttggttactatttccatcctgtgtttctcatgtttttttttctgtaaagtctattattttattggctactattgcaactttattatatacatttaacaataaagtctaaaattaatccatatcctaatcctttatgtaacaacataagaatgccaagcacatttaaacttaactccatttaaattctagtgtccatacctgacccctagattatcactgtcataaaagtaaataaaatgaataactgaaaatgaactttcaagagaaaaaataagtatatgaaaccagaatttgttttgttgctgcttgtagcaagttagacacttttatgctattatttcacttcagtatcaggttatctcttgtggaacatggaggagaagtttaggaaagaattacagagtccttaagcagaagtaagattagtgtgaagcatagaggacaaaagaatcagaccaaggagattactaatgatttctgaaacattctatcaccatgcacaaaactcaagtccaaatggatcaaagacctcaacataaaaccaaacatactgaacctcatagaaaagaagtgggaaatacccttgaatgcataggcacaggagaccacttcctaaatagaagaccagtagcatagacactgagagcaacaaatacatgagaccttctgaaacagagaagcttccataaagcaaaagacatggtcaacaagacaaaatgacagcctatagaatgggaaaacatctttaccaattctacctctgagagaggactgatctccaaaatatacaaagaagtcaagaaattagatatcgaaagaccaaataatccaataaaaaatgaggtacagatctaaacagagaattctcaacagaagcatctcaaatggccaaaagatacttaaggaaatgctcaacatccttagtcatcagggaaatgcaaatcaaaccaactctgagataccatgtcagaatatctaagatcaaaaaactttgttgacttacactagagaggatgtggagtaaggggaacacttctccattgctgatggagtgaacacctgtacagccattgtctcaatcggtatggcagtttctcagaaaactgctaatcaacctaccttaagacccagcaatactactttcgggcatgtacccaaaggataaacacaccacaaggacatttgctcaactatgttcgtagcatcattattcataataaccagaacctggaaacaacctcgatgactctcaataaaagaatggacaaggaaaatgtagtgcatttacacaatggagtactactcagcagtaaaaaaaacaatgataccttgaaattttcaggcaaatggacagaactagaaaagctatcctgagtgcggtaacccaaacccagaaaggcaaatatagtatgtggatattagacataaagcaaaggacaaccagcctacaggacacagccccagagaacctaggtaacaaagagaatcctaagagagacatgcatggatcagcctaggaaagagaaaaagacaagatctcctgagtcaattgggagcatgggggcagaggggaggagaagaggggaagaaggaaggggaggggggaaatgtatagctcaattaaaaaataggtagagaaagaaaggaaggaaagaagaaaggaagggagggagggagagagggggagagagagagagagagagagagagagagagagagagagagagaaagaaagaaagaaagaaagaaagaaagaaagaaagaaagaaagaaagagatggagttactagaaggaacatcatccacactgtgccagtgatggacccaagcacagaatactgtcaatatcaaagaggaaaaggtttgtatttaagaagaagaatgactcaactttttgaatgataacattgtatgtgcaaggatacacaaccttcagggaggggatggaaaactgcttctgaaaactcagcattcagttgtctgcaggaaggatacactatgtcctctctgtcgagtatttccagtcctatgagataatgatgttatcttatactcatcatatatttacatgatctcttggaaagcacggcatgttctgtgcttacttaacactctcaagttctccttcagaataaaagtatcatagcacatttaaacttcccaagggaatgcatcacatctttgaccatttttgtgtctgccagccaaactctccccaaattctctgcaacttctaataaatagcattaaaataaatatgcatctctccaataagaactctggcaatgccaagtcaaaataagcagattaccccatggcttctgcatgtcatgcatctattaatacatcttaggatcatgttcgcacttttaataatagcaccagcctgctgactcacatgcaggcatgtttctacttccttcttacctacataatgattccctttcttgtgtcagtttggtttattttttatctctaatcccatcctgtttagtttggccaatttttagggttttcatgggtctcttgaagttttgccctgacttccatgcatcaatgacaccaccaaaatgaacattttcttatataactttcaaacagtcaaagaatacatatgagttggagaacttgtgattatttgcaattacgtgggaagccctctattagctttgggggatagacaagcttgatttatctcctaatacattacactctttcagagatctggataagaagttagaaaactagtcagacagcagaagttcaaaaggagagctatactttcagcatagaatcatgggtctaaattttgtgactacatgctgcaatatcacttgacctccaaagagacagatacagaagagggaaaaggtaaaagatcagaatttatacaaatatataaatcagacctttatcccttccaacaacgatgcaagattgttagagatgaggaaactcagcatttactgggaaaggcgaactcctctaaggttgtatatctctagttactgagtaacagaattagattccagtcaagatctatatgactccaaagtccatgcatcagaccttgctctgcaatatgtcccgtgcttctgatttgctgacagaacaccacatggaaagaaacctaaattttcagaagtggagatatgtctacttcctcctcatgtggcattgggtcaagggttggcaacaaactgacttcaagctcaatcttgactattctgataactttttgacaccctgaattcagaaggccactctctgatggcttacttacacactcatgtctcaaatatttaacattccttgtatcatttctggctttataatgtgttccctgtttttcaaatttagagttttgtcttttgaaaaaaaaaactttctatagttaatattgcaaagcactcaacaccttaagaaataccttgagtgtctatttagatcatttactgataatgttttctgccaaaagaaggtaactaatatttaatatgtattcagacaggaagaggaaataatgcaagaaatcatgtagtgcacagaattaatagatgatatctaaaattgcatactcaaattctgtcactttcattcatctgcagacttaatgtttaactagttctcatggtaggccactctgagaaagttctcatagtgaaagagcaccaccaacaatgatgtctcaattgtaccactgaaagtacatcaaaatttttcttcctcatttctccaacttctcttactaccacaattaatcaagtcaccaatagtaagccatatttggttcctagagttatgttaatagattatcctctggctgactcctagtaacatctcttctcaagcatacaccattatagaattggatttgtgaaagtgcattactacagcttaatttacatatatcctgtaaaccaacaacaaaaacacctgcatgtgttcaatcacaatgagaatacctatctatgttggagctattggcaaagtccaagcagaaataatgcaaatgcccagctacaatagggtagatacattgtcctgtcttcacacagtggagtactttacagtggtgggaaggagtaagtacgactacaatgcaacaacagacatggatctcctaagcctaacaaggaggaaaagaaccatatgcaaaacagtgcacagtagtgatcctatctagaaagaacaaaaggagtaatattaaatatttgcattcccagtcagacagttgccatccttaaaaaggagtggaaacagagattagaaaaggggcttctaaaatgtttctaatattctgtttcttaatcacaatattggttggatgtatgctgttttgagaaaattaattgacttcattttctatatgtgtaatatacttcaataagagttgttaaagccccaaaaggcttgagattttaaatagctaattttgggagagattaaaatggactgtataaaatgtcacatgtgggcgagaaaagttttgagcaaggatctacattccaatcaatatggactgaaatgtctgttccaagatccatgtgggctttgaagctcataagatttcatgcctccacacacaatgctattagtttttgttgtaactgaatctttccaggccacttctggtcatgctaagaggctcttgttgcctctgaaagacatgccctggactgtggcctccaaccaaggctccttccagctagtttccaagcagtatgttactgccgaagcatcctttgacagttactttttgtctttctctcagatgttccgagatatgatccctctttgacaccttcagtttacctaacttacattcttttgtgtcaattaaaagtggagaaccagagctgagtggcatattcttttcaattcacttagctatccactcagtccagacagcttgaaaagctcacttctgtcttcaccatccttctctgcttgctgcatctactgcacagaactgattgacagatgtgggtccccaaatggccaaattacagctgcttcacaccaccagccttttccatatattccttcattgtggtaaatgatcactcagaagccttcagcagtgtttactgggagtaatatactgacaactttatatataatttgcccagatttgtccataacaagtaagtggtagcatctagaccatctagctcagaagtccaatattaaaaatagtttcagccaacttaactgtgacaagagaaaaaaattaacatgtcatttagcaagtactcaattatgtcaagaacaggatgttaagtactctcctatagaagatcttggtcagttcttacacaggcttgtcacatggatgtcatcattatcatcatcatccttttgtggatggaaaagtagagggccagagttaacatgttatcctaaaccacacattatgtgtaaagcagaacaagatctcaaaacagcaatccatgtttttgcagaagtaataaatactttgagctttacagatcaaatgaggactgtcatgcacttttctgatcctttgtttcaccattagttgactgcattttacaagcctttaaaaatgcaacatttgtcccaacctccatgacaagatctgacccaaagatagaagttgacagattactaaaagccccctgaattatgagactagaggaaaagatataataaagcacaggctaaagactggatctcaatttaaatctgagttctatcagttactatctaatatttaataaagagtttacaaagtgacaaccaaagctgcggatgtctcacatatatttacttacttcagcagctctcaaccttcctaaggctgcaatctttcaatacaattcctcatgtcatggtgacgcccccccccccccccagccataaaagtatttttgttgctatttcataactgtaattttgcaactgttatggaacttagtgaaaatatctgatacgtgagccctgagaaagggttgcttggccctcccaaaagggtcatgacccacaggctgagaaatgctgattagtcaatcttcataggaatcctgaaggatagttctgtatccattctccagataagaaaactgagatccagagtacacacaaaagtatcacaaatttgcacacagcaagaaattgatagagctgggccactgacctataaaacatactgtgatcttaaatattatgctaatagttactgaaattaataataaactgcctgatgaatttgtacatcaaaggaaattgtgctgttaccaataatccacttttctttcaaagtaattcttcctgacaggttgctgtaatagaactggaacatctaataagctacaagagactgatcccactcacctgctggtttatctgtgtgcaacataaaacccaagtggggtggctatgtactggcagaaggaaacactagatatgataacaattattcccagtaagggaactaaagttctgaattgagagtcaaaatataaacaggtaaagagctaagcaggggatgattagtaggtatccaagagaacaagtggttggggttgagatccatactcaaaatcacaaatacaagaaaacttgagatcctaagtctgccctaggaaaacaggagggctgagggctgggctgcagtcattgcatgagtaagagtgagtctaaggcttggatcttcaccatgtgaaagggaggttcatcttcaaggtagtggggagtcaggttcatgacaggctccagagacaaaaaaaaattgagagattttttaatcatatgagccttacacaaattctttggctaacatgcgtgaaatcctgggtttgatccccagcaccgcatacatagggcatggtggtaattctggtagttagtagaggcaggaagatctagagttcacgatcacccttaactacatgagacttgcctcaaaagaaattaataaataataaaattctttaatttctaaaagggcaaaattggtattaatagtcttatgcgattaaccatggataagaaacatgaaagtttaaaaaaagaagacttctgagaaccactgaggaagccgtccttttgccctgaaacaatttttttgttcccctcttctttgcagtctttgtaagctcaattcttccatactgttcagctttgtctcactcccacaatctttccttgtccttccagcctgcctgcttatgtttgttttactcactagtctgtaagtttcagccaatctgttaagctcatcatagaatcttcagggtgctcagcatcaatttaatgattaccctctatgaataaatttctataatcagggtattaaaatacctaagtattattttcactaccagactggccaaaatctctctgaagctgaaaaatatgtactaccagttatctggcagtcttcagtaacaataccaggaaaatcacaagacatgggataaatagagtatcatcatgttatttatacccaaatatgctacaaggtctccaggacagaaaagggactatataaataacaaaaaaagttttactggtaaacaaatagctagaattcttatgcctttcacacagtaaacactatgctttttttttcctactgatgaaaaactttaccagagccatcagtcctgtttctccctatctattttctgactgcagatgactataatttactaagtcacctacctggctggcatcactggagttgctcagtatccacagtgcctgtcgctactcaaagagcaaaggcatctttggcatttgaaatgaacaaaaattaatcaatagagaaaaagaacaaattaatttgaagttatgtaatcttataccctgaaaagaacctgattaaatcgccttcctttgcagctgtttctaatctgggacagtgcaggtgtttacaatcttttgtaagttgacctccagtgacccaaggataaaaattttaattgcttatcaaatgtaattttatggacgagataaagatactgtgaatgcatataaactcctctgaaatacagagtctttcaaaatgggattttagttagctcactactctttctttagagttaattgattttcttgacatctttttagcctggcaaactgcctgcctaagtactttatctgaccttcaggctgtttgccaagtattgatcctgtacctacaatggctgtgtcgcacccgctcctccaactttgataagagctaatgtactatgccggcagacaggaattcaatggtcacaacatttttctcagcctcttctatcttcttttcttcttatacaataatttgggctctatcaaaatctgatcttcaacaaatcagatagacatttaaacctaatttttcttctagaaacttttggtgtatttcttaagtcaacttctataggcaacaataaataatgtttacaaatatttgattccatagtggagttaatattagtattacttgatagttttttaaaagtaaagctaagacttatagagatgcttgggaaatatttggagaaaatacatggtgtaaagggaagagataaagttagcaaagagtattgaaatcatgccctcaatataatagccaaagaagataatattttcttgtcctcctacagtttagcttataaatggatggattacacacacacacagagagagagagagacagagagacagagagatggggagggaagaggaaaaggagagcaagaggaaaaggaaacagagagagagaggaaagggagacagagggaggaggagagataagaaagggagagatagtttgttcccaacccaaagacaatagttcatactttaataaagaattcacataattcttctatgtatagcactgtaagccatttacaggcttatagtgtatttgggagcagaatcatgctaggcttctgggataactgtgcgtagaattagtgtaatcatgatgaattttagacttgtggttatttgacattaaattctaggagttttactgaacccaaatagctctggactagcaaagatgtgctatgaaaggaaaccctattctccagcccaggatggagtctttgtatatgatgaaggatctaaaagcagaatcaccaaaacaagtcccttggggaacacagagccttgttctggtgtatttgatgtactgaggttaatgtgaggtaagactgactgatgctctagtatagagcagctatcattaatgtttgcactggaacatctaactttaaaaacaaaaacaaaaatcaggaaacagaagaaactaaagacattacatctggaacaaaatgatactaagagatatctggtttgaattctttctaaagagagagagagagagagagagagagagagagagagagagattccaacccaaaagcaatgcacactcagcacattcttctatgtatgccacctacacattctccatgatgaaggaactggttagaaccttagtggacactggtctctgggtaggaaggggcaaaggatcccttaaggctggccaatgcagagaagatacagagggttctacagagctggttgttggaggaagacatattgagggtgtcttgagactagtgtacataaatccatggaagcagagctgagggaaaaagtgcttggattattttaatatcatactcattctaatgaagatctatgaagctttaggataattcaattatataaagtcagttaggttcagatagagggtacacggtgttggccagtaagagggagaagaggaacatctaagaaaaggagcaataataatgaaaaaaacttaagagagatacacaggagaaagtcccaatgtggacagcacaaacatgtggcccaggaaacttcagcaaatccatgacttcttgggacttacattttgaataaagaaggactgagtgatatgtgataactgttccagattgttctgtgaattatcagctaaatcagtactgctcttacaattacaatggtgtttgtctccagtaactggaagcaaagaaccttgaaaacaaaggggaggaaatgaactgaaatgtgacatttgaaaaaagagagggggggggagttgggtaaatatgccttggggaataaagattacaacatagtaaattttctgaaaatatgttttttccaggaggtccaagaagtgtggccaacagcctaggaatgtgtgtgtgtggcagaagaccaaatgctattgcagcaagccatgtggatcctggggatgaacacatacttcatttacctcttccacaaagggtgggaaggatcaggtatgtggtaaaatttgtgggtttgcaacctttgaaaacaagagataaacaaagaaagtagttcagtcaatcttggtaagcaaaattgatagagttctctataactctgtcaatcaatcaatcggcaaatcacaataaataaagagaaagaaataatgtgggagttatacaacaaaaatgagaatagagcttgaagtgtggtctgtatgaagctcctctctaggaagaccagcagaaatcacattgcctattttgtccttagttttcatgataggactgatttggagactgtagcctcgtttagatgtctttgatacagtctgaattttactgattcgaaccatcctcacattcccagaaggtctgctgctcataccatgtacatctctcttcttataaactgaaggggcaaagatgacagaaagctgccagcagttccgaagctcattcactcccaggaggtttatttcctctgagaagaaagagaccagatgagttatcacagaagcactcagcagctctgctggtgtccagttctaagttctcactaatgagatgtctcttattaaagagagctcaaccacacgggaaaggagagggcattacatgcaaagtccccacctacatgaactacagctaacatggaagtgagggagttgcatgatacaaaagaaaatatgaaccagatagtaaaacttctcagtccacaggagaccagtctccagcaaaatcaggagaggaggcacaaatgaaatgtgaaggaagccagagataagagttgacaatcaatcatacctactgccctccttgagcagatcccacaactttctacaattctgtgaacagcagtcatgcctggctattgctaaccactagagacaccatgcccgctcagccatgctttggttctctgtgttctccatgccattcatgcagcctgcgggccattctagaccctaaactcctgccaggtgtcctgtcaggaaaagatggtttattctaggtcatgctggcggctgagcccaagagcctgctgcctgtgctgtgtagaccttgccaagttgagctgcatctagttttttttttttttttttcttcaatcattcctagaaatatcaattctggaaaactgttttcccacataaggttttggcagccagtcctcagcagttacctcattctttcctctgctgccatctgagagagtatgcaggaaaaacagtgcacctgtaggcagactggctgcacagagggtgaaggattggatacactctccatcctgacaggatcctagggggcagggacagacttcatggagttaaagactgttagtactgccagacacctgagacttcacctagcccaaatccaccactccacttgctgggaaactgggctgaaggaagtctcctctgcaggttatacttaaacgtatttgcaaatggatgaactgaatgaacagctaatgaactaggaggaggacagggtaagtgcatttgtggagcatgaagtgggatcatagcaagaagagatctttggcactgtttacctcaacctgttcaagtggcaataacagggtaccacagaccaaggaatttgtaaacaatagaaatgaatctcctacaggtttggaaaccgggatttgcaagatcaagacatcagcaggttctatggctgcttcgaatctgtttcctggttcgtggacaggtattttctggctgcatcctcaaaagatagaagaaaaagagaattctctgggttcttttattttataaaggcaggaacccactcatgagaaccctaaccctctttatcaagatccctactttctaatagaatcacaattgggaatgggtttcatcacatgaatttgaggtagaaacaaggaattctgtatatagcgctaagtagatgcacattcctcttctgttcttggggcaaatcatagccactggtcatcagactttatttttggtccaggcagcatcttctgaaaataagctgttcatgactcttctatattattgacaatgaatcataaagggagagttagagcaagtcttgggaagcatatggtcatatcctcatattttagacacgagagactaagatttgaaaaaaaaactgaaacagctttcccagaatatccaatcagcatgggatggtcacagaaaggaaaagtaataggcagcccctgagctaactgtccttgaccattctttttcctacagaaactaatctaaaacatgtgcgcacacatacgcccatgtgtccttacctactgcaggtatagagttgctaaatatactacttcaacagctgggattttacaagttgactttctacaaggtgtttgtgagtttcttaaaatgtgttacgccctttttttcctcagaggtatcttcatatatatatatatatatatatatatatatatatacacacatatatacannnnnnnnnnnnnnnnnnnnnnnnnnnnnnnnnnnnnnnnnnnnnagattactttataccaggaacctcaaaacctggacagtaaattcaagctttagtcagtgtgaataatcattttgaaaaaaaaaatccagacaagatcatcagagtgcatcagccacttagaagtccagctgatgatgcttccatgagcatctactgacacacctgattagggaattttcctcaaagtcaatgagacctaataatggagtcaggccaggatgaacttgggaagctgctgtgcacttaaatccctgaatgaatgagtgatttagctcagtgaatgagtgatttagctcagtgaatgaactcacccaggtgatcacaaaccttctaagaacgcaaaggagtgtcctggagatgttcatcttttcatgcaaagccccatcactttcttctgtgtccccacagctcatcagcagcacaactatgtactgaagaggaatatgctaggaactgagttgaaatttctacctagtcgagaaactaagtagaaaccttctccaagtcatgacaaccaaagagagagagagagagagagagagagagagagagagagagagagagacgagagccaggaaggtatacaaaagactaaataattatatacctggcataatggcatcaagtaagctggtgaagcaataaacaattatgaagttaatagaatggcggtgtggcacattacagtgaattagaaggccctttcccttcttaatgggaccgctttctacatttgaatcttgtgcatcattatttagggtagattgatcatctactctgattataataaggaaggaagggaaaaatagaaaaatctggcacacagagaaggaatctgaattcctatggcagtgtggtggtttgaaagaaaatattgccaaaaggagtggcaatatttggggttgtggcctttttggaggaagcgtgtcactgtgggtggtgggctttgaggtctcttttgctcaagcttagctcagcatgacagtcagttaacttccggttgcctcccagatacagcactctgagctccagcaccatgtctccctgaatgccaccatgttccccaccatgatgataatggactgaacctggaaattgtaagggagtcaccccaaataaatgttttctttataagagtcgccatgctcatgtctcttcacagaaataaaacccaaactatgacaggtaggtacttagtgagctgaacccaaagaattaaatcccaagtgaaagttaagaatgggtggccaggatctgatccttagatgaatcccaggaatgtcatttgcaaactaagtggagtccattgggacaatgcacaaagaagttcagaagaacatagcaacactccagggagcagcacacagctttccaataaggtattatagatgtcaggactagagatctaggcagagtgtgtagataactaggtaaataagtctaaaggaataaatctcaaggggatgttatctaggggtgttatgtcacaagggctaaagggatggaagagattagagttgggtggtaccaggcacagcaggggagtctgataattttcagcccagatggtccaggtgctggaggaggatccatcacagcttactctttacctgcatttgttcccccatatagttgagatgttgcctcctacttcaaaatggaaaaaaatagtgtggggatcttatttgcagtaagtgtgtaagagtcctgttgctttgtgatctgtagctacacctgagaacatggtccatcttgaagagatgatattaatgaagggcaacaatataggattgccatgggcataacccagaatacttctgagaaagaaataagaatgaaatagcaccacaactcaaatcctacattgaaacaggatctattttctttttcaaagaaaaggaaataactacttctagagttcttggaggaagatttagcaataactgagtaataaattcttgagctaatataccatgtctggaatttcgataactcaatccccatgagcctcaattaataaagattagaccttgcttggcatgtataggggattctttttcttttaataactaactgtatctctggattatatagtttctcaaaataactatcctagaagcaagataaaaagccactgaaataaacaaggagaacatggggatggaagaatttcatgccgcttcctttcacccttaaactaaaatatgtttcatgtataagtgtgctttcccagtgttcagtggagcaaaattcctgtggctacttggcccctgtttgcactggcaggccctggaggcagcctgtgaaagggaagaagcagatgcagctgaccaggctgcattccagggcagcttcactcgttcattaagctgtgatcattaatagctgataattattgagttaagtaaagttattgcccccattttgtagatgaaaaaaactacagtgtgagtttggcagcttggccaagactacagtaagtggtgaagactttgtggtctaataaccatcatgtctcttaatcttcatggtacatgtcttgctctctcttggagttagtaagtggccaactcagcttagataggactcaatttttccaccaacaaacaaaaagtatgctaacaaattttgtaaatctgatggggaaaccagatgatataatacatgtttagactgcagctggtaatcaatcattaaataaacagtagccatacttgataggtaattgtttttatgatggctaagttttcactgacatatctttctttgagtcataatgctacagttctggcattacaaagaaagatattagtgccagattttcatttacaagaaaattacaattcccatttaatttccttccctgttttgagagcaaagccagggtcaaattctttaaagataaccagtaaggtttatcttagatccagagctatttaggaaaaggttacatgaatcttgacttccacctgattaccaaaatagtcaaactattagcttatattgaccatgacacagcgtattactcaaaggtagtatggagctactagcacatatgagctggctatttcctgggaacattattgtctccagagctaaaataattgccaacccttgcaaattatacctcttcctttccttcttccttgctaagaaatgagagtttatcaggaggtcacaaccaggaaacttcacagagagaagaactcttcctagccttaggtaccaactcatgtttgatttgagtgaatgatggtattctcttttccattattagttacttgtttaataacaaactgcattgggtcactccataggaagcctcagggaggaaggcttatggaagaagtcttttactctcaaaaaatagacattccagaaagaacatatttcttgccttcccttataatgtttgaaccaaatgttggtgggggatgtccttctgtatgttgtgaagatgtttttggttaattggttgatgaataaatctatttaggccaatggacaggcaggacagagccaggcaggaagtataggcaggacttccagactaggagaatgctgagaagaggaacacagagtgaatggtgagcaagacaccatgtacctgctgaaaaagcaagaggcttaggcatcaccagtaatccaagactacgtggagatacatagaaatggattaataattaagagagatagccaagaagcctaagcattcggcaaaacagtttataattaatataagcctctgtgtgtttatttgggactaaacagctgcaggacccagcacaacagaaacttccatttacaaaaggtatctaattagacttgatgagctgtaagatgatgaatctgcatatcagtaatcacaaacaataaatcaatactagtaaagctgaggacagtgctagacacccagatcccagcacttgtaggtgataggaaaagaaaggaccagaagtccaaagtgattctttgcttatgtggagtttggggcaaagctggactacaagagaccttgtgaaaaacaaaagaagggggtgggaagaagccaaggggaaaagagaaatcaacaagagcaaaagaatgtggaaaacagtccttaaggaacctctaaaggtaatgattaaccttaatgtacctaacaagaagtcctgtagacttgccagggaactccttcgttgatttagtcattgcttatgccatttgaagttcagtggtctattatttattattgtcatgaggggagatgcacatgtgtgtcatgactcatgtggaggtcagaggacagttttcaggagtcagtcctttccttcctctgtgagttcaggccctcaaactcaggttgtcatgcttgatacatgtcttctataggctgagacatcttgctggccttgtatcttcactgatatccaaaccaaggaatctaggtcttggcctaagcttaaggaacccaagttaacagacaaatcccagcgtactgttcctgtgactcctaccacaagcatatactaaagagccctcaggaaagaaaagtgatgtgagagtgaaaaaggccttggaggaatctgccagctccgacagtctttgagattcaggtacttcttcacatgctcattccactcaacttgactagctaacagaccacatcattcatctccctctaaatattacagaaagttgcaactaaactttaggttcagtatcagtgcctggaaaattgctccagaacgaacatatctacccccaagttgcatattttctgaaatttgccatcacactctttatatgttactataagatatgatgcctacctgatggtcattaagcttttgtagaactggtgagacaaagaaagcaaatcagtcctacagcaatgggggtgaatgggcttcacatgagctgctgagtgtatgtctccagccatgctaagcatcagcgtgaagaattgttgcctgagtggagaccatggagaaagacaagaccttttttagagccactacatgaaaataatggcaaataaaagactgacagcaagggcctcggtcttttaaagaggggactggacagttgctgtgagcacctgttccattcactgctgaaatgcagtgggattatatctggaaacaaaattccctaacagcacagtttgtgaaaaataaaacatactgtgaaaaaggacagtataaaaatctcccctcaattcttcttgagtatttttaaactacatatgtaaaagttgagatttatctgtaattttatacatgtgcatccacatacatatatagacagatagatgatgaagagaaggtgtgtattatctgttcagataatacacacctcaaaatggaagggataatctttaaatactgtgccgcatagacagagataagttgctctccaggcttgtggaatctgtgctatgctatatcgaatagacatgctccactctgtctcatcaatgactattgtcatcatgaattattcttgcgctgattagtcagttcctttcttcagaggcttgactaaagaactccccctgcaatttcaattgcactccttctttaccactgcgactcatatcctctttgtttcaccgggtctccaatttcatcctttccccctctcttcataatccatcattctctgtgagacactgctggctgagcactgcacaataggccttgtctcaccctatttaccatgcccattaaatctattagtctcagtacaccatcagcttttaaaagtgcccctttcatgggcccccttcttacctgttctaatgacattgttctctctcccagtgccctttgaacactcatgtcattaagctccgatttcactttgcttctgataatgacaagatggccgccctatctaatcttactctggagcctaacagaaggaccttcacagaagtggccacaagagatacctattgattgttccccttgcctctcctttcctcaaggtcccagagctgctgtttgtgtgattctttttcctatcgttgagtggccagatccccagagcaagacccaggtcatttgtgcacagcctcatctagctcacattgactgtttttagtgagtcactcccatggcataagagttggtgaatgacttccagcttttcccttttcctcgttcctcctactaaacattctgttcagatgtttaactccattttattccatcaaatatttactatctgagtgtattttatctgtcaggttctgaactaggtgttagggagacaagataaatgagatttagtcgttctccaaggatagtcctacctgggtactgaagggaaagattgatggagcaaccaatggctatagctgagacacaatggcctaagctctgccagggtcacagggaatctaatcacaccaacttctgttttgttgctgcactaagagcaagaagtatgtgaatagccaagtctagacagactatgccagtacaaggatgaaacttagtttaaaacctggatcagactccctcagcctagacacatgggggaaggcctagtccctatgccaaaggctatgacagactctgaaggccccacatggaaggcctcactctccctggggagcagaaatgttattggataggtaaggtgttagtgggggacaggggaggagtggaggagagggaatggggattgacatgtaaaacaatcttgtttctaatttaaattaaaaaattaagaaatattgccacattaaaaaatttaattttaaaatttaaaaagaaattggatcagttaccatttagaaaaccctaaaacaagcctcccacaagtcaaggacctagctggcctcagctagctggttaccaacagtagcactaattgccaagggctttcctgaggttgaaacagaacagcatttggagattcctagctacacacctgacatacatgttcactagtaatgcatagatctaagaaatcttatttttaaaaacttagtgacagtccatgaaacagtttcccctagtaatatacaactcatttttggagtttttgtttttgttttgttttttactaaaagggtgttggagttaacacatgtgccagaatagcttcgactcctcctaggtgaaggtagcaaaattaagtcatcactaacatctacctctgagacatggtgcctatcagaatcgaggtgcagagaactagaagctctccgggaaacacatgccgtgcagtagagctggatttattgccattgacagctgctctctagggggtcagaatttgaaccactagagtattccaggtcaggaatctgccacattaatagactttccatagaggtctccctgagtagcaaaggcttgaactcacctcctgccatatttcattgtgacagagagccctactctcacccgagggaaggcactctcacagaaaaataaatgtcctccacttagtgccatcctaatgactatatatcatcaatagcaggacagtgcaaaatgcttattgggccatgcacaccccaccctagcatttttaattataaatcacaaaagaaaacatagaatttctttgttttgcctgcattcaagataatcttatcgggattgtcagcaaagaataatagtatagtcaaaagaatattcaatgccccttcaggctcttttcagaattcagggtgttggcacatatttttaaaaccaaatttaaaaaaaaaacctacataatttagctcaggtgctaatttagcataagctgagagaaagaatgagtcaggaaaacgttttcccagaatgcagcttagcctttcaccccaactttctgagctcttgtcaatgcactgaaactggtgttgatgttaaaatcatctgacaacttgtaactcagctataagcagtgcaacataagctacaagtgtctatttatacacacaagcaacaatttccccaggagcctacctatcctgcctttcagcgactcctctgtcatcctgagagctataccctcctatggatgttagtctcttgttggacgccttaagttgccttccagttcctaataacctcaaggaggtgcctaccacagcttccaggctcaaacctctgtggagtatccattttaatactcagcattatcaccgactaatgtggagagagcgattgcatctgtgcctgtcaggaaaatgatagtcctggtattcactggcctcccaggaaaccaggctgccaggacaccggaagtggggaaagaggctctaactgatggactgtcagacatacaaaagggatgtggctttttcctgtgttctgttcttggcatcaattacatcatttgctcaagtcccatcatcaaccaatttgatatacacagctgaagcatcttataaacttaaagtaattacagcaaatagcattgacacacaactcaacacagtgttaacacaacagcaatgcaaggcaacataagcacaatgcccagctctggatcaaagctttcttattttaggaaataccacagttacacatttgctcaaaaatggtttttggaatcactgactcttttggcttgactagaataataaacctatggagtactataaagctatgttttaaacaaatgtctaaatgcaaaatgagagccacaattcatcagttacatgactgtcataaataacttctatgcaccaatgtccagttagagaagtacaaagaaaacattcacttaaaaggatagttgtgactttgtaataacatcatggatatagaacatgtagtatagctctcctggtaaagagcattcaataaaaaatacagtgtagcgtttgaataccaggcaatacactaattgtttttaaatgaatttttatttaaataaaaagccatcttattttttgtcttttatttttataaaaaaaagctatgtttttgtataagtgggtggggtttccacagagaaatgtgctgacaggtactttgcctgcccacattctgcagaatgaagaggaccaacagtaaagctcttctgacttccacaaagaacaaaaggtccgctaaaagtaagaggcaaacagaaaataagaaaagacaaagagagaaattattcagatgaaaaggggaatatgatcttgcaggaattgacctttgtcataaaagaaaaatcaatgtttaactttgttggtggtgaagtttatagcaaagtgccatcaattcaagacttattttcaaaggccaataattgattgtcactgtttcatttccagctccctcttcaaccatctcatcctttcttttcattgatagtttcaaaaaacaataaccagtttcagtaagaagtgttacaaaattgagattttttaatgaaaataaacataaaaatagctgtctctgatttaaatcataagtaattatttcttccttaagctacctataagaccttctaactctaagttcctcccacactgagttcattttcacctggtaatttaggaataacttcttctttatagtttttttcaggtcttattatttccatggaaatacccatatatcacagaattgatgggtttgtttcagaaaggttgtctaacctttaattccccaaagcatatctctcttgcttaaattttcgagggtgtgctgacttctgttatagaaatgaggtgggaaaggcaatgcattgctgcaaaacgtgagttgatggctgggacctctgttcaaagtaagcctgtcacgtcagtcttcctgagattcagggtttacatcatgaaatcagcaacattccagaactgagatctgtcatcttccctctggcttttccccatgattctttacaagggtaccacagcatgtccagggaagagatgagagtctgggaaaatgttgagaacattccattatctgttccaataatcattttcacaaagacaggggaacagttcatgagaaagtaatgtgtgcccattcatttgtctatatttctggacagagtcttgctaaatttatattccaggcttgcttcaaattctggatctatcttcctgaacctcccaagtgctgggattacagatgtgcagactctgtgtaagggaaatgggactctaaacattgttatatacttgatacttgagctgaggagcccatctttattttcatcggaccataacagaactctcctttctgtctgtgctactggtgttgtattcaggaagttttctcctgtgccaatgcattcaaagctacttcccactttctcttctaagaagttcagtgtaactggatttatgttgaggtccttaagccacttggatttgagtttgtgcagattgatagatatgaatcttgaaaaaaaagtcatcctgagtgaggtaacccagacccagaaagacaaacatggtacgtactcactcataattgggcattagctgtaaaggataaccaggctaaaatccacagcctcagagaaactagataacaaggaaggcccaaaatggatgcctggatttcctgggcaggagaaatagaagtgatctcctgggtagactaggtgtgggtggggatgggaatattagggatgaggttggaggaggtgtgtggtcggaggaggagaatactaaaagaggtgtcttgatacagggggcattttggggtcaggtagaaacctggctcaaagtaaactcccacgaatctacaaagataaccccagctgctaagattcctataatagtggatataactgaccatctcctgtaactggattgctgacgaccccaattgtcatcaaagagccttcatccattaattgatagaaacagaggtaaaaacccacagccaagcactagaacaagcttggggaatactgttgaagaggaggaaggattgtatgaaccaggtatgtgttggggggtgtcaaggtcaatacaagggaatacacagaaacagctaacctgggctcataggaatttacagagtctggactgacagctagagagcctactttggattgatgtaggccctctacgtatgtatgacagttgtgcagtttgtactacttgggggactcctagcagtggaagcagtgcctgtccctaatgccttggctgttcttgggttgccttgcccagccttaatacttgatatgccatggtttgttgacactcatgggagttctgcccctttctgaacagaaacaggagtagattggagggacacggggcaggtgtggaaagagaattgaagaagtgggaggggaaactgaggtcgggatgtataataaatgaataaatttaataaaaagtttgtaataagaacctctttttatgtttatgcattaaattatacttttacttttatgtttttatttttgtacatatatatcctttcttgctcactgtaatggcatagtagggggtgcctgaatttccatttctttagttttttaacatttcattttcagcctgatcactaatttaaagttttgtcactaagtccaaggtgagatggcacttcctgggcccttgtaaataggctgagacatgcatttaattttgctaatggtatgtaagcaaagataatatccattgctttggggcaatatacattggaaggcatttttttttcttagaaagaaaattattttacatgttaatcccaggtccctctccttcccctcctcccctgtacccaccccccaattaacgccctacctatcccataccctttctgctccctagggatggtaaggccttccatagggcgtcttcaaagtctgtcatattctttgggatagggcctaggccaagcaccttgtgtctaggctcagggaatatccctccatgtgggatgggctcctaaagtccattcctatggtagcgataagtattgatattctacaagaggccccatagatttccaaggtcttctcactgacacccacattcaggggttttgatcagtgccatactggtttccccagtctgggaccaagagctctcccttgttcaggtcagctgtttctgtggttttcaccagcctggtaaggattcctttgctcatcagtcctccttgtctgcatctggatttcagttcagttcaaggtttagctgtgggtgtctgcttctacttccaccagctgctggatgaaggatggcatatgaattagtcatcaatctcattatcaggagagggcatttaaggtaacctctcctctgttgcttagattgttagttggtgttatctttgtagctctccagacatttccctggtgcctgatttctctttgaaattacaatttctccctctattatattatctcttatcttgctttcttctgttcgtcccccaactcaacctccctgccccatcatgtcttcctcacccttcttcttctccccttctcattctcctagttccctctctcctccccccatgctcccaatttgctcaggagatcttgtccctttcaccttctccaggggaccatgtatgtcctccttgtttaccagcctctccggcagcatggactgtcggctgataatcctttactctatgtctaaaaatccacatatgagtgagtaaatacaatgtctgctttttgtgactgggttacctcacacagaatggtttcttctagttccatccatttgcctgcaaatttcaagattccattgctttttttcctactgaatagtactccattgtgtaaatgtaccacattttctctatccattcttcagttgaggggcatctaggttgtttccaggttctggctattacaaataatgctgctgtgaacatagttgtacagatgtccttgttgtaggaatgtgcttcttttgggtatatgcctaagagtggaattgctgcatcttgtggtagattgattcccattttcctgaggaatcgccatacagatttccaaagtggctgtactagttggcactcccaccagcagtagaggagtgttcccctttctccacaacctctccaacataaactgtcaatggtgtttttgattttagccattctgacaggtgtaagatggtatctcagagttgttttgatttgcatttccctgatggctaaggatgttgaacacttccttatgtgtctttcagccattttagattcctctattgagaattgtctatttagttctgtaccccacttattaattggattatttggtgttttggagactagcttttagagctctttgtaaattttggagatcagccctctgtcggatgtggggttggtgaatatattttcccaatccctgggctgtcgttttgtcttgttgacaatgtcctttgccttacagaagcttcttggtttcaggaggtctcatttattaattgtggatctcagtgcctgtgctactggtgttatgtttaggaagtagtctcctgtaccaatttgttcaagggtatttcctactatctcttttaataagttcaatgtggctggatttatgttgaggtctttgatccctttggacttaatttttgggtatgtcgatagacatggttctatctgcagccttctaacatgccagcatccagttatgccagcaccatttgttgaagatactttctttattccactgtatagctttggcttctttgtcaaaattcaggcattcataggtgttcaggttcatatcagggttttcaactctattccattggtctacctgtctatttttgtgccaataccaagctgttttcaggacaatagcactataatagagcttgaaatcaaggattgtgatgcccccagaagttctattattgtacagtgttgttttggctatcctgggtcttttgtttttccatataaagttgagaattgttttttcaaggtctgtgaagaactgttctgggattttgatagggattgaattgaatctgtagattgcttttggcaagattgacatttttactatgttgatcctacctatccaagagcatggaggttggaaggcagtttttaaagacttccttcttcctataattgtgattagaaaaatctgcaaatagagatttcatcagactggttccaaacagaaacctcaaaccagacacaccacagtgagaagacacaagagtcttgcttggggacattaagacttagaggctcttattgcaccaaaatgtagtcttaaacctatctgatgcaagttcttgctggttatggttaatttcaggctgccagatactgttttgtattttgtatttttcaaaacataaaaatctttaatgctaagcaaacaaataaatgagtctttcagagacctgttagaaggacacaggatagctttctcctgggagcatagtttaccagttacagcattatctcagtagacttctctccatattggtcacatactggttcaatgttggttagaaatatagagaaatattttgtcctcatcacaaacatatttaaagaattactattagtggataacttgtacaagtatatagcagctgtatatttcccagaaataaatatcagcaaaacagaattattattgtcatgattattttatcatcttcaatatcctgcagctgagcaactcataaataaaatttagccagttcatagcaagtgtataaagccaacactcccatgaagttgagtctgtagaaatacatttatctagaagtatttttacatccatttttttgagctgaggaatggaactaaatatacatgatgtctgtatttttttaaaaaatgttgcctagtctttccagaacaaagtctcatccagctgttggcatcatcaatgtaataacataatcactaattccaactccactccatcccttgtgttctggaaatatcctggcaaggttttaatatgttgtttcttaatctggcacaaatcctctcctaaacttgatgttcagcccaattgaagaaaagtcaagaacaaaaatgttttcattcttcaatctagatgagtggacaacggagaatgtggattagacttagcttgctcaatttccacttgtgcagacaaggacagatccaagcaaaggaaacatggtggtgttccctcggctgacaatattgagccatataataagcacatgaatgctatcctcagaatagacagcctattatcatcacacatgaatgccagaatgaagcaaaaataaaagtaatttgcattgtttcttaaacatcagttttcctttgtttatgaaaaaggctcaaaggacttctcttttcatcatttctatttctcacatagcttttataagtcatttgtcataagaaagcaactgtacccataagtttttttcatttcatcatcatcattacttaaatcaaaatatcttcagtaaaaacaggcacacacagcaatgttatttatacaactgtgtaccttccttcaacagagcactgcacctggaactcacagattagtaaatctcaagaaggtggtttggctttgctattttccccccttaaataattaatcttgaattcactggaagacaaattatatgaatttgagagacagacaaagagacgtggtaattgctttattgaccaggctggcctcaaactcacagtgatcttcctgcctcagtctccctagtgctagaattacaggcatgcacaacctttcccaggagcaagataaagatatattctcatttaaagctacttaattcacttttcttgtttgtttatttttggaacagcatctctttgtgtacccagtgctggctttgaactaataattctcctgctttagattccagatgtgtatcgctatgtggctctgtagcgattcacacatttccaattgttttcagccttctagtggagcaatttcacatgtggtactattttgtttttgtgatgaattttataaagaaagctaataattcctataatgctacatatcattatagaaaattgatcctctcttttaagtgggagtcctttctgtgcttcaagattgggtattctgtatcaatatagatgacagagatatggaaaaggttagggctgaatgtgtaaaagttaccttcttcaaactacatatgtctatccttacttaagattacagaatactctgtggtctggagaactcctttcatgattccaagattctatcttttagcagattgggaaacttcttgaatgtgtttgtgtttgttttctttttttttccttttattggaaacagctttttttctcacataatatatgctgattataatttctcctcctctcccatcttgctccacctcccttttgtctctccttagaaaataaacaggcttctataggataataataccataaaatgagataaaacaaaaactaatacatcaaaataggataaaacaaacaaaggaatagagcccaagaaaatgtatgtgaaactattagatctgcagagtcccacttgctagtacactcaggaatcccataaaaacactaaactggaatccattatatatacagaaggacctatagggtaaaaagaaagaaaaactatatacatatataataaaaaataagaattaagaataagataaattaggaggaaaaagacctaacacaacactatgaaacatgaagccatcaaaaatgacatggcattcgttttctgttggccatctacagctggcatgcagcctacccttaagatgagcttattttcccggaaagagaaagttaaattttcatttgcaaatggtcctcaattagagagagcttttgggttagggagtccaggtttgtgtccacttttttcagctctaggatcccatctcatgcaaacctgtgcaggctctatgtatgctgcctcattctgtgtgagttcctgtgttgagttccttctgttgatttagaggacgttgttttcttggtgtcctccatctcctctggcacttatactttatcaacctcttcttccacaggataccatgatccctgagaagaaggatttggtggagagatcccatttaagggagagagccctctcactctctacataatgtctagccatggttctatgtgtgtgttgcaggaggaattttctctgatgttggctgaggaaggccatcatctatgagtatgagtatatagtaggatgtcattaggagtaattttattgctccttgtttttctcttctttactttctttctttctttgtagaatagtagtatttggtcttatgataggtccctaaccttctagtctagaagcagtattgggtatgggttctgtcttgtggagcattgattggttactcccacaaactttgtgccaccattgccataacatatcttgcaggcagtataccattgtagatcaaaggctttgtggctaggttggtgtttatgtttttcctttggtaacatgaagagtaccttcctttaccaaagacacataggggtgaatgctctatgtaggcaccagctcgacttctccatgttcagttaattatgcaggtggtgtcttcagcaatagggctttgaatgtgtttgtgtttgtaacatttgaacattggattatttccttctttcttctaaaaattatgtgaagtgagaaaactcagaataatttagagatccaataggctgaattcaccattggagctctaacagcagggcgagcctggctcctttgtctacacagacaaacatgcctgctttgtctttcatcgaattgaaaacatttgctttgatacctgggcctggtgagttgcctattttcaccaaacatctttgtcttgtatataactgactttgccacagcctgccagcatgaaacagaggcttctgaaccttcgcaaacacagaacggaaagcggctccattcaagaaagagattaaagcaccaggctttgcaaactaggctacagccccaaaccacaagattgtcttgatgcatatgattgggaaggactaattagaagagaggatgtcattttattttctaaccagccttctctgatctgaagccatgacgcctcctcacttgttacctagcaacccttctttgtatatgtaagattactctattcgtgtattgttattcaatttatttgcaattttaagtgtctgaattttctgtaggattatcccaccctggtgtgttggccttagtctctaaaataccaggagcaacctaggaagtgaaaagcacagccctcgtgcagccattgcccactctagcatgatactaaacaaaaaactaaggattcatcttgcttggtctgggtgattataccagaaccctccccctctacagcccctgccaactgccctctgcccaacccagaaactgcttattatcttgatggaaagaatatatgcaggactggtttcttttaactcagtggaaaaatgactatcaatttaaacattaacttgtgtccaatctaatcaagaagttaaaaacagaactcgtgtctgcacatagcagaatctttcagaaaagcatccaacgaaactgcaagatttcacctaaaccctagcaatatgtaaataagtaatcagctacatttggaagcgtaccttttaatcaggtagttcagatgcataatcacctccaaatcaatctgccattagaggccattaactcctgaatgtagaaactcggttggcggccagaattctatcagagatgtggtgctgcctcagctcttcattgttgtagaacctgggctgcacttagctgccagttctttctggtttggggagtttgtgtgattgattgatggttggttgattgattgagaggggatgttgttgatgatggtgatagggtattttgttggcatcatggttttgcttttattttctccttcaaaagagaactgtgattctctcctattactagataagaatgaggaagcttaacaaacaaggaacactcggcatttaagttattttttaaaaaaatctgttgtcacttgttgcttttaattttgcctgattggccactggagaattgtttctaacaatgaaactctaatacatccagatgaccaaatcccagcacatatggatgtaccgtaactgaaacacaatgtaatatgcactctagtgatataactggctcaaagcactgtattattccttccgaatagcccaggttaaggagtacacatccccttccatggcaatacccaaatagttcccaaatctctctgccattcttttgggagtttatccagaaaaggaatttgaatgcatttgttgtctacctcctactgtgctgattggggtggggggggtgataagggcaacaggtgggcctaagtcctaggatactgaaacagtgggatgtatggcctgccaaatttagataactcaattaaaacagcctccattcccccacaccaagttaaaaaaaaatagctgggagctgaggaaaaggaggggggcagaggtgacagcaactgcggattttcttccctgggtcattagctctgtttatatttctatagcataactgtgttacaagctagcgtggttatttttgcctttgcctcatcactcagtgcagagggcagaggtgagtggctatgaattcacacagctgctatctggaagaaggcatttggaaaatagttgagtaacaccggcctttatttctctgaaagaattattctccccctaaaccaagtttgcacccagcctccaacaaagccttcccaggtttaaaacaatttctagttcttgtgccagccggaggtatgcaaagatttctctcagcaggaagtcactcatagacatcacatgaatatttaaacaatgggaagccagcaaaaagattcgttcacactgcaggacgatagtgacttctgaaattatcacaattatcattccattattgcaaaacaaatgacctgatttattatgctcagccttgatctcttcctgatacattacacaaccggttacttagccattctacgcaaacagcgtttgcatcgactgcttcattagtgttttgattattataaatctcaggaactcaatccacagcctaggctagagtcagcgatccctcagcacctatctgtgaagaaggccatcagagaattttagagtgggatatgatgaggtagtctctggaatgctggggagctcgttagctcatctcctagctctccctgcagggcagatgcttctcacttataacctacagcagaaaagggccaccaggcctgaatcagtagaagatgccagacacaaatcctactcccaacaaagatttcagagacaaaaatttcttccttttttatttatttaagaacaaaaaaatgaagatgaaaagtcctggaggaattatagcaggtgagtcatcagtaaagtaagaaacaattctggaagccagattttcccatcatccctctttttcattcctcgtgtaccctgtaaagcagcccattaaaagagcaaatttgtttaccctcctagcgaaactcagcagagttgtcacatcccaccagtggcacagcagggcaagaaaagaattctgggtcaaaaagtggaacgacaggcttggcaaaggaagatcacgatagcatgcatgttgtaatgcaacaacccttcctcccttcctcactggaacacgattacagtctaaagtgtttgcaatgagcatgtgatgtattaatgacctcaaacgggcttgtgtgtcaatcagggtagaggctgaaaactgaaactaaatttcatgtgttgtgaaatggcttagcaaatgatctcaagatttacctgtctagcaacaactttaatcaaccatttcctcatttgggtcttactattgggagatgagtacagtgtcctcatctgttctcagtatgaatctaaaattggttgctcagtaaactgctagtgaaacttctagataaattcacctgacatctcttgccaatcccatcttgtactctagtgtgatattttaacctctataacactatgccagagtgagggagaacaagccaaaaggacgggagggtgagaggacagtgggagggggagaatggatgtagaattatcgggcctcaaaaagcagctgacctgcagaccttgtaatgttcctattacaataagcactctgatgccacagaacattagacaaaaggacaggacacaaccccagtccttaaggagacactaatactgaaaacagagatcaggaagaatggagaaaattaagcaaaagataccactatgcactgctaagttaatactcatttcttagttgcttactggagatcttcattgtcactgcacccagtaaacatgaagaaaagagataagaagctatttcaacttgtgcttagagaatcaaagtcacaccaagactcaggaaccatttagatagagattagaaacagcaattcttagccctctttcaaaaagatgccacaaagaaatataaaagaactttgtagagaatgaaaaaatacaaccatctggtgtacccttatctcactagggtagagggttgggaaggatattaagggaatggattttcctaaacacaggatagaaggatggccatcacaggaacacagctcactctgtttatagccaaagctagactggcctgccctggaaatgaacacaccatgccatgcttctttctttctatcttctgcaggtacaagtggtcatttgtctcccacaaatgatgcaaagaaataccataattagctgcagttgtctctttcattcaaacaaaattgaatgaagtgacactcagagagaacatttcttccctttgtgctggggaaaagtgcatcttcactagacagaaaataaagccaactctttttgcaattaacaatactaattggtaaaacaacttcatggtataatttttctgattagtaaattttcagagtcaacgttttttcaatgtttgattttcttactaatcattaatgattattggccagacttgggtgcatgcctttaatcccagaattcgggaggcagaagctggtcctgtccagtgtggtctacatagagagttccagtccagcctggcctgccacatactaagaacctgtctcaacgaataaataaatgttagaattgttaaggatttttacatctaaattagggtgtgccaaaaggaccatggagcaatgtataagcacaaaactttgaaactttgaaggtaaacactgggatgaatttacaaaaatcttgaaagattgatctaatttttattgtaatttttttttgtattttactataatcatctattgtctaactcagacacatatcttaccacaaaacaagttgtaattggcctttggcaccacaagtggaataaagcaaggagagattttggcaggcatcatttaacattctcctactatccttttgtaaggcattagttttatattcttgtttctttggaacacaaaggattcctttaattaagagtaaaaatattttcctgtgcactgtgtctctttcagtccatttactagtcaataatgatgctaaggaagtatttctgccatcttatatctaagtcacaataagaaacaaaagaaatacttctgcattgccttgaaccacattcccagtctcctaagctccaacttgaaagccaataaatctaattattaacacatttcctattttaagtaatatctttatttattcttggaaaacataaaaaagtatataatgtatttttcttcatgtccacctgcctacctccagctctgtgctggaccctcaacatgtctcttttccatgttcttctacttcttttaaatattatatataattaataacttactgaatccaattagtacatcagcccatatgtgcatggctacgagactaatacactggggcatgagcaatctaacagcaggtatccctgaaagaaaaatgatttttccctttctcagcaataatcaactactaagagttcttcaacttcaggtatggcccagtagcttcttgcccagtcattctgaaattttgattagcttgattttgtacaggtcacgtgaagttgctgtgagttcatatgttcagtggacatgtcatttccagaagatagcatttcactgccctcttcctcatccactggctttacgttctttctgcctcttccacaatgttccctaagcctttgaagggagggatatcaatgaccctaaggataaacactcagatcacatattcaaagcactttaaccagttataaatttgcattagaaactacccattgcagaacatacctcctctgaccaaatttgaaaacagcacaagtctatgaatacaaactgggagagaaaagacatcagtggtcttacccggtgctggaatccacatcctacagtattggcatgcctggcaagatgtttaaaggacagtgtgacaacatgaccattcaacaaaacagccagaccccctagggtctatgacctccacagatatgaatttttcctcaggtttatagtactaagcatgaaatcccttctttggatcaagcctcaaatccactcaaaaagtggttgtttacctctataatcaacatgccactattgcacaaatgggtgtatcttgcctagcatttctataatgtagtatgcaggattatgtgctaggtaaggtcattggtgtatttttaccccagcaggctatgcagcaacctccagcaatatggaagctagccatcaggtagaaagtttcttggttggttcaacattcatttctctatgtcctacaaagttttgatatctttagctatttatcttaccaattagttatagtggtcagccaaaagcaatataaatagcctctctcattctgggtactctgggttctccttgaccaatacctcgtaagtaattatctcatgcctggcactgaaatgctcatttaataacccaagtcttctgggagctgcattgtccactaatgcaaggtttaaattcccttttctatttattttaagatttatttgtttattttgtacacagtggtctgtctgcatgtatgccagaggaaggcagatgttcatgagccaccatgtggttgctagcaattgaactttcttaactgctgagccatttctccagcccttcaaactccctttttattattatattttgaaattaccttacaagcaagtgggtttccataaggcttctttatacattttttaattgacaaggagtttgctaaatctaaataacactaattatgtaaccaaatatgtgaaaaatatcaggcttgtcaatatgttgtatggattaatcattgtttcttgagtgtctacaccaataattctgaacatccaagaagatatctagaataaaaatgagagtctgatacaaatttttgtgaattagaatttgaagaaccattaaatacttagggaaaatctgaaactcttataaaggattgtgatgcccacttgaacctgaaaatcacagatacactctggccttaagcaagtatatttcaacaatatgagaagtaaatagattcacatctttccaaagttctaaataatgacagtgttgttataaaaaatagagaaacatcatttccaagggaaagaaaacagaaatgctgccagcaatgctcagatatccccaaactgaatgttttgtccacttgccactatttcttcatgcttctaaacatgtccttctggtgccctttgcaaccttggtcattcacatgactcaacagaatacatacccaccaggcctatcatctattttatagcagtactttgggtagacaatttgttcaagagtttcaccttgcaaataggttaactggcagagaataggagaacaggagaatataaaactgtcaaatagaatcatattaaattgatgagttcccagaacagaaagcccatagcactgctctgtatttcccagtcatattaaagaaaatttgaagaataaaaacctaaaacctaaaaacaaattcgatttctccaagtatatagccatgaaataataggcaagagaaagaattctacaaaaaaataacattttctgacattaccagtgtagaaaaataccaattctctagctaatttgacaagagagtacaaaatatcggagacaaagtgatccacttggttacttaagagccatagtgtatattttctttgacttggcattaggctaatttggccagcgttttatttaattaatgttcaaagaaactatgagctgtttagtattgttagctacactttacaaatgatgaaaatgaagcatcagaaagctaaaaagtttaccaaaaaaaaaaaaacctctatcattagtaatcaggaaagcagattggtcccagagtcaatgatgttaactaccaaggtctgcagcctcttacctcttaccaaaaagagaaggttgtctatggcctcttatgagagcccacttcattctctccttccaccaagttaggacattttctttcatcaaagatgatgtatctggtattacattttcttagacaacacataaaatgtatgttttcacaccaagatattactatataggacatggcttagcctaacaataacacatgttatttaagtgagaaatatcccctacaggctcgcatgtttgaacacttggtcttccattggtggtggtgtttgggaaggttctggaacatttaggaggaagtaggtcactgagatcaagctttgaggttttatggcctggctccatttactgttaacattctgtctgctttcttttgtgtagaacaaatgtggtcagctggcttcctgactgccaggctgccctcaagttcccactgccactcctcttccacaacattggacaatgccccttctggaactatattccagtataagacgtttctctccagagttgctttttttcttctgtcagagtgttctatcatagtcgcagaaaagtgagtactgtagggcaattctattaatcacaggatagtaatgcataattcaaggcagtatctcatggagattctgcccaccgacattcatggtgacaaccttcagtatagaatacttgtttcgttccaagcatctagtgcaatgtttgctttagaattcaatgctagtgtaaatctattgaattgacaaactacagaaagactgccctataaccatggtacatagggccagctgcctactcaaaagagttggtggtccaccagggctcttagatctgttttgggctccaattattaaaagtcccctaaaatgggtcattttggctaagaatgcccttttttattctagggaaaggaaaggaagccatacatgggtacacccatacatgtgacatgggtgatttaaaatagacagcgacattccacccattcatgtgtagtaatctacctttctctgtgtatgtcacataaatcagttttgataaggtggtaacctacacaggggaaagagcttcttcatggactgttcattacctaagtataccaaactgtaggcctggagcaacatagaattctggcttgcagggaggacctacaagttgggagttaaagcttgttgaaagaaaactggcatccaaactgggaaatgactttgtagtttcacagatttgtctaggggtatttctacaaaaaaaaaaaaaatctctagttaggcagattgtgtttgccaagaaagtacagaatgatttcctgttccacatgttcttgcaatgtggccttatcaattttttttgaaaggtactcctaccccccaattctggacaagcctcagactgcaaggcaagtaacaccatgttcttttcttttcttattttaaggtttagcgtgtgtgtgtgtgtgtgtgtgtgtgtgtgtgtgtgtgtgtgtatacacaagtgcttgtgaaggccaaactcatttgataccctggggctggagttccaggccaatatgcatactgggaaccaaactcaggtcctcttgaagagcaacaagcattcttatcctccaggtccactctccatctgtaacactgtgacttttaagtctaggtcacacaggagatcaaactgaaaactgctcttcttgggatagctgaacttagcaacagcctatgaggaagccagaaaggcatgtggacacagcatatgtaggttttccagctaccagacctcagctgagatcccagctgatagcctgaaccaattattatcacctatataaatgaagaagccttcaagatggctccatctccagctacactgcctccagtcataaggcatctcaagaaaaaaatccatctagatgaaggaaactcatcagccctcagaaccatgaaagatattgcatttgtcgtattattattattggccatgtatctgaggataatatgttatacagcattagtatctgaaacacccaggcttgaaccaagctcaggagtcatttgctagagaggcaagttgggctttctgaataaagaactacagcaatgcagagcctgggtggggtgggttgaatcaccgccgccaagcaactgccttctccattctgtaaattcagaatctataaacctcccctgagagcatgctgtgcctgcccagagaaaagccacctcatagacgattagaatgtaagtggataacgagccatttgaattatctgctctagttcaaacacatgctgttgccaatatgctgtggcagccagctaacatctgagcatctttaatttaaattgcatatacttaacttgaaatggcatctatactctgaaactaagaatttactgtaccatcaccagatcatgggagaaatcatctttttgggaatttcttaaatgtgcctttttactgcactctgatgtggtagcagtgtaatgcctgatggctcccaagtcaaatgtctgagagtatgagatttagctccaattccaatcgctttgttaatgcacatgccgcttcctgtctgcacacaagaatgaaatgattctcaacagcttgggtcccattcccttaaaaataccacatttgtatccgtaaccttaacaatagacacattcctgaagccaacatttaacttatctaattctacaaaagacaagcctctcaaggattaagaaaaatttaaaaacttcaaagaaagccaaaagaaaataggcttgtgatgaaaatttgaaacagcactgaaaataaaaattcaaaaattttgacaaagcatttgtagatttcaaatctaatctcggggtgaaaacaatccaagaacaatatatcctgggtgtggtagcatgttcctgtaaaatcagcactgaggaggtgagatcactagcccaggatagcctgggctacataacaagtttgagaggagaaacttgcctcaaaagaacaaaagaaaaggcaaatataccaaaaccatgtattatctattcagattgcactaactagttaaacacagtgagaaatagtcacataaaataacccatttcagccttcatcctattcctccttcctgtacttgactttacaataatctggcattccctttcctcatccccaaaataccctttctcttggaatcttacagttcaacagactcatcatttcttgtcttctaaaaagcaatgtttagagctcagaccatcagattccatgctgagctagctctcactagctcatgactttgaggactaacttgtctaccttatgtcttgtagagataataataataactactgcacacaatgacacagtggtgagtggataaaatgaccagacacaaagtaaatacttggtaaaaatgaagtaataccttcagatttcaaagtgctgagcttacacctccataccccactaacaaatgctttacatttcaggattccaatgctttaaaattgctttttttaaaccttgtcctgaaaggctaggtttctacagaggtcctagctcctgttctctctctctctttaacctgccctatcgccctcagcagcatcagtttcttccaacttgtcaatgactcttcaatactaacctttctcaagatttttatttctgtgttattatcatcctatttcactggaactcagatataactatccatgtgtccgatcccatatatcatatatcagaacctgaaaatgtgtggttcataaatgggtctttctatgtgctatgattctggaagttctgaaacaaaaagacattataactgtgaacgtaaggaaaatgaggtctgaatgccaggtggctttgctctacccatcctaatccagtctattcctttctctactctgctttctaccccagaagatcccaatgggttacactaaaggttcacaggtttcctgtcttctggcttgttttggctaatggaaatcattgggagaacattggagaaaaagaaggagacattggaactcttccttggctcctccctatgatatctgcctctgagtggttaacttcatttctcaactaagtgtcatatcttttcttacagttatactctccacacaatttcaaattctggggtaactagtctcatggcactgcactaacctgcctagacctcaaatctaattcccttgctagagctttctcatatgatcctaatttcagtaagccatctgtcttatgttagaactctggctgaaatacctgcctttttagcacattccctttccttttaaaaattgactgaagacattaaagtaagtataataaaactatgttgtaaaaaaaaagaaagaaagaaatccataatcctatcatacaatttatttgcagtatgccttaattactttcctattgccataacaaaggcaacttactgaagaaagcatttaatggggcttacagtttcagaggatgagtctataatcatcatagtggaaagcatggcaacagataagcaggcatagtgctagaacagtaactgagaccattcatcctgaccaatgagacagagaggggtgcaggggagaggtggaaagaactgataatggtgtgtgcttttcaaaccacaaagcccaccccagtgacatacctctaccaacaaggacatatctcctaatccttcctaaatatagttctaccaacttagggccaagcatccaaatatataaataagcctatggagtgtattctcattcaaaaccaccattcagtatttctgatgaatgctttgtaaatggagttcttaattggtctaaataataataacccagagtcagatatagaggaaaatgctgagagataagagagaaggaagagcaagctaaagccacctttaccttagcttcctagtggaaaaaagagtgagttcctatttcttcctccttatatcctctctctgcccagcagtctcacttcctgtttctacccagccatctcatttcctgtctgtctgtgtagacatccagacctctgttgttagctggtggcacactccatcctctggtcttcagacaggttttatttgtacaagcaaaataatcactacatgcttagttcagttataattaaaaataattcatagcatttcttgtattttcatttattattgtaaaataagcctttcaatcttgctacataatctttataaacattaacttaagacacttcataataatcttttagagtactgctgcaattttcttgatttttctcatattaatgaacatttggcatactctcttcaagtgaccttctcatgcatacattcacatataccattacacatatgttgatttttttcccatttctcaactagttttgttaaaaggcatttttcataaactcacacatattccataaaataaaattgttatttctggaatataactattcacctataggatcataatcattagcatcttgtaattgtcaagccttcctcaccatattttcctaacagataatattaatgattatcatccatgactgtatgtgaaattgctgatagaagcctacaaagcacgcttataaaatcagaagtgaatgaggactaccacataactttttcaagtgccattaaacccaaatcagggagcaagcatttgaggctgaaagatgagcatttaaattacacaagttgacagtacctcgaagttatcagtatctaccctatagtgcctctaggtgatcaccagcaagctgataattacaccaaccattcagctttttaacacttctattttgttttttgtattttgttttttctcttggaatagccatttgaggcctcatagtgaaactatcctctgaaaggaaaaaggaaagagaggacgaggatgatcccctctgagctacatttcacaggattagatgtggctgttgtaaatagggattagacatagaaagtcagaccagctccttcataaggtatctacttcagaacacacctgaaagcgggaccccggaggcccccatcaagtagaacttgaagccccttcctaaagaacagatgcctcatacagtattttctctcttccttggctgtcgggatgtcagtaaaataaaaagaatgcagtctcctcaaaatagaacctggaaatgcaccccccctcctccaaatgagctatggggcaagagctccatcccatgattcctggaccacagatcaatacttgtgacaaggaccgggcaaagtgagaagacagagagtatttggagccttttctggtttttctttctccatcttccctgtccctgtctcctcattcctgtctctggatacccaaggtccctcacagacaccaacagcatcctatcattctcacctagcctggtcatcttctaaagttaatgtaaccataaaaaagaaaaaaaaatcctgcctgtcattaaaagaagataatacatcatgtctctgttggcaacttaagcaacagttcttcttccctgatagcagcatgcaggttgggggataattgtgactgtcctggaatgcttccttctgtgctgcactctgccccctggcctttcacatactggcctaattccagcagctgcaggggcaggtagtcctctgctcagaggatgtccctacctagtcttctggattttacatagtctcagaacttgaagccataaccataaaaaggctggtgtcacgaggcagataatgcaaaaagtcacaaaagattttctatccctatacaggcaaaccaagattccaaatcatttctgaccataaatgttctttgcgtgaaacaacagttaggtggtcttgctgttaatgttgggcacatattttttaaattgttgttttgctttgctttgagacaggatcttgctatgtagctcaggcagatcagaactcaagagtctcctgcctcagttccctgagtgccaaaattataggtgtgggtcaccactcttaccttagtattattgttattgttattactatagtggaatgcaccctggctaacataccatgcagacaacacatgcagtttggtgtgagtctcagtgctaccacagaggtcctcaactcctttctctcagcactaccaacttaaaccctgcctctctcctcctttttgccactgaaggcctctcacatgctggccatacaatctcactgtaagctgtacccatagtcctctggaggagctttttaaagatagaaaagttgtcatcacagtgattcatatcaaagtgtgacccctttatctttcaagtgacactgagtctagtttctctaatataagatctgcaatgccaatccctaaacagagcctgtgtgagaattctatggaaatgaatgtatctgtgactgccatcatgatcatcaaaaggcaagcacttcatccttgaatgaatcaaagttctagagaggcccaaatgccccattcattttcattagtacgtcgaatatttgctgtatctaaacaattggctctgttgaagttttcactttgtttgttttttgtgaatcacacgttttccaggttgaatccagaattccctatggagataaagatgatctcatctgaaacccttgcctccacctagtaagttccgggaatataattgtgtgtcaccagacttggtttattgtcactggggatcaaaagcaggattttgtgcatgctaagcaaacactctactgagcaaaacagagctgcatcctcagcctaagttttgtttattgcttcttgttgttttgagatatattctcacacagttcaggttgtcctgggactccagatcttcctatatctctgtctctatgtgctgtggttacaggcatgcactgccattcccaggcctgttgaatttttaagctgcacaagtaaacaatttcttttcctcactagaatgacttgtttaaagatggtgttcttactaaggggtcagcattgtgcaaacagaccttcagcacattgagaaatagctattcaagtttgctgtggaataatccttttgtccactgtgtgaatatatgtcactatgattggtttaacaaacaagctgacaggagaatacccacataagataaagttaggtgggaaagccaaacagaatgatgggatgaggaatggcagggccagcctccaaggaagcagggcatgtagaaaatgaggtaactatatgaatggagacagaggcagagggaagaggggagggtagaagggaggtggcaggggaatgggaagagaagggaaactgtggttggtatgtaaaataaatttgaaaaaatgatgaataaaaaaaatgaagtaacaagccatgagccacatggtggagcatagataagaaatataggctaatttaagtgtaagagttagctagtaagcagcctgagctattggttgaccatttgtaattgatattaagcctctgagtgttcacttgagagtggctgaaggacaggaaagcacagtatacagaagtcctctttcaagacagaaatatgtacctttcagaatagaaatgtaggatctattggatgtttgttttctcgtaacacaactgcctgatttcaggttcccctcaatacattttatgaaatgcagatcactttataccacaaatcacagtggtatgtatatacatttcttacatcaccttttagaagacaagatttttgagagtaaaaactatctttttaacttgctaacaccactgaattcatacagaatgcttttgctttttatttaagttggatagacatcacttcttctcctccattcaagttcatatatgttatgacagtatccctgaggggagcccaccctccagaaaagggagagagaattctaaatattcacaattcctaagtctgatattaagatcagatttcactcatttgaaatagctaaatacagatacaactgttcaagggctcaaattttacaaccccgttcctaaaaccgtagttgagagttggtttcagatttagattcctttgctaatctgcaattttggaaattaggacagagttgtgtgacctttgtacattaagccagctgtcccctctccacatctcttccttaaactcaccctcccccccccaacttcacgaagtgcagtttcctgtgctttgttcatgcaactcaacttctcctccaccaggtaccttcctactgacttgccctttaccacagccatgtcttgaccttggaatactatgaatccaagtccatgcttctcacagagggaccaaaacattcttgctgctttcatatagctccagctataacaccactgttctccccagaggaattaactcctcttgaagccctggctcaagctcttatatgatttctcaattcaccagtgcctgagtctgagtctcctaggatacttaaggacaaaggataaatatctctgtgttgcagttgttttgttttccttcagtaaaaactggagttccagtcttctgcattctctgtcactcctaagaaggggctgttaacttggcacatttagcctctcaaaatataaagaagaaaagtccaatctacactatgacctgttttgccactagctacacatcatttagcctcccaaatataaagaagaaaagtccaatctacactatgacctgttttgccactagcttctaaagcccactccttgctattcacacaatgtgatcatgccttaaggtgttaatgttatgaatatccacacatagccatgagcaagatgtagacttaatatgtatacctgagccctactgtgtgtgaacaaaacaaaacctcttagaaagtacccaacaaacatctccttccatgcatgccatagtaaaattttttttaaaaaagtcagttaaattagcactctttaaatttacttttatttatttatttgttatttacttattcacttagaagatggagggaggcatgtatgccatagcatacacttagaagtcagaggacaacttgaaagagttgttctctcctactaccatgtctgtactgagaattgaatttgggtcctcaggcttgatggcaagcacctttatctgctgagcaactgagcagcccaaaagtctctttgtaaaaaaacagaactagctaataccaagaatgtattatatatcttgactcaggctggaagaagataaagaaaaagatgggaatgcttctggtcttaagtgatcacaaattattccaggaaataatgtatatctaaggaatacataaaatgagaacaaatttctagttgtgacttgcacttctagtgccaacatgtagcaaatctcaggacatctcagtgtccagttcccttatcttatcccctgatttattggaagtttgtgggaaagccagtcacacccagcttgcttcctaggcagaaaggctgacccctatctgaaagccagttgacactgatgatgggcaatccaaatgccagtgtcaattgcttctgtatttgatagaaacatgtttttataaataaatttcagactttcaagttcccacagtgcatctaatatctcagacatggatctcctcaaaaagaggaaaactgaatgaatacacacacacacagaggggaagagggtcagggaggaagcaaaggaagaacaattttgcagctctcagtggacaaggtaacctgtattttatgatagtcattgcaagacttttgttattgtgtgctttttttcagaatacatggacagtacttgacttctatacacgaaactgctaactctagttgtctgtgaggggaaaaaatccttgcttgtccctcctaatccttctttcattttgaacatcataaacaaaattaaatgaagttatacataaacaataacaagggttcctgctgtgacagatggacccatccatccatccatctctgtagatattatctcatgaatgattcattgtctttgctttaacctagagccttttgtattttgcacattgaagtgaataaccattagtaagctttatgccttgcactgtgacagttactgtgagtctactgtagtctagcaagtagtactgacatctgggggatgggaaagaagctgctctggttgtgtttatgctggatcttccatctggataaaagctagagctaatcaaacaagaggaagtccaactccaagctgaattgtgctttttccttccatatttaaaaatgggctgtgtgtcttattcaacaccttaaagaaattagattgcttttcccatagccttactaaatattttatatatttaacaggagaattcatcataaaaataatggttgaataccagccctaaggagagagctaagttttcagatacagctttctgtactcttagaactgcatctcaattgaacaatcctacctatctggtgtggggacaaaaaccaaaccaagacttccacacgttggtgcctttctttactcagcaactgagtgtgaagtaattggttctgaacaatccctggtctttttccagacacctaaagtaaatttttttcaatgctgatttttccccccactactgctttgtgaagcaaggtattaaattccaggcatatcacagtgatgaagtcacatagacagacacatataggactgtctaggactgccatagctaccgcccactcttggcagaatgcagaggtcaggtgggaagtctcagatgccccttctctgtttccgtggtcttatcctgtgcttaagttatcaagcatgcccagaaactgctgggaacagcaaccttgaccccaccctccctccgctgtaccatttcctgcatggcagctaagccagtcctggctaatcattaacagcctcaggctgcagtgagttgttcacacctcagacctcagaggcagtcttgcctctagggtctcccttcgctgctggaaatgaagaacaaaagggaagaagacatttttttttaatgatttccccagaaatttcacataataaattaatctgaccatttcagctaggatgacacactgtaatattacatatattcatatcctgagttaaagctgtgaactgtgaacagaatgtaacctactcagtagagcccccccttagacccatgaggacagagtatgtacaactgttatgcagtaaaggtacatgactatgctagacaatggattcctgaggaccaaagaaaagtttggcagaaatggaagagaaggaagagcgtgagttaccccagagcaagtgaataaaggtttaaaatgcaacaccaagagaagaaagcacaaacattttaaagtgggctgacttttgccccagttctgaaccatgttgataaataaaataaagtggctaattagcatggcttgcgctctagcagcacaccaccctatgagtcattttatagtgtttttaacaagcaaggtcattaatccaagatagcacaaaccaaataaataatttagacagcagccaactgcacgtgtttcagggttcctttgcctgacctttgaaagacacagccccttcacgtgactgttggccagtgagagtgaagtcagagcccagaccaaggttaggtgaggaagaaagctgccaagcacgacattctcctcagtctgccttttgttcctctggcttcaccacagacagcagaaacagaagggaggcctttgtgtgctcttcactcagggaacttgctgacagggaagaggagctctttcacccatgcaatcatactgtaaaactttccctgtacagggcagagcatagtcatccagtcattcattagaaaatatgggcctcagttttctcctatgcaaaatggatacagtaatatagggttgaaaatgagggcggcctggaaagtaagctcagcaggttaaagtacttgctgcccttgcagagaacccgagttcaattcctagcatccacatggtggctcactatgatctatgactccagtcccagagaatccaaagcccatttctgaccttcacaaacaccaggtatgaacatggcacacatgcatatgtacaggcaaaatactcatacccataaaatcatttacaaatcttaaaaaaaaaaaacagggaagataaagtttttctcacatacttaagtgggcctggtttgacatagattgtattcaataaatcctggttattcttactaatatcaccacaaaagcagttactactatgagaacgtgtaccataactgtcaggcttgtttttctaagaagtggaaaaaaaactgactaatgtcttcattttgagagttacagacacctgaatcaagggtgttagttaaggcaaaagcaattgggtgcaatggtcaacaaagcagactaagcacgcagttgaactgggtccagacccaacacctcacttgattctggttgaaaaatggaactatctgtaactaatgtcaccagctcatcctctaataaacacagcttgtggagaaaaaaaaaactgataagttaccaaagctgcaaagatgtttgttattcagagaaaatgattgtcatggaacccctatattatttcttataactgcagaagaatttataattattttaaaatacaaaaggaaaactgtgccacttccaaatgtggaaatgatggaacactcgattgaagggaatctggaggccacacgcccgagaagcagatggacccttctgtcaaattaaaatctgatgagatgatcaggtttgtagtcagtccatagatttaaagtagaaacataacccaatgtagcatttcccaagtttaaccttgcatttccttagccgttggaagatgctaagaggccttgtgtgtctctttctctatgtcatacaaaagtataataatttgagtttataatgctggctcctatatgtttttagcacatggcatgccacacaaaagtaccatagattgatatgaagggattgagataacagaaattggtcatctccagttctggctggcagaagctcaaaaccaaagtaccactagggcattttgactcttgctggataagtcttcctgactatgcaccgcttcaaatgagccagggcctccttgacttacagatatatcaccctctctagagatctacacagcatcttcctaccgtaagtgtccagatatccaactttcataagatatcaggttacagtggattaggacccaccctgacaaactcatcttaagctgattgcctctgtgaagatcataatttgaataaggtcacctgctgaagtagcaagagttaagacttcagtgtagctttggaagacacaattcaacctttagcataataggtgggtgatgaacatttagctaataggctagctaagatgaatagcaactagcactgtgtagtggtgtcatcagatattttggaaggccccacctgagataccacatgttactggggaaaacttggagctccctctcttgggttttagttatattagttaagaatttaagataaggatatattcagaagaaatcccaagaacaattttgttagtgtttaaaagaaaaacataaagggcaggcaagctgtaaatctcagaagttgctagaagagtgagaagaccacatcttttcagttagtcatgggggtcagtgaacaaatacatagtaaatacgcaggcacgttgcaatgagacaaaggagctttggagaaagagtagcgtagcccaaaatgtcagggaaggcatgaatatgaaagagacaacaagaagaaagggaaaagttatactccttttcagtaacttagaaaagtcacgtggctatggatccatagaatactacacaatgggtggggattctggaaatcacattatctcatttaaaaaaagagttcttcctctcatctcagcatgacataaggtgaatcagccttcctgagagggtggccttttggccaagtgactgagcagaccaacttcatttaactcttgagagaggattaaggtgtgtttctacccacaggtagatttccttctttccactgggaaggcagagctcttaatgggcctccaaacctattctaagtgtggcaagcaatacaataaatatgctaatacattactgtgtgtaatccccaccccaagggagggaatccaaccttggagagttccagatctacggaaagacagggttgagaacctgaatctatggccacagaattctcagttaagattcatccatcacactgacagtaaagttggtgagcattctaattatctttggcttgaattttgatttaagagttaacggttagtttttcttttgttttttaagtaaaccattatctttacatgacaggaggtacaacatataaaagtgctgactgtaaaattcaagagcaacttgattgtcaatagccattaatcaaccagtaatcaatgtataaaccctctgctaaacaattaacttgttagaaaataataagcaagacaattccaactaggacaaatatttgccaagagataggacctagagaacacaacattcatgttcaaaggaccagctcatggctctccatttaattatttttgtaacatatgtaatgaacttgcctggaaatcagccccctgggattcttaggtaattaggaatcagacctttctgctagatccacaaaacaatcagtctcactgataactaatggaaaatctaatagggaagtgcaattgtaagacagcaggttacaaataaacaatcaataaaattgctgtgtgttcaattatgtacttgttcttgatgctatggcaatattggcagggagcaaaatgaccctggggtcctagaataaaccatcctttaccattttgcctatgtatggaaaccatagcttactccaagttgtattagtatctattccccaagtcaggttgaaaagcaagccctctttcatgcaaatgtgcaaagggcagcacagagatgtcaagacagctatactgtggcatgtagttatgagaaatgtaggacaagagctaccagtctgcagggtcaactcttacctcaaaagtttaatacactctggacctgacatagccagggatagcccatatacccttgagaagaccatcatcgggaagaactgggcaagccatgactattccatgttgtagactcatgcctccagtagctctcaagagtgaaagagccactttaagccatatttgtagaactgggcaagccatgactattccatgttgtagtctcatgcctccagtagctctcaagagtgaaagagccactttaagccatatattctaaggtaaatgcttacaccctatgggtatttgaaacaaatccattcttcacatgctctagtgatattatatgtacacaggaagtaaaactgacttccctgcccttcctcactctccctccatttgcctcctcccctgctgccctgattggccacatttccctgcagcaataatgcaatctccttccctactaagaaacctgctgctattttgaatgtaattgcccagcaccctgcagagaatgcattctcaaaagcgctagcaaggctttccatagagaccaggcagagtttacctaaggctaatctggagcatgttaaggacctgttaaaataatgaacgttgtttcttcaaatgaaaatagaaacccctcaaattaaggtatcgacttgcagttccaatcttctccttggactagagttaaattttttcagcctagcttatgcaactgtgtgctttacaagacataaatgggatccattgagaatattcctaacatgtgactgaagcttttaattcccacacaacctgcagtttagactccagacccattcccaaataccattcccaataatgctgcctccttgtatctatcagtatcctgcactaccattataccattccttcgctagatggaccaaaacaacccctaaccagccagtatcaatggcccatgccatggaaatttttttcctcctggggctttgctataacttcctcttccttatacaactgcatgagttgtatggctctacaggactgctaaaatagattagtgtataaagaggtgcacgcttgctttcagggtgtccaacacctatgcttgtggcttagatgctgcagctccatgagggtgttctgcgtgtttgtattttaagtgataaggaaatatatgtgctgttagctgccatgacagtgagggaactttgatgacataaatgtctccagaaagatgatcgaattggccccttcacagagtaaggctgccaaggaactgaaggagtgggggcggtgtcagcttcagggaaacacagtctgcccgcaaatcactttctcttataactgtactttagaaattgatttttatattaaaatggacaaatggatagaacattcaattaacatgcatcacctttatctcctttggttcaaattaacccctgtttgaaagctctgggcaccacagaaaatgaatttaacaagtcatttgaacatttccaatgactgattagaataaaaattgttgtgctttttctactacaagcatcaaaatgattttaaaaggttttcttccattcactctttctttgtttatttctttccttctggtactctaaagactgaagcaaatgcagaatcccccatccttggatcaatttttcttgaatgatctaacaggtatctgctttctaagaaaccatgcatttattcataagtgtttattgaacacctacacagcaccctacaatatagaaaatgagcagatagcaacctgctctctgagatcccacaacagagagacaataagcagatgaatacaggtttcagtgctgtgtgcatctctataacaatagagaaagcaggctaaatgcctagacaaagatagatgcacaattaccatggaatcaaaaatccctccaggataaagtatccctggggcagaggccagtatgagtgaaacacacaacatcatctacacccaggaagaacatctcaggcaaagacccgaagagtcagtaaagctccttatcaggagaaagatgtggctgagtagtgggagaagtcagaaaggaaaccagagcccaggtagcttttgaaggacatcttaaaagtggatttgaacaatcgaatgacattgacaaaaatatcactggaagctattaaagagtttccaacaaaggattggcttacacgatctgctttattatctaaaataacttcccaaccagtgggaatttaaatctcttggtttttctttttctttttgttttcatcattgtgttttttgagataaggtcttgctatatagaccagtctgaagcttccatgttgccggcttccgcatctccgctgaaagaactacaggctctattcccagttactcccagtctttatctttcactcacaagttcagtggactcttcttcatgtagccagtccttcatttccagtcctatctggtaactcatcaactggacttttagctagcattcttgccctattttcttcatagtgtagtctgtctagtaaaaattttagttttcaaaccagctcagggtattttttttttctttaggaaaatcttcggttctcttactgaagaacataaagttcaaatcagtcattctgtaattagaaactttacaatacagtcacaacattatcaaataccaaagtcaaaatttaaactctaataaatgtattgctatctctgccccttaaatatctctcattcattcttgattaatatttctccctccttagaaatggatgagttttcctttgacaccagccatgtatgatacacagatgacttacctgctgagatgtaattcagcatctcctttcttgaggttcctctcaatgatgccagctctgaaaggccagagtaagcatgaagcccacagagttggcatggtttttgaaatattatacgcctaccttatagaattatgtgatgttctcagactaacaatgaagcccccagggcgcactaatacttatgtagccaactcaatagcttgcacatgaggcacaaagttggtcttcaaacagtacttataaccacttatatagccttttaaattaaggaaaagttagagctttaccagtcctgggccttgattttatgcttaagaaaatcaaggtcctcctaggcctggcccaggatgatgtggtagacttgggggagccccttttgagggccttaccctgcctggggagtggagggaagatggctagggacaggtgggatgttggggggaggggagggagaaggagagggagaagggattgacatctgaagcaagcttgttcctaatttgaactaataaaataaaataaaaatttaaaaaaaatcaaggtccttagatgtgaagggctttaatttagggttacttattgacaaaaaaagaactcaaacctaggtctcctggttctttccaaatcatgctgagtggatcaaagaatcaatttcaagcacttatctatcatcacattctaggtatcaaagctaaatatttccattctgtccagtcctttttcgttaacacaacactgctgttgagtgagcaggtgaccaccaattacagcaaggacaattgtaattctcagttacaaatgaaagacgccaggtctgggtgatgatagcaaaagggaagcaattagaaggcagcatgactcccagtgttgacgtggcttatgagtagatgtagcactatgcaccaggcttgggagtcaggctttagagtcatgaagtcagcatagagtaattcccggcactagtcctgctagacaatagaccacagcagctctctctactcagaccagcctggatagattcaaagatcccacccagccacagtgataaactggttagtagtggggaccaagatatggggagagtgaatgcttaaacctttcaatttccttagtagataaaccattcaggaagagagtttagaatttacaaatgatatactatcatgaagaacaaataagaagtaaatgtagcgtgtggactaccctaatcatgatgagaatgaataaattgtcttctctgatccagtctctgcttagaatgatggaatgaaggagaaaaagagtatggtgagggcatgatacagcgtaaagtgtggctgccttggaaagagtccactaccagttccacatgggtcaggatcatgtcatctcaaaggccattcagaagcactagtgtgattcctgccgattatctctgggtttcagagggagactgattctgagtatgagctacagacaaacacaggtcataattagaatcctctcagagtaagtctgggtccagttgtcttaatggttcctgagtgttctaatctcaattattatcgatattgataatgagagattacttctcccttctacacactgtatctttccagggattttgtttatattatataagttacccattgagaaaatgatacaaatccacatcccctccccatgtttcagttaaaaaaaaataggttgagaagttcagaaaaagtgaaacactgaatggggatttaacaagaacagtagatccagagtgagagtacaacagcaaaccttggctctagcaactgtaagtctgcagctttcagaaaatcattataatatccctatgctttagtacttcatctggaatatgggagggagactaattgttgttatatgttctccctcacaaggaggaactgctgggaaggaattttagaaaatgtagctacgaatctacaacatgctattcaaatatatcttagtaattatcataattgtgacacataagacaaatagcagaagacaagcagaatacagattcatgcatagacacaatctgactgtacgtgggatgctgtggagtaggcacagacattctaagatacagcttggtcctgacttgtgatctagctgaatgtgtgcatgagaagtatcttgagaagctgtacccaataggatctgaaatgtaggatataattttgtagctgccttacagttacagggatgaatgaaataaaatcattgaatttaaagtcaatcttgttactcctgatggattggctgcctgacaacattttgaaactgccagaggaagcaaagttacatttatataactttgaaactgtcagaaagtgaagagtaaaattaagtttgttcctttttacaactacaggtggaggtaaattgcactgctggttgaacgggaaggcatgtgacagctctaatattatagatgagtagctttatgaatgctgcaagtttgtgtacagagaatgatttttctcctctttggtaggattatagaaaactgatggattacagatcagagccaaaagagaaaagtggaaccagcaacaatataatacccactcagcagaagtatagatgcaggaaaagatacatttgtttcaatttcaaggcattactatttgaagggaaaaggagcatcagagttgatgtttacatagaattgcttccaatttatgtatctcaagtcctcttctctgataagagtttatgaatcatacaacatgagtgtttatttataaatatggtacaatgagtttttaaatactcctcccaaacatcaaaagttatgtctgcagccacacaccttgttctctcaaataataaacaggaaatgacctttctccttaacagttggacactggatcccaagccctccaaccctccagcagccctcatgtagcatcagtctctgagcattgttccctcagcttcttcatggcatccagtgcctatgatccattcttcctttcttttcacctaacaatatgcttgtctgagtttcagtgctgcctctctggctctgccttaacccattttgatgctggtcctcttccaactgatattaaatagccaagatagtccttctcatattagattctctccatgggcaatctacttacagagtttgctcttttatagaccttgttgtttgaaattctaaacacatgaaatgtcaactcaccttccagccccctcttctttatggcttcagaactgcacagccaactagcttctcagtgtttttccttgatgcccacattaaaaaaaaaagtattccaaattcaatttctaatcactcttctcaccatgattttcatatgcaccttacaacaagtctatggtctctggagaataacttgctcctcttgaaaactcttgtcaagcaagtggaaatcagtagaactctatttgggcagctacagtggcctccaagctgattttttactctcatgcccagtgttttctacacatggtagcatgggtgcttattatgtcactccttatttaaacactttccactgttaagtgccacacaggacagaatcgtcagtaccaagagttcatgtatgttgtcattgcttccttttagtcctcaccatcagctagtctcatctcctcttaccatggtcttctgcttgtccatctttggtttatacttctatgttcagaattctgatctgctttttaccctcttagttgtgtccattctttaagtctcaaatcaaagtccatgtccaaaggtaagaaatttcccaggctgccttcagtctgggctagaactctcattctatatttctatcacatttccttcacaagccccaactctgtcaccagcaaatcatagtccatgtccataggtaagaaatttcccaggctgccttcagtctgagctagaactcccattctatatttctatcacatttccttcacaagccccaactctgtcaccatgtaaatagggaaattgttcattcacatctctctaacaccttcatttcatagtgggcaccagttttctgtactcatgatctatctttgctgccagcacagaatgccataggaaatattcaactagaatttgttagaccaacaagtaccccaaggctaatattcccaggaattgttttcttaagatatattttaccagtaggtggaaagtagacatcatagctacttttaagacatgaaaaatgcaaannnnnnnnnnnnnnnnnnnnnnnnnnnnnnnnnnnnnnnnnnnnnnnnnnnnnnnnnnnnnnnnnnnnnnnnnnnnnnnnnnnnnnnnnnnnnnnnnnnnnnnnnnnnnnnnnnnnnnnnnnnnnnnnnnnnnnnnnnnnnnnnnnnnnnnnnnnnnnnnnnnnnnnnnnnnnnnnnnnnnnnnnnnnnnnnnnnnnnnnnnnnnnnnnnnnnnnnnnnnnnnnnnnnnnnnnnnnnnnnnnnnnnnnnnnnnnnnnnnnnnnnnnnnnnnnnnnnnnnnnnnnnnnnnnnnnnnnnnnnnnnnnnnnnnnnnnnnnnnnnnnnnnnnnnnnnnnnnnnnnnnnnnnnnnnnnnnnnnnnnnnnnnnnnnnnnnnnnnnnnnnnnnnnnnnnnnnnnnnnnnnnnnnnnnnnnnnnnnnnnnnnnnnnctttggagcctatcctggcactcgctctggagaccaggctggcctcgaactcacagagatctgcctgcctctgcctcctgagtgctgggattaaaggtgtgtgccaccaatgcccagctcactgttcttttaaatattaaaggcaatattgacaaagctaattctaaactaatatcagatttaaaataatcatgttacaggtacacaatcaaatagagtctgacaatttaactccaatttaataatgtattgaaagatatttttaaatagtcaagttttagaagaaatttacttaaaataatacttaggcaagtttgtcttcaatattataattttgataaatagaatgaattctagattgtcagtttttctatatcttttttagtttaaaatgtgatttctcaaatgtttttggtatggcttgatattggtaaatggacttgtgacagcaattacttccaccctggaattattacctaaaagttacaaactatctggatcttaagaacagaaataatcatcttaggtacagcatggcttagtgaatatcatatgctcatttaaaccatatgtcagatgaattagaacccatgaatgaaaaagagaactaaaccaagaaagtaagtagcagagttagtatttgaaaccaagaattctgatccaagaagacatgctcttaagcctttgttgcactatccctgaaggtttgctagctaggtgagcattaacgattctatactcagaatctttacagagtcctcacaatggcattaccaggataaacgtgacttgctttatgaatcacattcatgaaagtggagacccatgatgtaaaggaatggaccccacatgtgagttcttgagagtatgacacagtgtttgggaatcccagtcccccacatgccttcattatcagcactttgctgcaaccatactgtagttttgcatggtgctatcctggcctttggttgttacagtgtatacatggtaccaaaaagttacaacttgcaaatctctgaaagaaccgacctgagacagctcctctgtcttcagtgtgcttggtagaacaaatgtccctgtgattaagatgaacatcaattggctagatagacaattacattttaaaacataaaatcattttactaacatattcttttacctactgtcttctatgtcatgatcccaaactatattaaatcattagtggaagcttttgcaaatgatgctggcataactggatgctggcatgtagaagactgcagatagatccatgtctattgccatgcacaaaatttaagttcaaatggatcaaagacctcaacataaacccatccacactaaacttattagaagagaaagtaggaaataccctgggacgaataggtacaagacaccatttcctgaacataacaccatagcacagacactgagatccacaattaataaataggacctcctgaaactgagaagcttctgtaaggcaaaggatacaatgaacaagacaaaacaacagcccaaggattgggaaaagatattcaccaaccccacatctgacagagggctgatctccaaattttacaaagaactcaagaagctagtctccaaaacaccaaataatacaattaaaaggtgggatactgaattaaatagacaattttcaatagaggaatctaaaatgcctcaaagacacataagaaagtgttcaacatccttagccatcagggaaatgcaaatcaaaacaactctgagataccatcttacactgtcagtatggcgaaaatcaaaaacaccaatgacagtttatgctggagaggatgtggaaaaaggggaacactcctccactgctggtggagtgccaactcgtacagccactttggaaatcggtatggagattcctcaggaaaatgggaatcagtctaccacaagatccagcaattccactcttaggcatatacccaaaagaagcacattcctacaacaaggacatctgtacacctatgttcacagcagcattatttgtaagagctagaacctggaaacaacctagatgcccctcaactgaagaatggatagagaaaatgtggtgcatttacacagtggagtactattcagcaggaaataaaagcaatggaatcttgaaatttgcaggcaaatggatggaacttagaagaaaccattctgagcgaggtaacccagtcacaaaaagacaggcatggtatgtactcactcatatatggattttagacataggattgccagcctgcagtccatgctgccggagaggctggtaaacaaggaggaccctaagagagacattcatgatcccctggagaaggggaaagggacaagatctcctgagcaaattgggagcatggggggaggagagagggaactaggagaatgagaaggggagaagaagaagggtgaggaagacatgatggggcagggaggttgagttgggggacgaacagaagagagcaagataagagataatataacaaagggaaacattataggtttaaagagaaatcagttactagaaaaatgtctggagagctacaaagatgacaccaactaacaatctnnnnnnnnnnnnnnnnnnnnnnnnnnnnnnnnnnnnnnnnnnnnnnnnnnnnnnnnnnnnnnnnnnnnnnnnnnnnnnnnnnnnnnnnnnnnnnnnnnnnnnnnnnnnnnnnnnnnnnnnnnnnnnnnnnnnnnnaaagaggaggactgatgagcaatgtggtccatatcaggctggcgaaacccacagaaacagctgatctgaacaaggaaaaacacttggttcccagactgatagctggaaaacctgcatggaactgatccagactccttgaatgtgggtgtcagtgagaagaccttggaaatctatggggcctcttgnnnnnnnnnnnnnnnnnnnnnnnnnnnnnnnnnnnnnnnnnnnnnnnnnnnnnnnnnnnnnnnnnnnnnnnnnnnnnnnnnnnnnnnnnnnnnnnnnnnnnnnnnnnnnnnnnnnnnnnnnnnnnnnnnnnnnnnnnnnnnnnnnnnnnnnnnnnnnnnnnnnnnnnnnnnnnnnnnnnnnnnnnnnnnnnnnnnnnnnnnnnnnnnnnnnnnnnnnnnnnnnnnnnnnnnnnnnnnnnnnnnnnnnnnnnnnnnnnnnnnnnnnnnnnnnnnnnnnnnnnnnnnnnnnnnnnnnnnnnnnnnnnnnnnnnnnnnnnnnnnnnnnnnnnnnnnnnnnnnnnnnnnnnnnnnnnnnnnnnnnnnnnnnnnnnnnnnnnnnnnnnnnnnnnnnnnnnnnnnnnnnnnnnnnnnnnnnnnnnnnnnnnnnnnnnnnnnnnnnnnnnnnnnnnnnnnnnnnnnnnnnnnnnnnnnnnnnnnnnnnnnnnnnnnnnnnnnnnnnnnnnnnnnnnnnnnnnnnnnnnnnnnnnnnnnnnnnnnnnnnnnnnnnnnnnnnnnnnnnnnnnnnnnnnnnnnnnnnnnnnnnnnnnnnnnnnnnnnnnnnnnnnnnnnnnnnnnnnnnnnnnnnnnnnnnnnnnnnnnnnnnnnnnnnnnnnnaagttatataaaatttctctagcttttatctctaccacccacaatcacaaagttttgaattggttaggccagtaggcaaaaatgcttggaggctctatgttttcacaccaaagtgggaacttggaggctctatattttcacactgaagcgggaagcccgtgttctgcctgtgatcattctttacatatcaatgtactgccagcacttgcttgaactctaccccaaatatgcccatgttcagtgccttccaaagtttatcaactaaagttcctgtggaagaacacatgaacacccagttccctgagccccattctcatgataaggcattaaaaaaataaaaagttcctggactacactaactactttcccgaattgcaatttgctataaagagaatgttttgttttaatattgtggataaaccttttccaaaactaagctaaatgtattgtctactgtatcttagcagagaatcaaagagctcttgaccttggcattgagaactccgttcattttcaagcagaagtgtatagttcccttgtgttagctaaggagaactgccacagttgtcatatttgatctgtgccttggcagctggaatcaaagacctacattttcagttcacttctcatgactagtttcctcacagccccttctctctaaatcaattttcccatcttctctgccacactaatggatgcagaatggctcataagtgatacttgctcactattttgtgagctcattgatccagtggtgaagaaaaatgtccctccaaaaaggcccttgtgttgatcaggtttaagagaataacattctcattaataactgccttgctataaaaataaggctttctcacctagcttcttacctgagtgtacattccctcaccccatctatttgtcccttctctcagccaacttcagttaatagtcattgatctaaatcaagggttggaaaataatctacagagctaggtagtaagtagtaaacacttcaggctttgaagctcgtaaaatctctgttgcagctattaaactctactgttgtaatatggaaggcaaacatagacaacaatataaactaatgaaagttccagtaaaactttatttacaaaagtatgctgtaagctgatttgaggcatgcctgtagttcagtatgaaggttgatattggctatcaatatgacaggatgtaaactcaactaaggaacagaaggtctgtgagggagattctagattgagttgattaaggtaagaagacccaccctgaatgtgggttgcactcttccattggctggagtctgggactggacaaagcagatagccagcttagcatcagcatccattgctctctgccttctgattgtactgccatgccttgccttcctgctgtggactgttgcctcaaactgtgagtcaaaagaaactcttccttccatactttccctttgtcagatatattgtcacaacaataatcgaaataatgaatactctgattcttgactcaaatggtttttaaaaaattggcttttaacatttattttattatttgatttacttatgtttgcatgccaaactactttaaaatattttattcaagaataaagtatgactctaggatgaaacaaaattcaggaactctgcattataaacagacaagacatgaaaattggaaatgttgtctagaaccgtatactactatgcaatgggaaattaacagataaacataatacgaatgatgttcacaaccaaaggatccttcaaataccaagagcaagaggacatcttgttgtaaatgatcctacaggtaggacttcataggtgtaggtgaaggaatgagcatgccaaaaagaagagtagtgcggtccaagcatgggtgaaacagccagtagagtccagagatattctgtagttttgctgcaatgtaaagtaagcaggaaagaagtgaaaggtcatgataataaggtttgggaaggatgccaagctaagcagttgagtgtccaacagctaacacagagaacaattggatgtactggagaagggatgaacggtgctggatcttcactgagaatcaacatgaatctctcttaactgatagcaaagagggaaatctgaccacaaatcttcagaaaaaaatgatgttcaaagtagagggagggagaaagagataaatgtttttccccccctctggggcatacatacactacctatagggtttttcaaattgcccactttgatcccactgattttgatatggcttactagtaattgagaatcattgtctttggaaaccattattacaattatctatgtgtgtcatggttgttaaagtgggaaatactatttttttttaattctgataataaggatgtggtattaccttaacgttaatgtttactgaggagaaatgaacaaatatgtcattatgcctagacagggcatcaataacagatgaaagaaatgattgccgattttgatatggcttactagtaattgagagtcattgtctttggaaaccattattacaattaactatgtgtgtcatggttgttaaagtgggaaatactattttttttaattctgataataaggatgtggtattaccttaacgttaatgtttactgaggagaaatgaacaaatatgtcattatgcctagacagggcatcaataacagatgaaagaaatgattgcacacaattctagtttgataaaccaatgagtttaattagggttacttaaaggaaaatacgcataaaaataagtctctctgctattgttaattacttacatatttccagggaagagatataccttggcatctcatgaactttcccataaaccacttgtatactcttggttgttcatgtagggaattacagctactccaaattatctagacccctgggagctagtcccggggtcatacagtcaaggctaagtgagttcagagatggcatgatctaaagagttgagccaatcatgctgaggagtaggcaaaagaagaagaagaagaagaagaagaagaagaagaagaagaagaagaagaagaagaagaagaagaagaagaagaagaagaagctgcttctaagtctgaagcttgtagatttgaggctctaagcagaggtggtaataacagtccaaaaagaggtgacctcacaaccaccatctgtgtcattcagagaagatattcagagagaagctcacgcttcagggttgctcatattttggtggcacaagaagaaaaacaaaaagaaatgattcacaaaagaagaaaaagcactgtccagataccaagagaccaaggctaaggaagatcaacaagaatgaattggccaaattactgacaactgaaaaacaggcctttggagtgaggaaagatgtcaccattcacccctgggagaagagcagatgggctatagcagaacacaggctgcagggggtggaggcatgagctgggtgaggaattgcaagtagcaactgtaaatcctcttgagaaatttgggagtggtttgttcctgggctactataaataacaggaatgcaggaagcaggaagtgagaagatgaaagggacatcttagtaacaggagaagagtccacaaaggacaacatttgggattaaatagccccaaggttacaatcatcacatggtatgatgcgaggcccttgagatgtttgccacccaaaggttggagggtgctggctttaatagtgggacagctggccagcaatcaccatcaaaagtagctggagagcccctgagtgcagtcacatgagaggtacatgatatgaaatagcttaagcagacgaggattacattatgcagaagctaaagctgtgagagagaccaccaactttgattgacatacatatgaaaaaagaggtcatgataaagcagtgtactaatttagataatgactacatattatgaacaaatgatggagacagttcatttttttcagcagagtgtgagggcaaagttgaatttggtatatgactcagcatttattggaggtggctctttttccttcagggagcccagggaatgtcatcactgctataccagactcacagaccagcttgtctcaggatctgtgtcatgtttctgggtgtcccagacatgaatttgcttcagccaactcaaccttctgtcaatttcatttctagaagctcaaaatttcaagcaaaaaccagcaaacaatctacaaaacatcaccaaacaatcatctatggatatctagttttctctttacacaagatctattaagactttccatgatcagagtcaaccccaggagagctatcacttacatcaagtaacatgcgcataaggaatatagactttcttaacaatttttttcatctgcttccatctgttcaaaagccactggtcttgaagtacctgaaaaagtgggtgtttgtgaccaagaattctgccctgccccaaacccagatcagagaacagtcatcaatcactgtgacaaggtgagatgaaaaaaaaattaccatcatttcttatgtggcatgagctgttacccagtgttatgatgaaagcaaaagcccaaggtgctttttgagactttgctagtgtctacaatactgaggagtgcagaactgaacagcctagggaatcctagctgcagacttgactctcagagatcacgtttctgtgcctgaaaaggattcccctcattattcttgggaatgaaccttccaaatagggagtattctagattttctcactccaccaggccagaccttggggacaccatcatgctctgaaacagctgggctgaactcaatgataaggcagactagattaggtgacatgatgggacattccaaaatagccacatagccctcctctggtcactgaaaattttccaactggtggtccaagcagcacagctacaatcttgactatcttctctgattactatcaggtatgaacctccctgtgattagaaattatatctcacttgctagtgacctcatccttactggacgtggtcacatgtcctcccaggagggtcagcagttttacaatagtctgtcatgggcctctttatagtctttggcagaatggaggggggggacactaatatgatgacctcccagtaactactcagggaccacctggccagtagcttaaaaatggaactcatcacagataacctcttacaggttcagggtacgctttctcatcccaagtagaaaacatttccaactatggaaccattaacaaatgatccacatacagctctgtcttttggcttttgcttctctctgatctgattcggtacctaaacaaggcagaacttgaagcctaacatagcatcccagtatctttcaaattcatcattttagggaaaaaatttaagcttctgcagagcaaaaaatatcataatttcataaaaaagaaaacaacagattgtcatccatatttgctgaaaatattttccccaaagagttaatatttatattacttaaaaactcatataaaatgataagagaaaatgtctacttccagttatcagcaatacccacttgagtgtaaaatttattctcttcttgcctcagtcttttcatcaatggatgcaggtcagaatcccagcacaccacatgatcagtttcaaatgcaacaaagaagtgatggcaaatcagggacattacctgccagtactctaacttcacaatgaagaaatgtaaatttatattaaaagaaaaatgggtgatggtaatagtcaatctttctaactatcctggaaacacagactagaagacatcttttatctgttgcagaagaccatgagaaacacagagcatcaccacagtcaataaggtgtcaggaagaccaggcatcattaggccattgcacccattctgtgtaaactgggacatcctttggaaagccacttggcagtatctctaaaataaaaaatatttatctcttttgatcaagtgtgtctgtgctaggaatttctttcatataaacagcctgaaagatattcaactagaaattcaaatgttttcattgctacaaattcattgtaatgaaaagatctagaagcagcttagtgtacaatatcaaacaaatgattaatttaattacataaggtaaaaagtagagactgcaaaatcagatgtgaattgtgcttgcatcatttatgtgcacatgtaaataagaatgaaaacaaatttgaaatatctattggctttctgggtgccaattatattggtacagtttttattttttactgatttttatctgttgttcttttaaaaagtaatgtgacacccagccaacagtttccaccttgcctgggatatcttcaccacccagctagatgagatgctcacttcataataaccaagtgtttctcctcccacattgcatacagcaatactatccaccactcaccaggggacccccccaatctttctagaccctgtgcctttggagaaaatgttaaggaacctgaacacattccaggtactgtatatacattcatatattatgtaatcctcacagccacccaccaggaaggtgtaacaattgcccatattgttcactgtgactcacaacacttaatactccatacctaactctccagacatgcctactgctccagtatctgaattagaccctgggccagagaggtggatgagcatgttaggatattcaagcaggtatgttaacccaagatcactagaacccacagagaaagaagagaacaaattccttcaagttgttttctgatttccacatggacaccatgatgcacaggtatccaggtatgtggggttgacttttactagaagaaactagaatgaaattatcttcttgctaatgaggcacaccagaagcttaaggctgtaaggtctaccccagcaaactcaaggcaagttaattctggtgcacaactcttttttcctagaatctcttcaactacctagcctacaaagtcaatccatttctagaaggaaatggcagatgatgctggacagtaggtatagagtagctgctctaaagtatttaccaaggaaatgacttggaaaatctgctcaaagctcagaccggaggtggaagtcaattttcaaagtccatgggcttcatctcctctttgctctccacctctctgctcagggctttctaaaacttctacccaacctcttaatacactctcaatattctttgtcctctacccatagaatttactaaaacaaaagaacacattaacatcccaagtgtctatgtgctgcttcccttaaagccattaaagctgagaagtcttgagtcaaggaagcaaatctcttgtgaaactttagattttcaaatagccattgagcaagcaatggctagagaaagccggctgtcatggagtccctaagaagaaagttgagaacttgagagtcatgacccggtttgttggcagccaaaaggcttgcctatccttccatgcatgcaatcaaatactttcttcaaaccataaataaatacaatcgaactagacttgtatatcttaaaatagaaatggtttcaggttttttccatccatatatgtaccttcaatcttaagtttaaagaaattgatgcactaagaaacgttcctttttctcagaaggtatagtgaaatagaggtctagtcaaagtgccctggttgcacaatttctctaaaggataagtacatctgtgccatacaaagtgacctcagagctaaaaatagcacaaagaactgaaaaggacatttgccaaagttcttaaagtggccagattgattaaacttgacatctgtctaacttaataggactgatcttaggaatttggctcttcttttctgagccagtattgctgcagttgaaccttgttaacagctcaattagcgtcaaaccagtaagagggactggatgctctacttatatcctggtgtgtagattccggcagtcacatttgtagacccaacttatttagaacatgttctccacgaagaaaagttttcctgaaacctcccaaagctttaattagaaatgccccttttgtttgaccataagggcatctagcttcacagcacaacatatatttttctgattaaagagcttcacctgaccaggatgacactcacggttctcacagtgaatggtcgagttgtgctccagttgtgctccaattatcctgagacaacagtctgcttaacaggacaggcagtaattgaccactgagttattctaacggaacaatccatacaaatggattgagccagctctcctcccagggggtcagcatgtggagcagacatcctaattatccacagccagctgaagccatacatgctgggacttttctggtggcttcttggcaatgagggatgaagaactctatgtaggtatttgatcttccgtaccaatggcagaaggattttgagtcttacatgaggcagactataggtccaatagtcctagagtccatgccaagttccctcctagacctcctcaaaccttggatcttggtgatgaatcttgtaatagtgaataatgagtagcatcaaatactgaaattgaaaattaccattaattctctcctatcaaatgtattagcaaatacttagtactcaatcccctctcctttttctctttccccttcctttactcccctattctctgttggaatcagtgatattgagctatatattgactttcatacacatatacatgcatacatacattatatatgaaagtcaggttaataaatagtcatgtgctgatcttaaggtatagtatgagaacccatctgctaataaatctcagttatagtcagacatttccacccacggaacctaaagagagctaaatctcacaatacatttgttctctaatacaaggcaactctgatgtacaatctgaattttccttcctgtgcacaaaggactttgataagcctatgcagaacccgttttcctttccagcctcacctcccctttacctgccctcttggctagaattctagttccatcatacatgatgaataccccaataaaatcccacagagacagtttcaacaagaatataataagcattcaactcaagcactgttgaataggttaccatcaaccttaaatggtcttcttccaggatgcccttctgctacctcttgttggagttgaaattctatgcattctcatcacccctcatgaatatttatatgataatatttcttattcttaaatacttcttattttaaaacaatttaaattcttagttgaattgtttgtgtgtctatcagattacatatgaaaaatatttctattgtaaacaatcactcctatgcctcacttgtgatgaggactcattatctgttcaatgaataaatgaacaggaaaggaatggataactgatcctaaacctgttgcctataatacccctttcccttttcttttatcaacttattgaaaccattcttagcccttaggcaagcagataaagcacatcttaaaaaaaaataaggcaatgtaagtatgaacacaatatttaaataggattgtagtgatggctgaataagcttataaatttattttaaaatattggcataatactgactttattacatgtaattatatccattgtctattagaaatgtgaactgaaaataaagtgtttactttatagaatggcccacaatgagtgggagcatctcagagctcaaaatggtttagaaagtgatctgaaatgtggaaggagttaactatggaaatcccccctttattctgtgagtgaaattgcttgtaccttctgaaaaagacattaactaggtcccacatagtaaacgtgtttaatgagagcataagagttcacgtaatgaaactggccttcctccaaattggtggaaaggaactaacctaatttcagagtttgattcatggtttggaagaacaacaaatttgtttcatttattctacttaattgaattaacgagttgagttcaaatgaaacaatttaactcaaaaattatgttgataacaaattaaaagcaataaatccttgcaatgaaattttattggttcaatattttctagtttggtatttctcatcaaattagagtgttgtctatttttaattggtactgctgtattttatatccccttaaatatttccttggagttttccaggtcttcaatgtagagttgataatgtcatgaactcttcatatagttctgatctctatggtccacattatataaaagtatttccttttcaatttttaaacactgacttgtgagtttccattttaaataaatcttttataaataataatggatgcttccatctatcagtcaaaaaacattgtttttctttctctaacttttttagtagaatgtgttactaaagagggaagtccatgcctagtaatgccttcagccctctcttgtttgcagagatagcctgaggaacaaattcagctggcaaataactcttgtcattgccaacctgttaaaacacaggagaagggtgaaagacagtgaattcctgttggaaacatcaaagttaaatgtactgcttgacagacatttaataaaatcagatacgaagaacaggaagggtaagtcgttgtaaacatcagttggcatgccttgcagttcttggtggtctgagagtacagcttcttattccaaagtctgtgaataaaggcagcttcacagttgctctcaagtcttcctagctgaaagaattcttgtacagttctaaaacagacttatttgatatctattacagagacttcatggtctaggaagaaattggtgatttacatttgtgaccatatttccaaaggggggaaaaaacctttttatgaggtgaagggaatgtgaggggcacacagatcacatgcagctgtctgtgtcaagcagttgtttttctgtccatttctggattcagtacttcagtggcatttcaaaacgatattagggtctattcctattagtgttgcttttctgatttaaagcaagtgttagatctttttctaaattgtgttttactttgttgtgattgttatttctgacagcgaacagaaaagctttgaaataactgtcctttggcataaaccaatagccaggatttaagcttatctgtcaaagactatagcaacagacttaagaacaaagtggttagttgtggatctctaatctttcctgggttttgtaactaggtgttttcaagtccttcatgggaaccatgccaacctctctgatctccttaacaaatagcatcttctagacctgcttactccctagcgatgatcagtggcttaatttcagtcctggggattacaatcaattatttattacactagccttgaaaatatttatggaaaccagaacccatttggttccaaagacagaactttttttctgaagaaacagtagcattttttaattgctaataaaataaaattctgttcttcatttgaaaagtgtatccaagaggcatgcaagttcagagggtttagaacatgctactccaggtttccctgaagtaggcttgtgttcgtctggctgaggacaattatccacatacctgtggaagaacctttaacattttatttggtagcaattgaatatataaaaataccatacaggtttactcctgagcaatttgattaaatagtaaaaatggacatatttcttcaccaccacatactgtccaaaaatttttcagcatcttcctagggtaggaaagtgttgaaacactaaatgatgcatctgctaataagatgtgaattaaaataatgaaaagcacttttctttggttattcttaaataggccataaatatttacacccattataaaacaccttaacagctcagtgagattgaatgcagcaaaattgactgcaatataactccaaacagtttataattccagtggactttatattacatctgagagagcttaacacagagaaaagtctacaagttgactggttaatgttctttgtttcaataacattcaaaagaaacagaatttcttgaagtagaatctatatttatatacagtgtaatccaaaacatcttgtaagaactcaaagagtaagacaaaactctgaagctgagtgcttgagtctgagcatcaatttttcacatatgctgtgaaaaggagaactcgtgcctaacacaaacactcgacatgtcatgaacttaatgtttaatgtgcttcctaatgtttaattttatttcctgattatccaaaatatcctctacactaagtatgagaagaaaggaagaaagtatgtagaagagaggaacagatgcttgcttgaagacctacaatgccctgaacaccagaggggtgtggttgtgcatatacattttataaataagacaaagaaaggataagtagcttgacctggaccatatagcaaatgacatcaggactggaattcatcctcagttatattctccaaagaaaaatgcccttcccttagctcaaataatttaaagtgttcaattctgagatcatgttcccccaaaattctgttgttataataatggctttatcacagaactaccaaagcatttgaagtctctctctatccctcccctctctctattcatgttaagcataatcatgtatactcatgtgagcatgtacgtatggaagccagtggtcaatcatgggtcatcctcagggcggtccatcttgttatagttttggtctatttttttgttttgagaaagagtatcacactagggcctgaggcttgctaattagggtaaactgactgtgatctgcctgccctatcttcccagcactgggactatgaatcccagctttttacatgagtgctagaatgcaaactttaccaaatgaggcttcacaccatcccccacaatgttttaaagtacccattaatgattgctcttcaaaattatgctttcaaaagtacaacatctattattaatttttgagattttattatatgtatacaatgataatactcaaccaccactcaaagtatcctttgctgtgacaagatcaaacactgagaatcccaggttacgcactcatatttctttgtaattttgtaagtctataagctaccacactctgcaagtcagtgtgctttggttttcctggaaagtgagaaatcttgggcctcccaagtgagttcacagactatagtcctcagcatccagataaaggtgagtggagaagagagtcaaaagtccctaattcaagagcattgtgaatgtttacaggtagaccaaaggaaacactattgttcagcctgtttactactgtctctattacttgctacatgtggaaagaggactacggtactggatcaaggagttctccaaactatcctcattaacttatcacctgatacctagcagatcgaaattctagtcattatccctcaggagttcatttgaggaattctggggacactaaacgacaaagtattagtactcttcagtctaaccactgacactattaactattgcactttatttagttttatatgcatggtgtgtgcatttgtgggcatgggtatgtgtgcatgtgtgtgcatatgtttgtagaagacagagggcaacattaggtattatcttcaatccctgtccaccttacattgaaataaggtctctcactggagtgcagctcaattctgctaggctgaccagcattacttttggatatttgccccttccagtcctgcagtcctgggattatgtacttttctgtgggtgtccagcatctaaacttgtcttcacatttttgcagctagcactttatcaactgattcatcttcccaacaccttactattaggtattttccatatttaaacttaatgttataatttcttgggggtggggacaaagcaagtggacaacaacttttataatgcccctgcaacctcttctgacattcagcaaagccaggaacctaggacccatgtttcagtcactattatttggtgtttcagtcactattatttgtgttagtgctgacaaaaattgccctttgtgaagaaataaacaagcatctttttatgataagtgtgacttatctgtaaagaagagattaagggttattgtaatgaatctaccttaatagtggcaacaatgagggcactacttgacacaagtttaataaatcctgtcacatgtggagaacactattaaaatgtcaagtgaacggaacacagtgaaacaaatcgaggaccacagcccttagaggagctccgttctttaactcagtcctctctttactcttttcctttccagtgtatggtgttgaaactgagatgctttcccccatcatagcttttggtcaacatagaaaacaaatatgaaatcctgacagtcacacttatgcccaggaagtcagcaacgtggtctctactacattcatttacttatgcaaccatttcttttcagggtcatgatcagtgtgaaacgcttggctacttgacatcattagtatagggctaattaaattataccctttgtattctatacttcaaactttggccaacatggaaagaggctaatctgtaaggaaggtggaagttcttgaaaacaaaaaaaaagaaactcatataatacaagcacttgtctcctcattttgtcccactgggtatgctctaacacactctggagagatgagtttctttttctcctttttttttattagaaagaaaattattttacatatcaatcccaggtccctctccctccccttctcccctgccccccccaactaacgccctacctatcccatatgctttctgctccccagggttggtgaggccttccataaggggtcttcaaagtctgtcatactctttggaatagggcctaggtcaacccccttgtgtctaggctcagggagtatccctccatgtgggatgggctcctaaagtccatttttatggtagccataaggagagatgagtttctttctccagcttgggaaaatctacctgtgtatagtctatactcctggtttgttttttaacttataaactgcatagctcattgcttttagctccgtcctgttttcattgaaaaatccatttcaccgagtaaaatcaagatggcttcaaattagtgatggttgggattcttcagagtcattgacaaaaaccttttaagcacatattaatttccaaaggccacctgtattgtctatataaactgtttctaccattgtcatgattttatcatgcaatgaccactctggcccaatcatccttaagcacagtgatcctgtctttgctctgggttttaacagctttttatagacagacattttagaattaaatgaaactttcctctaaatcactttgcttacagtaggcactgttctctactattagccatttccaatttcccaccaaaaagaaagatagagaacccatattatttaaacaaaggaaaaggttccaggaacctccaatatacaaatgtcagaaatgaaagtcatggaaataaaatgccctgaccaaactgctcagatatcaagaagtatccagacctggaaaccatatcttacatcaagtaatgcaggcttctgcccattagctcaaatagcttcattttctctttgcatgttttatgcctttaaaaaaaagttatatgtagagcaactcagcagagtagagaaaattctagaagccaaaaaacctagtttttaaaccctcaagcaaatgagatctttttgcctcattctctgtgatagcataacataattctatgaaatctctttggtaaatcaaaaaatatctacatacagtttagtacaaacaagatctcattgggccttgtctgtaacccctcaggcctcctggtcaatcaacatgaacacatctttagttcttggggcaaagtttcacacttgccatttctcagttttaagttgttgctctcaactcagaaactgagataaaaacatttctcccagtgtaagtgtctcagactatccccacctttatcccagaggtgctaagatgatggaatgcatgtacatacaaccaagactagggcagccaaggtcacttggcttctgaactgcagacatggattgtgattaaatggcaagatgatgacaatgactgtctaatcttgatgtctaagaacatgaatctttcagcacttggaccacttcatttttctccttagaataggatcactgtcatttggcctggaggacttttttttttctattttccaaaaaatgtaggcaacccatggtccatatggcaaaatataacagctacctagaaacaagtaacaagcgatgaatcaagttttgaactagcacctagaatttatcatactctctgccccctcccaaaacaagctcagaaaaccgtcctcatactaaagaggaagatagctctcagggtttcatatgctggttagctattttccaactttctgatgattcctttgatcagtggtgataagccccactaaaatcatcacattgctgctatgactaattccataagcattctcaaataaagccaattgaccattaaactgctctcactgtggcctaattcttaactgattgacagccaaagaaaggtcattgatcacaaacatacactctgaaatgttgagagagaaaaaaaaaatcacatggcgcacactgcctcatttggtagcttgggtttacagttcctcttctttctttgtctttcttttttttttttaattcaaaggccatgaatgcagatagcttttcagttgtccttgtgttttcctggctgaaagcaccctgtaagccctctcgaaatagatgagtagctgaaacaattgcatcttttcaaccctgatctcaacccatctaagattttgatgagctgcatacatccagcaaattttaaggaatagtggtccttcagtttctaaagtcttttcagagcacaaaccccatgcttgcactttgctttgcacggttctgctcattttcaggaaaaccatattttgcaccatatcctcacatattgatatgttgaggaaataaacagcaaacatcacttcccatccatctgctaagcttgttagaaggatgaacacagtgttcagatgtttttcactcaggtctcaaattccatattcaacataatttgcttttacttttcaaggcaaatcttaagccagttagatgaaatttggttcttctcttaaaaattaataatagtaataaggtagaagccatgttggatattgtcaagatatttctacctccaggctgctgtagagactcttaacaaaagacagtttgctctattttcctatgaaaaaaaatagcagttactgctcatttactgatgatgtaaatcaaagtcccggaagacatacttaatctatcattcctaacaaactgttttcaaaagatctttatactaatccatcagtacccagaattacacaagctctgcctgagttgcaaatattttaaaagcttgaagcaaagcaataaaagtcaattgaacaagcaaatctttggcagtcgtggtacccactggaaactgagccaaatgctgttgtgcaaaaggcaatgggaacggaaagggccgaagtccttagacttgtccctcttactgtttctgctttgccttctaattataatgacagttcttcagggagaactatgacctgtaatacactcttcatatcataaatgtaggattgatgattttgcaagctgcacttcaaaggacaagaaaaacagcaatgaacaataaaattgtttatcaagtaacagctaagcagacagctgagaacttctaagttatatcaaagataaaccattgaaagatcctgaagagcaaactgaaagttctttactgatgtcagttttaatttctttgtgtgataccaagatgaccccattatatatctatttcttcccaataatagggatgaaacccagggttttgcatatgttggtaagatatattcccagtccaatataaatatattaaaatcctttagttttaatattaacatgaagaatcttagtagagtcagtacaaactaatctacttcttttaaaattcaatatatcaaattttgtcaaggggcaacagctcctggaattatcaaatgattacaggagccattgtgtggtcttagcaaagaagcaaagactatgagggaacagaatttggagcaggagagggttacgaagagggtctacggttcagcgagtctcatactatcacatgtgccagatctctaggaattcccacaagactgactctgaattgcaggtctgtcatgaaagcacacacacacatccaactagctccatgggagctagtgctgctacttgctggaccacattttaagtagccagtgtctatagcccaagccctagaatttgaaattttcacaatgtgaaactattgcctatggagaaaataacctttttttctataataattggtaggtgtgtgcttgtgtgtggtttcagagatagccactttgtattagataaccaattaagggctcatctctggaagaaactgatttgacttcttagttgcttagttctttgattagggttgggacccaggtgcgtgcgttcgtgcgtgtgtgtgcttgtgtgtggtttcagagctagccactttgtattagataaccaattaagggctcatctctggaagaagctgatttgacttcttagttgcttagttctttgattagggttgggaccca

SEQ ID NO: 12 - DNA, 372654 bp, Cricetulus griseus
  source 1..372654: mol_type = other DNA; note = UBAP2 Contig Sequence
  misc_difference 1..372654: note = N can be a, c, g, or t
tgagaaggacatagacacgacattcacatggctgagtggatgaggggctcgtaggaaggagacttgagtttgagggcagggaacctgattgggaaaagggactttctccccatcctctccgacttctcatgctaaacgcctgcacacaatctactccatatctcccgcacacttctcttgtgagccccctctcagagccccctcatggcaaatggcctcgtcccctaccctgcgctcagcactaacatgtagcagagtgctggacaaaaagtcctttgggacaagaaagaggagcaaagaggaagggactgaagggagtaggggtgggatgataggggggggggggaactggnnnnnnnnnnnnnnnnnnnnnnnnnnnnnnnnnnnnnnnnnnnnnnnnnnnnnnnnnnnnnnnnnnnnnnnnnnnnnnnnnnnnnnnnnnnnnnnnnnnnnnnnnnnnnnnnnnnnnnnnnnnnnnnnnnnnnnnnnnnnnnnnnnnnnnnnnnnnnnnnnnnnnnnnnnnnnnnnnnnnnnnnnnnnnnnnnnnnnnnnnnnnnnnnnnnnnnnnnnnnnnnnnnnnnnnnnnnnnnnnnnnnnnnnnnnnnnnnnnnnnnnnnnnnnnnnnnnnnnnnnnnnnnnnnnnnnnnnnnnnnnnnnnnnnnnnnnnnnnnnnnnnnnnnnnnnnnnnnnnnnnnnnnnnnnnnnnnnnnnnnnnnnnnnnnnnnnnnnnnnnnnnnnnnnnnnnnnnnnnnnnnnnnnnnnnnnnnnnnnnnnnnnnnnnnnnnnnnnnnnnnnnnnnnnnnnnnnnnnnnnnnnnnnnnnnnnnnnnnnnnnnnnnnnnnnnnnnnnnnnnnnnnnnnnnnnnnnnnnnnnnnnnnnnnnnnnnnnnnnnnnnnnnnnnnnnnnnnnnnnnnnnnnnnnnnnnnnnnnnnnnnnnnnnnnnnnnnnnnnnnnnnnnnnnnnnnnnnnnnnnnnnnnnnnnnnnnnnnnnnnnnnnnnnnnnnnnnnnnnnnnnnnnnnnnnnnnnnnnnnnnnnnnnnnnnnnnnnnnnnnnnnnnnnnnnnnnnnnnnnnnnnnnnnnnnnnnnnnnnnnnnnnnnnnnnnnnnnnnnnnnnnnnnnnnnnnnnnnnnnnnnnnnnnnnnnnnnnnnnnnnnnnnnnnnnnnnnnnnnnnnnnnnnnnnnnnnnnnnnnnnnnnnnnnnnnnnnnnnnnnnnnnnnnnnnnnnnnnnnnnnnnnnnnnnnnnnnnnnnnnnnnnnnnnnnnnnnnnnnnnnnnnnnnnnnnnnnnnnnnnnnnnnnnnnnnnnnnnnnnnnnnnnnnnnnnnnnnnnnnnnnnnnnnnnnnnnnnnnnnnnnnnnnnnnnnnnnnnnnnnnnnnnnnnnnnnnnnnnnnnnnnnnnnnnnnnnnnnnnnnnnnnnnnnnnnnnnnnnnnnnnnnnnnnnnnnnnnnnnnnnnnnnnnnnnnnnnnnnnnnnnnnnnnnnnnnnnnnnnnnnnnnnnnnnnnnnnnnnnnnnnnnnnnnnnnnnnnnnnnnnnnnnnnnnnnnnnnnnnnnnnnnnnnnnnnnnnnnnnnnnnnnnnnnnnnnnnnnnnnnnnnnnnnnnnnnnnnnnnnnnnnnnnnnnnnnnnnnnnnnnnnnnnnnnnnnnnnnnnnnnnnnnnnnnnnnnnnnnnnnnnnnnnnnnnnnnnnnnnnnnnnnnnnnnnnnnnnnnnnnnnnnnnnnnggcttttagaaaaggagaggcctgccccccagtcctttatataaatagcaaagctgaacaggaaccaggcaccgatgggggcagaggttcggtgcaggacctgggaattcccttcttctcaagagaggagcgcccccagttcaagctgggggcatctggaatcgggtaggggaagagtgtgtggtggcgagatgaagaatcaagggtgtccatgagaacactaaggtgccaccagaataggaggtggagctgtgctggagcagccnnnnnnnnnnnnnnnnnnnnnnnnnnnnnnnnnnnnnnnnnnnnnnnnnnnnnnnnnnnnnnnnnnnnnnnnnnnnnnnnnnnnnnnnnnnnnnnnnnnnnnnnnnnnnnnnnnnnnnnnnnnnnnnnaggggatggaagggggagggtgataccgatttatggaggcatggcctaaagaagaggatgcttgctggccattgccctggggctacctggctgtcattgctgacagcaaatgggtaggaaagtcacaggcctatccagctggactagagaagggagaggggaaaagaatgcttaggctgtgttcattcacttaacccaccttggggccagggctgcaagagctaaaacgatgcaggataggccaggaaccaagaggtatggatgcttgccttgccctctgctggcactgacatgtgctctcccactcctgaaacccaaggggctgcctaagcctcttccctctgttagtcagagtggcccagaataagttcttctcttgggcctgcagcttcagaattgacaatatgctttgtggtttcctagataagtaacttgcctattacagtagccaagaaggaccaaggtgggaactatgccatatagtttgctggataattagttgccatctagctggagatgtgtgtcttctacattttgtaatgctgagacagatgagctttgtagaagtgtacaatattcagtggagagaatcctgcagggcttttttcctaccttgatgccaccactgaattatttgggaaccagaaaatccctggggagaagtttgttctatgaacataaagaaggaccttggctgggttagaactttgcttaataggctccctattcagctaaccttgtttccaaactaggatgcccttccagttctaagctaatcgtgtgtggatgggtggatgaaaggggtggaggttctggtaagttgaagaaaggagtggttcttgtttctcatctgaggttcctgaaataatagctaaggaaagagaagaaagagtaaggccatcaggattgtgcacttgtcttggtgactctgtatttctggtattctttcttaatcatggtcggaagagtcctgagctgttttggtttgtatggccctgaagaaatagtttgtggtgaggaggtgctcattagaatagctgtagctgcccatgcccttttttgaaagctaaagcagtcttcaagagaacactgggttgaggctgagtgaatcttaaagaaataacaatacagtctaacacttgggggtcatagacagtaccctgtttcttgactcttgctcctttattggagtctagagacaccccagactcttaagtaccctttatctcattgagaacagcagaatcatgtatagcgcttccccaaggagccttcatttgggttgtagggaatcaagatgcacaccgcagaggtggagggcagagtggctccgtagccatgtttggcgaaagaccatcaaaactagggccccaggctcagattcacctgtgatcccttccattttctgctattatttatggtgacttctaggaagtctcttgtcctccctgaactgtttttccatttacaaaacaaactattcatttaatgtttaaacaataaatagttcctcattctcccttccaaaggatatcatggagactgatgtaccaactcaggaaattgatttcccaaatactgaatgtctacactgttccagatactcacaagatatcagggacatggtagttagccacagaagctcagatgggcctgccctgctggatcacacagttcagtaagagctgatttgtgttgctcactccctgagagcattgtggagtctgcctccttagaccccaagaaaagatgaaagctttggtattggccttattgcccctttcaggacctgggcgtacaaacaagggcctgtgtctaggaccccaccatcaaataatcctccctcaatgagaagcatctttttctttatttttacttgaaagagaaactcatcttgaaaaagaggcttgggggagtggcagcactttagagggaaggtgcagccagtagatctgggtgtttccaaggtgctaatttaagcattagctctcagctcgtgggaggcagaggaagaaatccctgccctgttgttgctgctgctgctgttaccacagctgcctggagcctcctgtccggggtgggagtttgcccaaaaggagtagcttcccttctttccctatcaggccagttatttaattggcctggctgcatctcagcagctgaaccaggtcccagcctatccctgagctccccagggtctcttcttgtctccttaggaaatgagagctcttcttggtgatctattccctgggctctgttcctgctgtgtctgtctcccagaaactttggagtggcccattaattgtgccagctgtgccatacacctcactaatccagggaaactccctgcttcccagggctctgttgaacaattgagtatatttgggctgttgttggtatgagtggcagcaggcacaagccctctggcctgttgtctgtacagccacacaatctacatcttggaagagatttgttgcaagaaaaacaaatagagcttttgagtacttaatttcatccagcaatactctccctcctgtgcagtcaaaggcataagatacttactgagtggcatatggcagcagacgtggtccctgccggcttgagagaatgctagtctagcctcaatgaaaccagattacccattaactcatttgtttagttcagagtgtttgctacgtatctgctcagttcctggtactttaagaatacaaagactagtaaaggcttcacttatggatctccaggagaaggaggggctcgaatgataacaggaaggtttatagatgtatgtcagaatgcatattaatggatggtgatcctgagagaatgctgccattttgaccctttggctgttgtagctggaagaggagtttaagacttctgttgcctgctgactctaagggatgaagattgccagggtgtcaactcagtcactgggccacaggagctcctgagagtggaaaggagagcatcacaaaggaagtcaacactgaggaagactaacctatatgtctgctctggtttatgtgcctttaagttgttccttgtagtcagatggatcttcagttttaagggggtagctgctggggagaagacattctctttatcttcctccatggaaaactggggttgggtttgccaaagccttaatctttacctacatagctccttctccaaaatacactatggaagaacctagatgttgttctgggctcaacaaacagactctcactgcaggagtatacccagagaagggttgactgaggtaccatgggataatgagtaccacaggagaaccaagaagcagggcccaaggcccaaagatgggttcttatccgatggtaagggaggccttcatagagaagcaactgctaaccagctcttagaagagtattaggaataccagtcagacatggtacagaaaaggcaagacttccaggcaccagacatggaagaagaaacaaaagagtacatttgggatgaagtaaagcctgtaactaagagaaacagatttgagcttaggatactactttagtggtgaacgagagattagcgaaagtgaggttggagggtgagacgtcagtagggagactggataagagatggtgaggccagagtaaaagcagatgtgcataaaatgccagggcagggtatggagccgctttagatgtggaatgcacagctagagaatcagagctgaccccaaggttcctgatgtggacatttgaatggaggaagggaccaccgccaaccatctcaggaaatgtgggagccgtgcccttgttttggtgacttcttgtaaaacacggtttctcttttcctttgctgaacttctgagattatggggaactcgggagttctagaaaacaaacatgatgacagtgaccccagcctcacagggtcacagagtatgtgctcctctaaataatttctgcattgcagcctactttgctgagtacagagaattggtggcagcaagaaaccatagtcgggtttttatttattgttttctagacatgttactcagtaagtcactaaagatgacttgaactcttgatcatcctgctgctgcctctgtatgtagcagagaagataaatcacagtatacccaaagatgactttgaactttgtatcttctgccccccaccttctaagcactgagattccagtgtaatctgaaatcctctgacctggtataattctcatcatctattttgtcaaatttacagttttatttcactggtttattctaccatgactatctgcaagagtcataagaggtaggacgtatgctgcccttttctgaaagtatttcatataccctgcaagctgtacttggagttgaaacctggatgctactcctgtgcaggcaaggggtgctgaagaaacagactcccctggtgagagcacttaccaagtgccccagtgtgactttgcaggaggtaatcccatagtagttggtgttcaggctgagaccttcacaggcccattgcccttaactgcttctagccctgggcaaacaggaatgggaagtagacacttctttcctggaacttcattagcttctgggccccactcccctccaggaaagggcagaaggagggctaaggttgtatctcagttagtagagcacttgagtaggaaaccttgggttccatcctcaccactgcacaaactgagtgtgataatgcttacctgtaaccccagcacttagaaaaggggagcaggaggatcaaaaatttgacatcatccttggctacataataagtttgaggccagcctgggctacatgaggttctgtctcaaaacacaaagaaaggtgggctagagatatggctccatggttaagagtgtttttagctcttctgagcctgagttcagttcccaggacccatgttgtatgtggctcatagccacctgcaactccagttctaaggcatcccacatcttctcgttcccacaggtatccacatacattcacacagatgcacacacacacacacacacacacacacacacacacacacacacacacacacacacacactggtgctttgtggtttttgtttttttttttatcagtttgacacaagctagagctatctgagagcagggagctacaattgagaaaatgcctccatgagattggcatgtaagcaagcctgtggggtatttttgaaattagtgatcaattgtgggtggtgccaccctgggcagatgttcctggggtatataagaaagtggactgagcaagccatgaggagcaagccagtaagcagcattccatggcctctgctccagtgccttccttcaggttcttgccctgacttttctcagggatgcagagtaacctgacaattgtaagctgaaatagacccttttctctccaagttgctttcagtcatggtatttatcacagcaattaaaacctaagacaagccttatgcctggaaaggagaaatagaaactacttcttgtgcttagcttagctgtactgtgcctttcagctgactgggaaaactggtacaaagagtcacaagagaggcaggaatggagacaatcaggctgaagcagccacccagagttctgattgaagtctggagccattgttccctaaggaggctggtacaatgggtctgtaacccagcgccagagagagtgacaggcggatccctggagcccgatggccagcaatctgtgagctccaggttcagtgaaacagcctgtctcaaaaaataaaatggaattgataagggaaaaactctacattgatctctggcttccagatgtgctcacacaagtgtatacacaaaccggcatgcatgtgtgcatgacctatacaaacatacccaaggacctagagagatggctcagtggttaaaagcactggttgttcttccagaggacccaggttcagttcccagaactcacatcaagtagctcaaaactgcctatagctccagcccccagctccaggggttccaactctctcttctggccactatgggcatcctcacacacacagcacacacgtgtgtacgcacacacacataaataaaaatcaaaaatcctcaaaattccatttaaaaatattttctgaattgctgagcatggggtatacacctttaactctaatgctagggaggctgaggcaggaggatcttgagcttgggtccagtttgggatacacagcaagctccaggccagcatgggctacaacactgtgtgggaaaaataaaaaactgaataacacaaactgtaaagtgagaatctatgtatttcaatatatagttaattttagtataactacagtcaatctgtaagttatttatggttcccatatttattgtatacttgtatagaaaatagtgatcatcagccaaaatgacttagaactgcatctcctatggtattttgttaagaatactgatcctttgggatacttatgatgaaaaggctttctacaccaattccttgggaaaacactcctgtgctaccctactagggtactcactagcatttaaaggctctgagaagccctgccctaaagcagcatcttcaactgtgttaagctcaatctttcccatactatgtagccttggctgcccccctgccaaaaccccagctatttgcccgcctttactaatctcgggtgttggtaccaccacacccagcccagaacattactcctcaatgttacactactaacatcttacagactcagcgtgttttattgaatcatctctagtctctggcttagaagagtctgtgttctgattgactctaaatggatattcttctctgttcttttttttaacttttaaatatctgtttatcttattttatgtctaagagtgttcaggttgtgtaccatatgtgtgcctggtatctgcagatgtcagaagaggacatcaaatcccctgagactggagttgcaggtggttgtaagccaccacgtgtgttctgggaatcaaactcagggcctctagaagaacaagtacttttaagcaccgaatatctctccagccccttccctgttcctttgagcctctctcagaaatcacaccatcttacccagtgttgggcctagtgggatattgctgacttgactcagggcctgactggcagctgccagcagcaagtttctcatgatctctgatagaggagcacacatacacagggccttgtctttctcataatttgaggggaaaaaaaaattactttccttctgttcagttttgtgggtagtttgtttttacaaatttattgagatataattcatattatgctttaaccattttaaacattacttttaattctagcttggctccctatgccttagttctgtttctcttttggcctcttttgcactgtccttttatgttcagccaggcggtatggaaaataaagattatagtccaagtatcttgtcaggaagaatgccattggaattcacaacaagaagtgaactcctgctttaagagatgtgccttagcctactctgaagccttagtaaatgcccctgccgttcacgacagcccaagggtattcctacacaatcacttcacaccctcttggtccctaagtaacacaaagtatgggtgatagtaaggttttggccctcataccaatgctcattgaactgtagtgtctgtctggggcattgtataggtaaattctgagaaagagccctggtattatgagaaaagtgatgttattgactttccatgtctgccatggtcttcagtgggaggaatggcctttttgatgctctgccttaccatcctggcttcccttaatcataatcattatcctcaacaaacaacacaggaaagggagacttgggggatgggagcccactcagcaggctgtctcactgagggctgcagtcttgtgacatagctccttaagaactgaatattcacctttcctatcccagtctccctaaccagatcttcagcattaggtcttgaagaatgtgcaaagttaacagtccttaaccatcctttggagttggtggactaggtgagaaggtggagccttcagtctgccaaacagctaagaaggacagcggggcagaatgaggcagagatctcatgaatagcacacgagtggctggccatgcttaacatgaaatcataaccccttaacagtagcacgaagagcccctgctagcctcagcatcttcctggttttactccaggctgaaaggaccctggttttccttctatgatttcactgaagcaattccttccctggctgtcctacctacacaaataaatactttcaagttgtttttttttttttttctttccacacagacctgtccatgagatctgagcagcccacattactgtgactgcctctgtgtttcatgatcatatttagtagttctgccttttgttatgttgagcttggggcatatttgaaagacggtggcctttttgtacacagtgtaaaatcaagaggcaaacctggaactacattgtaagccaggcttgactggcagttgggtaaggggccacaagggctgtgaaatggcagcttcatgcgaatcaagaactacatcacgtgtgtgtgatgtaaatcttttcgttgttcttctggttttcttgaaacaggttctcactctgtagcctatgatgacctggaactcattgtgtaacccgggctgacctcaaatccttataatcctccttcctcagcctcctaagtgttagattacaagcatgtgtcaacatgactggcatatgtaataaaaccattattcgcagaaaaatagttttctgaattcatcaaggtggaatcaaggtaaggctgtgtgagtaggtagatgaggtataacttcaaagagagttagtgcctcagaggacaggaagtttaatagaagtctattatatgaggtggccactaggaaacctagtgtactattgggttgcactgatagaagtgtgtagtcctgatctgaggaggtgatggtcccgttctgtcctatcctgcacagcattgtctgaaaccctgaattctttgctgtcatccttcaagagactgacaaaaagaatcgaaatcatgtcatgtgagaacagttgaaagaattgcagctgtttggcctgtggataaacagtttcagagagcacagtacatgaccaaagcttctgagtcctagatgaccaggattaggaaagaaaggttagatttcaagctacctgtgacttcacagggaagatgcaggaccattgaatgggagcatgaaggggctcctacctttctcctctttgaggtagtggctcttcagctggccagaggccaagacacctggaggacactgctctttagaaaatgccatgctctttccaaaatagtgatagagcagaaacacggctgagtgaggcggtcgtgttccagacacactgagcagtgcttggttcctgtgatgagcttttgctaatctcattatttcaaggcctgtcctccaggctccatcttttcctggcctcccgttctttctctcaacaagatgtaagcataccatctttcaccttggagtgggacttttgtgtagagttttaggcctaccctagattcctttttaagagagaaatagacttcctaagcacttgacctaccttgggaagtgggttgagagggctctagacattggttgtatactcctttatgcagggtctgaagacaggaaataggcttgactgttacaggggcagcttaacgttagtctggccagaaccaaggtgtcctggtcccaggcccagggtatttcctttacaacttgaggcctagttcagttttctacatcaagcttcatgggcctttgtggcctccaaaccaacttcattcctcaaagctattcatttctactgttcacgccagctttcttataggaccagacagctctttcacccccctgtcttcttggtacctggagaatatcctcttttaggaactcccctcatctctgactactcactcttacccattctccaaaatcaggacaactctgtttccccaggaagccttccctggctattcttgtgagctgtcaactagtcttagggcctctaacctctatctagtctagtacctggtatatatgacattctggctcaacgtgtctacttcaatgaactatgctgtcccccagtcttgttcccccagttcctcctctatctcactgccaggaagcatctactcccagggcttgatagtccagaaagaagaaactcggtcttgtgaaatggaattaagaggagacagctggcttgtttgaggatgagtaagagcagacaggagttgggggattctggggaatgagtaggtgggagccagggagcagaaacgtacatattgaagaattgtgggagtttcagggggatagatggattgaagaattcattcattattccaagaaacatcttttgagcatctgctgtgtgcaagatgctgcaccagaagtagggaatagaataatcaagaaagcaagcttggcaatccagtgggagaaacagatcctaaacaactaaagcacacaaccgaagtcacagtgaggaacaggtgagtggtagaaacacaggaaaaggagatgtgaatgagaacagtgagatgggtgtcaggtaaactgcctgtgggaacgtgctgtttggctcagaccacggactgaggatgtcctgggatgctctgacagggagtgactgcttcttgctccctggcatgtcagggactcccccagagtcccttccaagagggactttctccgtcctcttcttttacagccctaggtaagttttcagaaataggcatgaggaagggccagtgtagccctgctcccattggtagtgaaacctttaaccacactgccagttctattgtgggactgggagagctattaatagtgtggtgatatttaatatttaatgagctctgttgatgaagagctcttacctgagttctccaacactgtgtatttgtatatatcctcctagagatgggaaaggtacccaaagtcttggcgggaagagggaaggaagaatacaacctggacagcctgtctttagcatgccaggctcatgttcttggcacagaagctgaaggtgcattctgtctagggtaggcctgcctactgatggaaaaggcatcagccactagcatgcagattgcagagctcatggtaggagcctccactgagtttcctgtggtccccagagcagtccctgaagatgctagcttccagaaaacctctgctctcagctggcctgctgctcccagccctgcttagtcagaatcatgggctcagaaaggccaagcagagatcatgatgtgtggctagtggtttagagaagagggggaagaattatgtgatagcaggaagggagataagagagacagaggaaaacattggcacaagattgagccacttatcaacaacctcttcatcaacttcagacagaacctcattcagattggagcttctgagatagaataatgaggcaatctcaggaagctcccttagaaagaactggtttgagtgtctttaattatagagagaccccaagaagttattgaggggtctggccttggagcaagaggtatgctcaacagtaccaggaagtcaactgggtgtatcctactatatctttggtatgacctctggccagcctcctggcctcttccaggctacttagaaaatgaataagatcatgtacaagcagatgaactacaaattactctccttttttttgagtggggggtcctggtttaatggtgatgaaggggttggtgatttcctttccccatcagtggttcccaggggaacttttgtgggagagggtgaagaggtgtttcttctcttcaccagatggcatctatttggggctgtgttgaggccagcctagagacaaaagagctttcttctcagaggggaatcccatgagagggcaggcacaaggggagctgagaccctgccccttcccctatgccatatctgtgagtcctgttgtcatagtggcaccttcactgttgatagagggaaggccttgtcctgctgctggttcagtttacaaaggtcagtaatcgggaaacatttgaaaacccttgctcttatatcagtgggatggaggaggagacaggcccagactgttgactttgagttcttttcaacaatttgtcaagagtataaacttcaagcatacatatactaaagaagaaagtaaaatgaactctcaggcacgcatcaaacaacttcaaaaattgtcaacacaagactaatgttttgcccatgccctccccccataattctaaatagttctttttgtgtttagcatcagcatgtttctcttcctaaagtcatgtaaaacagaccataatattatcacatctaaaaataattctttaacatcataaagttttccttggtttgaaactagtccatatattgcatttagttgaccttttgttgtttatttgatttttttttttgagacagggtttctctgtgtagctttgtagatcaggctggcctcaaactcacagagatcttcctgcttctgcctccagagtgctgggattaaaggtgtgcaccaccattgcccgactttagttgacctttctttcttgcttgcttgtttatttggtttgttttttgtttgtttgtttttgctttgttttgttttaagaaagggtttctctgtgtacccctagctgcccttgaactcactttgtagaccaggctgacctcaaactcatagagatctgcctgtctctgctttctgagtgctgggattaaaggcatgcagtgtaccaccactactcagctgaccttttttttttttaattttattttattggttgtgtgtgcatggaaaccagaataactttgtggagtcagttctgtccttccatctttacttgggttctgggatcaaacccagcttgtcagacttgtgcatcctgggcttttacctggtcctagttggcgtttctttaatctatagtccttccttctacttttttttttcttgcaatttatctatttgaacatcttttgttgttgcagttttctacactctggattttgttgatcacatccctggggtgtttttaatcctgttctctctcctacatttctgtaaactagtagtagatcagattcggattcaactgtttatgaagaatgcctggtagatgcactgtgcacttctcctctcccctctgaagtgtgattgtgtccatcgtcctctgcacagttgtcccactttttgtgggttcagactgattgatggggtagttagcctgattacaacctattacagaggttctgcagcgtccgtttacctaatgttctcagcagtccctgatggtcattgccttgtgcattatttcattaggagtttcctcgtccccattagcatccccggcctctcttctttgcatctgcttttcccacactgtccttaacccgtaccatcatttctttgcctcatcaacccaagatgccctaacagcacttcaggcctggaagactccatctgcttccctggtggcctgcacttccctgaggggagggtcctgacttggatctgttctcactgaggcagctctctgaatcctgctagggccatgcctgacccacactggggagtgcaagcagcccaggctgttcctcctcctgagagttctgcagagagctggctttattcccccttcccatgactttctcaggagccctcttctgtactggggagagtcttccatactgtttcctcagcttcctgcccaagcctgggccctggcagggatccaagcctggcttcctgtttacaggcagagagagaggtgaggggggcatgggaagggcaactccagcactcatgtccctttttctctcctgccaagtttagacacctatgagggccagcgcagttaccatcctctggtactttggcatccctgtgcctctcatgatcaccactcctgttggattcttcggctcagaggagagactatggataccgtgctctgtgtattcatgcgccccagacagaaaaagcaaatgcaccactttctccatggggcagctgagcaggaagcacagagctgagagctgctgcttgcagaccctggcctacctacacaagtccaacccaacagagcttctgggtggagcaggaagccttcgaggtgtaaggggccaggggctaattatgagagccagaagacatcaggtatgctatggtggtggtcattgccaggtgcagtcaattctcagcatctgtgagggactggctctaagaccagtgcccccaccctctgccaataccaaaacccatggatatgcaagcacattacttattgatagccatggtggcatgtgctaggagtctcaaggattgcttgagtacatgagttcagtactggcctggacaacataggcagacaatgcctcaaagaaaaacaaaactgaaagcttaggataccatacacgtacactctgtacacttgaaaccctcccaaagttccgtgcaatgactaacacaatgtgcatgttatataaatagtattttgtttgttagtttgatttggtgtggttttgagacaatgtcttactatgtagccctgctagcctgtagccctgctaacctagaactcagagatctacctgcttctgcctaagtggtgggattaaaggtctgtgccaccatgctgggtataaatggctattatactatattgcttaaggaataatgagaaaaagtctggttacattgatatatgcaggactcactaattcacaggaccaaccctgtaggatttctgctaagagacaacgggggtgccttaccctcattcctccatatgcctggctcttccttgaacagtgagaacctgaagggccatattctgctccaagagaggacctgctatggattaattattttcaccactctcctggatggccccaacaagaattgtatgaaacccaatctctctcatcccattaagagagattatcagtgatctgcagtggcacacatctttgatcccaacacttgggaggccgaagtgggattatgaatccaaggccaacctaatctatatagtgaaaccttctgtctcaaaataatgaagcaaccaacagaaactggatgtggtggtgcacacttgggatccccagtaatcatgaggctgaagcaagaggattgcttcaagtttgaagtcagcccaggctgcatagtgtttcaaggtgaacctggaacatacagtaaaatcctatctgagcttcccaaactccctaaaagagcacaaagagacatagcatgtagctaggtagcagggaagcccgttatccctcacatgccaaggctcaaattctgagcagggaatggcagtgggcacctataatctcagcacttgggagatggaggcaggaggatcaggacatcaagggcattctcagctacatagtaagttcaaggccatccggcctacatgagagcctgtctgaaaacaagaagactcagatccttcagatggcctgcgaggcctcagctagtcttcctgcaacctttctgtccagctcactccttcccattgcctctaccactgactgcacgctgctttgattttcctccaggtctgcttccttttgcttcagggattttgcacatatagttttatttttggagtgttttgttctcctttgggttggctccatctcattgtctgggcttgcttctgggaccttctctccttattgcacttttcacaggtgtcatttgagaagtatatagataactgttctattgagatagggtcttatgaagtctgtgttcactaaggcagagaccatttctgtttttatgttattcctctacaaagtacctgtcacatagtagactttctgaatacctgttgagtgaatgagtgaatgaatgaaaatttcagtcttatctcctttacttagtaacctatgtcattccatcacacttaacatgtgtcctgtgttggtgaacatttaccagacatgcaacatttcacttattctttgcaactctgtaaaagaggtatcctcaatctacagagagagaactgagacctaaagtcacacagctaattgggaagccacttcaacccaggtgtgtggcctcaaagcccattctcttaaccatagtaccacactgcccccttttggcctgtcacagagttgccactgagtcctggttaatttcagcagagaggtctgtggggcccagctgtgaaaggacatgggtgatggaatttagcctggggtcatgcatctcaaggtctgtggccccatatgctttctatggaccctttgccacttccaggctgaatacagcatcttgttttagagaaaagaaaggccggctgttttaaatggcctgatctgcagtgtgcagggagtaaacaagcactgactaagattccgttaaaaataattgagagggagaaaggagcatttgtatctttgtgatgcagtcactaaaaacagcactctggaaattagctttcaggtggcattcctgggaaatgcagaccccgagagagggcagcctcttagtcttgattacagcaaagctcgcgttatccaacttcccagggcttctctggtggcagggaaattggagctgacgaatactttggactatatggggacatgcaaatgagaaataggtggcataaatataaaacccagctcccatttgttgacaggcatgctgtaaaacattctacattcattattccctccactcaaggtaacacggcacccataaaagggaagaggcattcatgaagtgacttgccaacagtaacacaacagctggccttcctgactttgaaaccagagcatcccctaaactgagtgggtggtgatagacacctggcgatggggcttcatccctatttctaggactatggttaaactagaaaaacagcaactgtataaagacttccattcactaggcattataattgttcttgagtaaatacatctaggtgtggtggtccactcctgtaatcccagaactctggagactgcggctggaggatcacaagttcaaggccagagtgagctctgtggtgagacactgccttaaaaatgaaaacaaataggtatataattttacaaggtagcattaaaatacttgctataaatataatagctgcaacatcaacatagtgaaattttaaaatgcaaataggctaggcatggcaatgcatacctttaatcccagcactcaggatgcagaggcaggagaatttctgtgagttcgaggccagcctggcctacatagggagttcagagacagccaggaatacacagagaaactgtctcaacccaccccttcaagatgtggagactgattaaatcatggaacattctttccactgcatacataggaaatcttttataaggaggaggtgagccagatgtggtagctcatgcctgtaattctagcacttgggaggccaaggcaggaggatcagaagttctgggccagccagctagatgaactgatgagctgacccaaccggtaaaggccctcgctacataatcctggtcactctggtttgatccccagagcccacaagaagatggaaggagagagcccattttacaaagtcatcctctggtgtccacatacatcatatacactaataaaaagtcagttttaatcaaaagatgtttataatctgtttttccttagcacaaagcatattacatgcccggtggtggtgctgttgctggtggtggtggtggtggtgtcggtgtcgacggccgaggtggcacacacctttaatcccagtaccggggagtctaggacaggctccaaagctacagagaaaccctgtcttgaaaaacaaaaacaaaaagcatataacagccgggcgttggtggcacacacctttaatcccagcactcaggagacagaggcaggcggatctctgtgagttcgaggccagcctggtctccaaagcgagtgccaggataggatccaaagctacagagaaaccctgtctcaaaaaaaaaaaaaaaaaaaagcatataacataaaagttgccatcataaggtgcatatgaaatatttctagtctgtgtttaaatctgtatgtataaccatacattttaaagtctgaaagtataaagtagcaacagttctaatcatatgagaactttcactttctcccttattcacctttatgttggaatctgttaagataaatcaacttactttattttttattattcctttcccctggcctatctctccctgcacagacaatagagcttttgtcccatcattcacataattctagaatcaggtattgcatggacatacctgttggctgctcatctggccagtcttgtccctgctgggcccctcagctctggcctcatacactccgttcacatctttgcacttccttctcaaattctgcagagcctctggctgtgaggagacaggcgtttctttggaaatgagaaactcaacattgaacagctatattcctgcctcttgactccctgctggcaggtttctgcagcttcaccttcagcagcaaagagaggcgaggaggagagtttagtctcacgtcccctcagctccagccatgttcttggatgttccccctcctgctggtgtttccagtgcagcctttttatgtggcaaagtagtgaaggaacagaaaacgtaattagtcctggctcgggcactacatggcaactactcagcctgatttttttttctctgcaaaattggaataaataattaacactacatctgtgtcttatgattgtcagagattacatgagaaaatgaggggaaagctttgaaaacataagttgcaataaaaacataaatgcctctatttttctgaatgtagtgttttcagatttgtgttctgctcttatgtctacatacttgcttctacatctgcttattatggaataacagtttaataggaagataagagatattgaaaaactttgaaaggctacttcctaaaaacaacctaagagggctggagagatggctcagcaattaagagcacttgactgcccttccagaggacccaggttcaattcccagatgccacatggcaactcacaactctttgtaactccagttccaggagatcctacaatgtcttttggtctctgaaggcaagcaggcatgtatgaaggcacagacaaacacacagttgaagcatgtatacataaaataaaaatattaacgcctagggaagggagaagggaagcagtgagacttgtcttctcttcatctgctctgtttccccagtggacacgctctgcttttttttttttttttttctttagttagggaaaccaatacagatttttaaatggcttaagacaatatagtcacactagaaatagtcattggaagtcactcacacagaggtcgacagctggggcaaagagaacaggggatttagaaagataagcaactgtgaaaacagcttgattggcaaatcgggaccatgttgttaaaactattgaatgtcaggccaatgagcttttaagtggtggaagccattgaagggtcttgagcaaaggactactgtgatcagtaatgtgattctcagaacagtgttttaggaataatgaaagtggatgagatggctcaggccttgacagctagctgtcctgattctaatccccagaatccatgtaaaggtggaaacaaagaaccaactccttccacatgtatgccatgggcacacacacacacacacacacacacacacacacacacacacacacacacacacacacacacacgcacgcactttttttttcatttttatttttagctttatccattttacacaaactttttttggaaaaagaataatgcataagatgacttgaagaagaaagaaagacaaaactatatgtagtcagtcatggtagtgacattgaggcttcgatggaaagaccttgagttcaaggccagtctgggctatacaggaagtcactgtctttaaattacattactgttttgtagaaagtgttatattccatttccaattggtttgacagaggtctaaatggaaagagggtgagtcagggagaaccacagtcgggtctaagagaggcagcagcttgtaagaaaataataatggcattgggttataaccccaattacaggtattaatccacactgacatacataaatggttaaataaacaaaggagaagggacaaatactccttttagaagaattctaattatatatgtacatatataatttcataaaatataattaattaaagttttatatttgtagaaaatgagagaaataaaaattacaactgaaacatcatagtaacaatagctgctgttatgattcactgactgctaaatctagagggtgacactttaagcagatccaagatatttgaatagttatatgacatgcttatgtattaattactgttgtagttttaaacatgtatctatcctcactttctttgatactcctctctctaggagatggaatctaattctcttccccttgaatatgggctggactaagtgacttgtttctgataaagagaaaacagtatgacagaaatagtaatttcacaatagagagacctgtcaagtgccactctaagtgatgaagattaatcccactggcagtgagacctgtaactcccagtgtgccatcacaagcacatacacctccagtgtattctcccccacaatttatataacctgaactagctacaagaacccttaggcaggggctggagaaatgactcagcaattaagatgagttaactgaggacccagattgaattccaagcccctacatggtggcttatagccatctataactccagttcaaagggctccatcgccatcttctggcctcctcgggtactgcatgctcattatgcacatacatacagtcagacataaaggaataaaataaagcaaagttttaaaatgaaacattaggcaaacgaaaaagacattctaggaaatgcttgaccaggcattttcttgatctcaaaaatcaagaaaaggatcctagtataaaaactgtagaaatttacatcaactgtgtagtttagttaatagcaatgttctagtattaacttcttagagttgatcatgtaccatagttaaataagatgttaccattaggggaaactagatgaagaactgtctgaattaccccagagtgtaagtatagcattgtttcagggctggtaaagatggctcagcaggggaaggcacctgttgccaaacccaataaactgagtttgaccccccaggatttacacaatagaaggagagaaccaacttctggaagtggtcctctgacttccacatgatcactgtagcacactgcccactcccataaacaaataaatgtaattttacaagattttaattatttcaaaatgattaaatttaaaaatatccccaccacctgtgtgtgtgtgtgtgtgtgtgtgtgtgtgtgtgtgtgtatgtatgtgtatgtttatgtgtgtttagtgtgttttcctagaagactgctgttaacaagataaggacagctgaaaggaaaaatgaagactatatgtagcaagctccaggccaaaatgggttacacagtccattaaacaaaaactgcgggcgttggtggcgcacacctttaatcccaacactcaggaggcagaggcaggtggatctctgtgagttcaaggccagcctggtctccagagtgagtgccaggataggctccaaagccacagagaaaccctgtctggggaggggggaactgaaaagaaaatagagtttccaaaaatatctaatcagcacttccaatgattctgaaactgaggaacagtcacctaggaaaaggccactgcagcaaagtacgctgagaagttccttcctcctggtgtgtggtgtctgcagacagcagcctggttgggagtgtacacagcctgttgcctatggggttgccctaagggaccttaaagacagtttcctgtggcctagtcatgcatctggtctcaatgcttttcctgtatgtaggcttcaggcagtgatgtggatgcctttggggaggcccagggcacagtggcctgggttcacattggccaggtcatcatgtctgtcctcaccaaactgcagaataaggagcatgtgaccgaagccctgcttcaggtttaatcgagatgagcttgaagagatactacttgaaaaacagctcatccctaatactgtggagtcgagtatattccaagttgtggtcccctagacaaggggcaggccctgtactcccaaggaattcattgtactgccctataccctcccaaatcatgttcagtaataaatctcacttcttgtgggcatttggataaagggccactggatttttaacaaggaccttggcactggccccaagagttagcagaggggctagggagatgacttaaaacatatgcttatggaggacctgagtttgtttcccaccacccacatcaggcacctctcaactgcttataatgccagctccaaggagatgcaggacctcttgcctgcagcctccataggcacctgcacttgcatgtacacacacacacacacacacacacacacacacacacacgtataactaaagatgagagaagacaagaaggaatggagagtgtacacacgagtcaaggtgccaggactcagtgcagaaacccttgccaacactaggcaaatagactaatagaagaggctcctagggagccaagcatggcggcacatcccagcactcagaaggcagaggctgatcttgagtttgaagtcagcctggtctacagagcaagttccaggacagccagggctacatagaggggaaaaaatctcctaggggaaggaggaatggatactcataaacaaagagacaagcaatgatgtccagagcaataagcccaagggctgagcccaaagtgcaagaagaaatgcctttgaccaaaaagatgcctctgccacctatctgtagccaaactcaggctaaaagctagaggccagtggggcagtggtggcacacacctttagtcccagcacttgggaggcagaggcagaggcaggaggatctctgtgagttnnnnnnnnnnnnnnnnnnnnnnnnnnnnnnnnnnnnnnnnnnnnnnnnnnnnnnnnnnnnnnnnnnnnnnnnnnnnnctgttaaaaacaacaaaaaagaaaaaaaaaaaaaaaaaaaaaaaaaaagctgaaggtcgtgtggctgtgcattaaggactgtttctttcactccttagctgagatgctactctgtttcccaagtcccaggttatcccctgtggactagaaagtcagactggacagaaaatgaaacaagctggatttatccatttgctgtgcaggttgtatttgagatggagattttttttttgtaatggacagcattgcagagtagtttctctgtgaacatgcatgtgtgtgataaatgcacacctaccatgaacatgttttgtcgactgcttaccatgtggcagagactggtaaacacattatatcatctcagttaaccgtccccacaaccttctgagacaggtaggtgctataatgttcctcatgataaaggtgaaaatggagagccagagaggttagaaaattggtgaagttcacataagtgggacttggatagatgcagctcagtgcagagaaactgccagcctgcactgaggccctggcttcaaccccttctatggagaaaaccacacagatacataaatggcaaaaataggactcaattcaaaatcatttgttttaagcatcacgctatactccctactcctgctctagtgcactcatgcacacgtgggagtgcacgcgcacacatacacacacacacacacgcacacgcacacgcacacgcacacgcacacgcacactcacagactgtaccaggagactaacagtgggtataccgctctagaccagtggttctcaaccttcctaaagctgcaacccttcaatacagtccatcatgctgtggtgacccccagccataaaattacttttgttactacttcataactatgattttgctactgtcatgaattaaaattcctgtgttttccaatggtcttaagccctgtgaaagggtcatttgaccccaaagggcttgagacccacaggttaagaatcactgttttagatggggaggttaaatgnnnnnnnnnnnnnnnnnnnnnnnnnnnnnnnnnnnnnnnnnnnnnnnnnnnnnnnnnnnnnnnnnnnnnnnnnnnnnnnnnnnnnnnnnnnnnnnnnnnnnnnnnnnnnnnnnnnnnnnnnnnnnnnnnnnnnnnnnnnnnnnnnnnnnnnnnnnnnnnnnnnnnnnnnnnnnnnnnnnnnnnnnnnnnnnnnnnnnnnnnnnnnnnnnnnnnnnnnnnnnnnnnnnnnnnnnnnnnnnnnnnnnnnnnnnnnnnnnnnntggaggagagagtgaggagtggagcaaatgattaccacacaaagaattttctccctgtcttaaggccaccttgtccttggacaaggtttgtttgatcctgaactttcagagagactggggacattttttttatatatatacatacatgctaagattctgaatcttagcacttattgaaaatctggccagagagtcaagcctctggcgtgaagcccaggctgcagccatgagtgactggaatcattctggagctgcttcaagggtgcaagccatggacccaagcaggcagctggtgtcagctgttggcaaagatgaaccggtggcatttaaggtcacctctagtagcatgcaggcctagtccagatccgcccacgtgttcaggggtggtgattcagaacgctggatagctcccagaggagtcctgcctctccagtcaagactggagaccctgcagattcactttgtttgtttagacttttttgagacagggtttctccctgtcgtcctggctgtcctagatctcactctgtagaccaggctggcctctgtcccctgagtggtatacccacattattaaggccctgtgtttactcaaatttgaatagccttcttcaacatgtctcccacctcaagggcctggcctcttctctttcaaagactatccctgtgagtgcaaaggctctctgtctcagcacctttcctaccctcccttgactgaactctcttgaagtcaccattcctctcaaagtaaagtaagttttagagacatcatgccatctcctgcgttgtgctgtccatggccagaatctgacaccaaagtacctcaaggctttgtctcttaacatccctggtaccttcctctttaagcagagaatgagggaagaccattaagagaggacactaagaatatttcaaagcctgacagaagagcctgcaatggctaccactgtaacttcagccaggcaatctgttcaaacacatctgtttaaagacttggtttgggcggggcattggtggcgcacgcctttaatcccagcactcaggaggcagaggcaggggggtctctgtaaattccaggccagcctggtctccagagctagtgctaggataggctccaaagctacacagagaaaccctgtctcaaaacaaacaaacaaacaaacaaagacttggcttggggaggtgggtattgacatagatgggaggagcacatctagcaagtagacgcagaaatgaaacaagtgggtctgggaactccctgactgcccacccctactcttgcatgcaagtggcccctgagcccacaggtagaactttgagcaccattaggggaagggttcgtctcccatgctccaagtgacactgtgggagtatgagggtgcgaaagggcagcagagtctcaaccacttacaggacttggattttgtagtggaaagttctcctgcctccagatctctcccacagccaagtgaatgagccagcaaaggaggtaagagcataaatccacctggatgggaacaagcaaagatgcttaaggagcccttcctcccaaccagtcacgctctggccctgtgcaagaccctttcttcctgagaccttgttttcctcaacactttcaggttcctggatcttttagtgagggaactgttataccccacggtcactgcctaacttatacctcagtgaacgtgctggtcaaagaaactgtcctaattactgacatagtatgccctacccaacagccaagcacatgcagactggcttacactcccaaaccaaccagccacagcaggacagggaggttcggggaagagcatttgctgtttactgagatgttagtggacctgatggaatttaggctgaaatgactaaagctgctgtcaccccaattgaagtgcttttaggtagcactcctgcagatagaacccctggcaatgtagtaattgataattggtaaaaagaaaagcgttcagtggccctggacttgggctgtcccctcaattaccccatcttgcttttggaaacagcacattccagtttccaagaggctcttaccgtgaggctaagcacaggctctttcaacaagtattcatagagaagaaacaagaacagatgaggactttgcccgatcccaagagatttgtttgtattggtttttgttcaagtagaacaatcctaacctcagccagagcttgctctccatctgttctcaggggcaaaggcgcccctgtgttttccttcctcatggtggatgctctgtactcattgttttctttaggagctgtgattatgtgaacataaaccttactaaattgaatacaaccctgagcattcagaagaaacagtgcaggactccagggagagagcagctgtctggaaagaagggcccatgaattctaaccccaaggctgccatctggcattgacctgggacaactcatttactctgccctggggctctttctagaattccaggctagaagccaagcaggcctgggctgtcagggggtgaagagacctcagttggtgctgttcacagcatgctgaaacccacggccagaggatgtgcactgtcctggagatttcttgaagttttctatttagcctttctgtcctagtgctgaactcccaagaggtccctgcctggctgatgcacatagttgtgatcctgggttacccaaaagcacttttgaagtaatgacttagatggggctgagaatggtggttggctatggagctcttgttccactcttccctgctatactttggtgtcactagcctcattccccaaggggcacctcggtagctcccacctcatattgctcttctcagatttttcatcctcagcctcgactgattccttgtccctaagatgtttcccacggaagccaggctaggttggacatatctgtaacacacacttacacttaagtgcatgaagaaaagaggaggtgagccgagacccactcaacctgtagtgtatgctcctagggcagtgcctgttcagcacagcacagcagagtgtggaagagccctagtcctagcttgggaagcatttgagtggagtgggcctccatagcagcacagctctgaggaaggaaggaaggaggtaagacattatcaggcacttaacttcctgcaaatcctctctgcatggttttccatcgctttgaactgtttattaacacacaacagaagccattttgctatttagatggctcctctgggaactccatgccactcccaccccctcctgaggtggattgaaaaaaacatcagctttcaagattttatacttgaatttcagaaactaaattacattactacatacggtgagacagcgccatggcctgttcctatctgtgtgctccaggcatggcaaggctgataacatcagtgtgtcaaagcagctcgatccacacaatttgcagccggctggagctgggccagaagtaatcagagtgggggtgcaaaactctcagaatctggagcaccccagggtctactgtaggtaggcacagggatttggggttctttccataaattatcatttcttctacctgtaaagagagaagttgtcttaatgaacctaagtgtaacaagctgaaattactctctgaaacactgaatcacacaaaagcactagtaacagtacgctcagacggttttctctggggtcaagatggacaggagaaaggagagagtggaaaccataatatgtaaagatatgcccctcaggtctaatatttatttctacatttttattttatgtatacgaatgagtacctgtgtgtgcctgtgtaccacaggtatgcagtgcccatgaaggccagagaggacttcaaatctcctagaactggagttacaaatagctgtgtgtcctctggaggtggggagtgggggcaggaatcaggcagtgctctaaccactgagcaatctcttcaacctgtttttgtggtatttttgagacggggtctcactctgtagcctaggcttctgacctcctgtgtcagcctctccaatgccagggttccaggtactgggcaccacacatttgtatgtttaaaaaccaaagtactcctggaaataaatattctgtgcctccttcaagtccagctgtgaaggtctcataaccagagttctcactaaaatcaggttgtagagtggacagagaggaagtattgcttccctgccagggaacatagtaacttgtagagtctccttcctaattgtaaccaacatttaattctcaagcattcctctcatagcagaaagtcttcagattattgagttattccaatgcatcaaatgtcataatatattcagtcagcttgggaagcatttacagcccaatttttataaatagcaaaaacaagctgttcatgtccaaaacatgattgtttccccagatgcatttgctccccagggtcaaggtttgggaagaaattcagcctcagtgaagttgccagtcctctgccatagctcaagtccacctccctcaccctagtgtctcctcaccctagtgtctccccgcaccctagtgtctcctcaccctagtgtctccccaccctagtgtcccctcaccctagtgtcccctcaccctagtgtcccctcaccctagtgtctcctcaccctagtgtctcnnnnnnnnnnnnnnnnnnnnnnnnnnnnnnnnnnnnnnnnnnnnnnnnnnnnnnnnnnnnnnnnnnnnnnnnnnnnnnnnnnnnnnnnnnnnnnnnnnnnnnnnnnnnnnnnnnnnnnnnnnnnnnnnnnnnnnnnnnnnnnnnnnnnnnnnnnnnnnnnnnnnnnnnnnnnnnnnnnnnnnnnnnnnnnnnnnnnnnnnnnnnnnnnnnnnnnnnnnnnnntgtctcccctcaccctagtgtcttcccaccctagagtctctcctcaccctagtgtctccccaccctagtgtctccccaccctagtgtctcctcaccctagagtctctcctcaccctagtgtctcctcaccctagtgtctctcctcaccctagtgtctctcctcaccctagtatcccctcaccctagtatcccctcaccctagtgtctcctcaccctagtgtctctcctcaccctagtctctcctcatcctagagtctctcctcaccctagagtctctcctcaccctagagtctctcctcaccctagagtctctcctcaccctagagtctctcctcaccctagagtctctcctcaccctagtgtctcctcaccctagagtctctcctcaccctagtgtctcctcaccctagagtctttcctcaccctagtgtcccctcaccctagagtctctcctcaccctagtgtctcctcaccctagtgtctcccctcaccctagtgtctccccacccccgagtctctcccccccccactctcctcatcctagagtctctcctcaccctagtgtctcctcaccctagtgtctcctcaccctagtgtctcctcatcctagtgtcccttcaccctagtgtctcctcaccccagtgtctcctcaccctactgtcccctcaccctagagtctctcctcaccctagtctctcctcaccctagtgtctcccctcaccctagtgtctcctcaccctagtgtctcccctcaccctgctgccttcccactcactcttggattcagtgtctagataaagaatcggaagggcaaagctttagctgcatgatctaaatttaaatttctctggccatagtggggaaatgttgcttactgactccatctctgcctctgaagacaaattaataaagtcatgattttttttacatttgtttgttgtttgttttatgcttacagaagggtaatgttgaaggagttaaaagtaagaaattatgataaccacataccacagcataggtttccagactgagcctccctgtgcttgtttataattgctggagcaggtgctccaagttactgactgtttctatgtctgtcctggcttcccaggatactctgaagtctgtactggccacctgtctcaagaactacaagttcagaccgttgctgactgctttttgatgtagcctggggagcatggcacaaggctatcaggcgactgtggtacatccagaattgagtcaaatgcccaccccaccacttgctcttacctttagattggccagagcctgctcagcctcccttgccttcctaagaaacagcagaacctgccatggttgaacatgcctcctgaagggcatcaccctgggaaacttcaagccttgcagggctcaggtccataattattgagactgaaataaagtttttgtgaaatgtcagcaagcctgagaatggtgtgttgtgatttctctctctggacatcttcagacaatcgaccctcctctttaccagtctctcctgtcattatggcaaaaagccctccccgcagaactctggctctggctcctgtctcccattattcttctcagacatccttgtcaccagcccctccctggtccatcccttgtgtgttgatgttcttctgattgcttttttttttccctctagccttacaaatgttaaacaagcacaccctcctgcatagtcatcaaaacgacctctgtttctgtcttctcatcctgtagcattataattctcttagtcactggtaatccttgcatagctcttcaccctcatcctcacatctaccacgtctataagcccagcagcttccctccaccctctctaaccttctttaatctatggatatgccttgctcaggctcttccattttctgattcctcttctctagtctccctgcctccagctcagccaccctcacactgctctgtccatgtcagtctgacagaaccgaatgatccctttaacccacttttcatccctttcactaccttaccctgtgctgccttctgcttttctgccctgggctccatcccctatgccttttccttgtgtactgcaccccccacacacaccttgaggtattgactgctttgatggaggcaatgttttcttcctgaagagagttcattcagcaggaacttagtgatgaaaaagcatccaatgtcatctaagaagagcttcaggtggaggttgagcctaaaagacccgattggactaggtgccagccttccaggtgatgactttggaagacaagtcccactgccctgtaagttctgacatggcattaatcttgtaatcttatctgattgctctggaggcaaagactgaagtatgaaaaaatgaacaaattaggttcaagtcaccttcaaggtatgactttgagcactttttacaacctgatacttcacttttaaaataggaatgataggtcttactcggttcgggattaaatgagatacaggtaaagcctccagcaccgtggctgtacatacagccatatggtagtaatagtaactaaagaatgcattggcttctggaagaaccgtgcctgagacaaatcgttctgaacaactctgtacatggcctggccagaaagctgcctccccaatacaaacttacatggcccctctgcctgctctgtaaatgattgtcccctcttaccactaggaatgtagccagggtaagatagggatacaggaatctttaggagacagtctggagatagtgcgtgtttgggaggcctgacctagagccctgccattcaaaggcaaaacccctgtactaacattgccattacctgggtctgggatgaaatgtggaccctgggctgcagtccatggttactgaatcaaactctgcatctcaccgattcccagatgatctgtgcacatgatgttactggcctaggataacagggatgtggactgaggactgagaccagggcaaaagcatcctctgaggtgtggttaactgtacagagggttagggactgcacatgttgtttttctttcatgatcccttccctatgggtgccttgggcatgaggttgtacccccttaaattattcactcagtgtcacaacatcagccagggaatgatggtgagccagaataagctacaatcctccttgaatctgaggagaccccgggacaaacaatctaagtggaagttgttttccttgagagatgcatagctaactaccaatatgtaactctggctgtcctggcactcgctctgtagaccaggacagccttgaactgcccctgcctcctgagtgctgggattaaaggggtgcaccaccatgcctggctcttatcccatctctaaattattgttggtgggaatatagagctcagtgtagagagcttacctagcatgtccaaggccctgagtttgattcccagaaccaccaaacacaggatagcagagacgggagggagagaggagagaaaagaatgaacagaaagaaatgaataagtcaataaatcatcttcatggcaaaaaccagggctcagtcttgtcaacccagcagaccgcacggcctatcccttgctgttgtttgcaaacattcttaagcagtcattgaaatgagggattaataataataataataataataataataatagagcatttggccaaagttaccctttagagctgtaagatgtctttatgagcaaaagacggaacctacctgccagatgtagtgagctttaaaagtcagacaggcgtagaggaaagcaagggctgggctaggaggcaccacaggagaacccattgatcccatgcttccactttactgtctattgcagacaagcagctccttattcttccagtgttgcaggggcggcagggagctgctctgggcaggcatcccatggattctgccagattattacttttagtccttggaagtcagaacaagattcatgaacagagcaggccagactcagttcttaaataactgaaccatatgaagcaagatgatacatgcttataatctcatacccatgaagctgaggcagcaggatcactaggagtgcaaggccaagtcttgcacaacaagacactgtcaaggaggaggaagaggaggagaaggaaaagaaagatagtcaacaacgacagcaaatcctgtttagggttggggatttagctcggtggtagaatgcttgctgggaccctggattcagtcttcagctctggcaaatgaatgaatgaatgaatgaatgaatgaatgaatgaatgatcccctttagtgagatttaggaccaagctccacgtgaggatcctcaagtgactctgcccagacacatgccagtgtctgctggcatttctcttgctttagcttcactaccaccagtctctgggcagtgtcttctgtgtgtcctcttgccttaccttgaagaaccagaacccacatcctggaatgagatggaaagatactctcatctccaaaccccaagtcccctccagctctcttggggcttagaatcatttcccttctatgaaaaatttcattcccccaaaagtctgtgttggttgaatctgaattttaaaaagaggagagattatttattcctttactgcccactctgacaccaccttctcctgcatgggtcgtgctggtgacatgcatttgtaagtgtacatactataacgtttaccattttaacccattgttgatttggtttttgttttttgtttttgtttttgttttttgtttgtttgtttttgagacagggtttctctgtattgttttggagcctatcctgccactcgctctggagacaggctggccttgaactcacagagatccacctgcctctgcctcccgagtgctggtattaaaggcgtgcgccaccaccgtccagctgttgatcttttttaagggactttgtgcctatacttgtttaattaaatgaggtaacctttccctatagaggttgaaatggggggggggataaacggaattcaaagaccttgtagatcagaagagagcataagctggtccagggcaaggagggagcctccttaatatgtggtcagggctaagccaaaccaggtttcccagaaggaactaagaactctaagcacccggccttacctcctggcctttattccctggcttcccccaaaccaaaactgctgaactcaagcatttgtctcatctcccaaacaaggactcttaagtcccaggttgcatgatccctcccccccagacataaatgtctgtacacccagctagagaaggcactgacacgacaaaatccaacttggtgaaccagggcctttattgggattccaggaacacaggtgagtcccaggctgctgcactgaggcatcccatttcattaaactcagctgtgcagactggtgattggaatcttgggaatggggttatagggaggcactgggaaggataagggcctgatgtgcaccataactcccttctccctccatgaggaattattactagactccaatctctcttgtgggtcttgtgaaggtcgtcacagatgctctgagatggtgatgctcatgtccaagctgcagggaacagcttcactccagtagggagaatgagtatctgagaatctggaaggtgtacagcctaactatgaaaaataggatgctagatctttaaaatacactggctggctgaagaggtggctcagcaggttaagtgcttgctacacaggcataagatcctgagtttgcatctccagcatccacatgaatgacaaccgggcctgtaatgccaccacttgggagtggaaacaagcaactcccagcaaaaagtggctacctaaactagctgaattggtgagctgtggtttcaaccaaagaaccttcctcaatgtataaggtggaaagtgatcacctgttgtcaacttctagtgtccacatgtatgtgcacacatgtgtaccacacctacatacatttgtgtgcccacacagaaacatccatgcatggaaagcatacacacaaaaataaacaaaagtaaatcccctggccccagactttgtttttctttcaagggtctaccctagctgaaaactaatatgtaaaaaacctaagcatggtaatgcatggctgtaattcaagtacttggtaggggaaggcatgaccatcagaagttcaaggccattctcagcagcacagtgagtttgaggccagcatgggctgcaggaaccctgtcttaaaaaatgaggaaagaaagaagggagcttgaaaagtggctcagtggttaagagcactggttgttcttccagaggactaaggtctggttcccagacccacacagctgctcacaaccatctgttattctagttccagggcattggttgccctcttccagcctccctaggcaccaggcatatatgtggtacacagacactcatccatactcataatttttttaatttagaagaagcaaaaagggagaatgaggcagatgagatgactcagtgggtaaaggtgcgtgtggcatgagccctatgacctgagtttaatcctcagagcccacataaaggtgaaaagagaaacaattccacagagttgtcttctggcccccatgtgtgtgcactcacacattatacacatatgtaggaactgccacacaagcttaaataacttcctggtcagtctgcttagctctcctggccacaatctgaaagcaaaggagacactttgtgaggagatgctttgtgaggttggcctcgtggctctgctatttccatggttcccatagctggcttgctgagacaagcaaggacccaataagcatggttctacaaccagctactgagcagtactggtgatccacttaggcctccccaaacttgagtgtgacaaagctgtcccacttgttccccaatggcagcctcaagtcaggaagattttatctggtgggtgatctcaggggaaattctattccttgaaagagggtttcccagaggaaagcaggaaaatgagagctggagctctctgaagatgatggataggcttggtggcctggaattccctgacacacagtgtgaaataaaatattaaaatccaaccatattctcactcatgatgaggagcactgtaaattggaagaatcctttggggaaatggtttgtaatatatgtatcaagaatcttaaaaacattcatgcttttgattttgtaattttactttatttatgaaatggttccaaatggattgtagtgtgacatcatttgcaatagtgaaaaattgcaaacatcctgaatgtcaacctaaaaaattacaaagttattgtacctctccctggggatatttatgcagctattaaactgatagcagcaaaggcaattttagagtatggagcactaattatgttgtggtactaatttgtgtgtattgtatatatatgtgtacatgtagatctggatgcatgcatgactgagcatgtggatgctagaggttgatgtcaggtttcctctgtcactctggacacactggacctggagcccccagaaccccactatcttcccttctcagagctcagttgtaagcatgtgctgccatgggttgcttttcatgtgggtattggggatccaactttaggttcttatacttacacagcaagtgggcgcttcacctgtggggccatctccagcccccagatactaattgttaaaaatacagaataagccaggtatggcagcacatgccagtaatcctagcatgttgttgatagacatgggtagatcgtggatttgaggccagtctgggatacagagtaaggttcaggctagtctaagctacatagcaagagcctgtctcaataaaccaataaccaaaataaaataacagacagaataggcctggcacgagcagtggtggctcacgcctttaatcccagcactcaggaggcagaggcaggcagatctcttggggtcagcagcactctcctcattttggttctccaaatgacagatatcataaatactaaggcctgggcctacaagatggctgagctggtaaaggtactcgctaccaagctggatggcctgaggttaattcccaggacccataaggtagaagagaactgactcctgcaagcccatcctctgacctgagcggagtgtgtgtgtgtgtgtgtgtgtgtgtgtgtgtgtgtgtgtgtgtgtgtgtgtaacagggcagggagagaaaagagagagagagattttaaagataccaaggttttctagtgcttgtgtctggtagtggactgggtagttgaaagagacagtgtgcatagtggcacatgcctgtagtctcactacttggaaggctgaggtagaatgatcattgtgtatttgaagccaggctgctgggatacacagcaataccaagccagttagacctacttatctagaacctgtctcaaaaaacaaacaaacaaaaaacaaaaagctgagcttggtggtgcatgcctttaaatcccacaaactctgtgagtttgagcccagcctggtctacatagcaagttccaggacagccagggccacacagagaaaccctacccccacccaaaaaaaaggaaaaagaaagaaaacaaaacaaaagcccacctcttacttacatgaccaacctgagttcctagacctcagatctgacatgagactctgtgagagcagatgagcatgcatacatgcaggtgtgtgtttgaatgcacatgtgtctttaccctctccccccagcactctgcacaagtgcagtatgcacttttttctgcatgcccaccagcgtgtagcccagcacctgacagtggacaatgtgttgatgtcgtttgaattgagtgctttataagaggaaaaacacaggaggctggacacttgtactagtaagagaagcctccctgagtcagggactctctgccctcacagcagacttaggctttataagcatccagcctttctgttcccctgatctttgtaagagccccaaacattggagaccgtcctcctttccctgatttcccctccagctcttcttcagagaccttacctcacaaaaagtctgtctttccctgtaaatgggacctcccaaagaccttcctgtgtcccatccagttgcttagctctgaggggagatagggaacaaaaacaagagataaggcttctagaaatgggcactctgtaaagctaatgtggtgttttgttttgttttgttttgtttttctagctttccctcctaaacatctcttaatattgctggtactacccactgccaagagttgtctgggtggacaggtgcagacctgaacaagaggactaaagccacaggtagctgttgagctactctctgaacaaattgtgacaaagacagagctggctctctcccatcaatacacctatctgtcagagagagtggcctgagccaaggcctcccctgattttctatttcttctcagcattatctctgctgaccccggtgtcctgatattttgtctctcttcctttctgatttcacccagggatacgtgactctattccaaaggcagccatttagcattcccaactcagagcctccttctccagctccctctaaagctggaggaaaattcgttatgtgctttgtgaagagaggtcagatgctgttgctgtgtgcatcttcacccttcattgtaagtccagtttggttcccttcttcctgagaattgctgcttagagatgaaagcagaggttccattcccctggggggaaactaaagttaagtatttcctctacctgaaccaaccacactcagttcacaaaacatgcacagcgtgttcagcacctcggagagcacctttcatccccgaggcgggattactgctgaaaggtgaagnnnnnnnnnncccctgggaccacctgccacttccttcccttggtgctcacctctttcttttccttgcaaggcctttggaatgaactccctccattctccactgaccccaaattatctgcatctccccacagcagcacccctggcctttctgtaaagagcttccctggctttctattctagactcctcactatgccccattacaatctctttttagatacccaactcttcccttttactataggacagtggctgtgtgtcccccagccctaaagaaatcctacaaatttgaagttgtcatcctttcttgtttcttcctcctcccgtgaagctccttgaaatatcttctacccactgcctcaacttcccagtgttctgcttgctccaaaacccttgtaacctgatctctaatcctgtccttcaactaataccacgcccagggctgtctaggacatcctttttttctaaatttcatctttcccaggtggactgagcttctcttcgggacacttggaacttcacagcttcccacttgttttcctacctcatcccactgctccaactcagtctctttccacatgttccctgaaagttgtctgctccttgaggctccatcttgtattctttttgttgttgttgttttttcgagataggatttctctgtgtagctttggagcctatcctggcactcgctctggagaccaggctggcctcgaacttacagcgatccgcctgcctctgcctcccgagtgctgggattaaagcactggcccatcttggattcttatcttctgcattctgtctatttctctaggaagatttatcctcccctaaacttcagtcatgaccagcctacaccttctccctggttcccgaactccaaatcctactgactagtgatgtcatctgtttccccccaaaacacccccaaacaacatatctccaaatgaactaacctggttttccctggacgtgccctccctctcctgcatttctgagttaatagcatttttctacataaacacttcctcatacactttggtcttcagagtatacttgtcttctgcttctgtctttcctttgtacacattgtctttacccccaatcccattccctcaacacatctcccacatagctgtagtaaagggttctttatctcaaatatgttcatgttactcctgtgcttaagttttaagtgtttcccccattatcttctaagggaaaaaaaaaaacaaaatcaagagccaccttccactatgatgtgagcaccccatctttacttctgccttctaggcttcagttataacaaacctggctgttcctagaaagtactttgccagctgcagccttctgaacttttgcaaatgttcctaaatgttcttcccaggaactgccaagctgttattttgaggtcactcccatttctccctttgtcctgttccttcttcctgtatgaggcaaggtctcaatatgtagccccgattggcctggaattcactgtgtagataagactggcctggaactcatagacacctgcctccctgggctggtgttaaaagtatgtgccaccacactcaactcattttaccttgattgatagctataggacactccttgaaaatgggcatattttctatttatctctatgatacctggactagtgttgtaatgaataaggaaaatgtaacatggtggaagaagacagaatgcttcctagtcagaccctagtcagatccacagggttggggatagagtccttcccacagatagctccacatataagccacatctcagcctgtgtggtgccagagatgcagctgtagactactggacactcccagggcacactgagcttatacatataacatctttatagttaatacaggtgcaatggtcagcatttactatagtaagtggcaaaccctcacacgtgcctttgatacacacattaatatccatttctatttatacttgaataaaccaaatcacaccactagtaaatggctgagctgggatctgagctcagggacactgcctttagagtcttggtatgtgtgtgtgtgtgtgtgagagagagagagagagagagagagagagagagagagaggagagagagagagagagagagagactcagagactcagagagagtagacacatgctatatatatatatatatacatacatgaatacatgtggaggacagaggacaacttttgggagatggttctctccttccactgtggtttccaagaattgaactcaggttgtctgaatttcttggctagcacttttgcctgctaaaccatctcactagccccatagcttataccttttgccaccacagtatccttttcagtctgtgtggcaaggggtgggactgactgggttgtcttcctttcaaatgtggatacaaatgtggaagtttgcagcaggctgatgtgtggccccacagaagaagcagcctcccagaggaccatctcttttccaagtctcactcagtctttccttagcattttcctttcaagcaaggccattggtcagctcctcttaggacccatgtgtcctttatgtgtttgttcatttattgtggggaaagaagatggcactggatcccttggagctagagttacaggtggttatgaactgcctgacatggatactgacagctgaacataggtcctctgcatcactgagccatctccctagcccaagcttcctttttgtttgtttttttttggggggaggggtagtgaaagtgtttgatctttttgtttttattttttcgtttttgttttgtttttgatacacggtttctgtgtagccctggctatcctggaacttgttctgtaggccaggctggccttgaactcagagatcttcctgcctctgtctcccgattaaaggagtgtgctactagctcagttttccttattttaaaaaacaaataattgtgccaggcagtggtggtgcacgcctttattcccagcactcaggaggcagaggcaggtggatctctgtgagttcaaggccagcctggtctacaagagctagttccaggacaacctccaaagcaatacagagaaaccctgtcttgaaaaaccaaagaccaaaacaaaagaaaaaacacaaagtattgatagagggtaggagatggctcatgggcaaaatgtttgctgtgcaagcacatgtacctgagttcagattcccagcactcatgtgagctgagcatgaatgacagtatgtactcataacaccggtgctggggaaacaggcagctctctggggccaggtggccagctaagctagcctaattgcagggctcaagatttggtgagaaagcaatagaaacatggatgaacatggctccttcagcctctctacatacacaagcataagacagtgcaccctcacacacacatgcacagataggtacccaggatctcaccagcgtgttttctgtactttctataaagcatcttaaaagactaggctggagtaaatcagtgagttttcacattttattttattatatttatttgtgaggggtggggaggtgctgcagtgcacatatggaggtcagagaacaacttgctggagttggttgttttcttccaccatgtgggtcccagggattgtcagccttggtggcaagcaccttcacctactgagccaatctcccagggctgtagttagtggtctttttcttaagcaacaaaacgcttttgctaacctgaattttacagaaaggttaatatagaagtgaactaacaatggctttctttgattgaagggaacccaagaccctgtagctaccattcctacacatacgccccacttacatttcagccccacccaaagcatggggtttggggaatacaagttaatgaaaattgctggtccacactgacgctaaggatgcttttggctcttttgcttcctctggctgttttgatgtggtgctggtcattagcctatagcccgggctattaatcttctctgcagcctttggaggatttgtttgaatggttgtagagacatggattgttgttagagatgtatttcaaggtctgtctctgctgagtgtttattaataatcttgttaatccctgctctagttcccagatctagctaacgcctgtcggaagtcctcggggggcattttaaattctctctgattcttggagccagacgcttccttctgcccgagtcctctctgctacttctgctcatgaatattttacatttaatctccacacaatggtcatggtgcactgcctgcctttctcagagaagacactcagaaagtctacagtgtttgatggcactgtgccaaagacctttgtagttgccgcttgaatggccttctaccgtggacggtgaccaaggagctgcggaatgggggcgtttggcatggagcctctcagcccaagctttgatctatggtttcactcaggatcaaacactagcaggaactgccagtgggtcttgagagctgttaatggggccactggccagagttgctcaacggctccccagccctcatcctaggttttctccctctgagttttctacctgacatgttaccactgacacctatctgcccaggggcactatgcctcagccccggttgcctggggtttgtgttctctaaaatcaaccttagggaaaagacagtgagactaagcactcatgtgacaggtagagtagagagggttaggagcaggaacatgatttaaaggccacagtttaaaagtcatcaggataaaatgtcaatccaggctgcaggaggcatcgtttcagaagggtgtggccctgcggaggagactgagagatgcagatagacacagaaatgatcagaggcaaaagatggatcctgaggaagccaagtgcatgtgcagtgtgttttacctgacaaataaacattacagaatgtaatggatgaagcagtgtgactgatgagcctagaaacggactagatcctccctggtatggcgccaccagcatgtttacagggttttccatctgaaaatccttccctttggatgtcttggggggtgagctcaccctgtggcccaagagtaatgtcagagtccagccgtcaagtctctgtctaccctgtgggtagtaagtgagaggccactggggcctcagcatggataagggccatgcaggccagcttctccaaggtacagtttgaaagcagtgtcccagggaactctgtaaagtggggaggatgagattgggaagctttgccacttgggaagttatctgagatgtgggtgcttctgagatgcaggcagggctacctcccacctgtctccctctcacattgcccatggctaaggggtggggactgagacagagggaggtccaggctcttccctcagaaatttgaaatcactgtggcaactcggcccacccaggaacagacaggtcaagattttccttccaaacatctagcctctttcctggcactgtaataagtcagtgttcatgtccactgctttgtttctattttactttcatgtgtatatgatgttttgtgtccatgcattcatgtgtaagagagcaggtgtgctcatgtgaaggtcagaggataactgagaatagtatcagtcttggcattctactgccttttatttttctctgctacaaataccaggctagctagaccgtgagcttctcaagagtctcctgtttctgcctctatctcacactggaggaacaatgggcttacagatactcaatggttccagttttacctgagctctggggatctgaacccaggtcctcatacttgcacagcaaacactttagccactgagtcacttctctagacctcacctcattttaaatgggtcaccaggagccccacagatccctggacctgatactgcgactagtcctggggcattctttctatctgcctgtctgtctgctttctgtgtgttcaaggacagaacaagcagaatggattgcctgcagtcctcacaccttaggttggccactctaataccctggctaaagatggcagcacccatattgcattggtcatcctgataacttaattcaggaactcacaaccagccaaagtgcagagaatacatgtcagtggaatgcccaggcacaaatggagccttttatcactaccccacaatgctcagaggccactgaggaagaggggacaggaagattgtaagagctaaaggccagggaggaccagaccataacagtgtcttctgaactcatgaactcacagcaactgtgattacctgcacaagactacagaggtcaagtcagtcagtgttctagtgggagtggagaggggctcttgatcctgcaccccaaactggggaactatgggctatttatgacttcttagaagggaagaaagagtcaattttcttttaagactatggctgttggtgggttaactatgccccagtggacagtcccacacccacaagtataagatcggcacaagtctgaacagtacttgatttgtactaatatctgagactggaaaggtaggttgtttggttttttgtttgtttgttttgctttaatttcacttcagagctgatgttaatgggtccttacccaaggagtcagaaactaaagaatagggtgactgtctcttatacactaaaggcttatgttcaatttgaatatttctcatacacttagttgtatgagtttctttctgtgaactgaacacaaaactcaggaattggtggattcatatgtaagtcctttaaacaatgtataattgaccttgagttttgccagactatgtgacttgactttgaacattctgatctgagggttatctctcttcataaatggattcacaatgaaaaaaaaaaaagatcggcacaaattgaactcggggttatttaaaaaaaaatgtgtaacacaaagttgaggaaggggtgaggtaagggtggatctgggaggagtagggatgaatatgatcaaaatacattatatgaaattctcaaataataaaaacttctttagattcattttattttgcatgtatgggtgttttacctgaatgtatgtatgtgtaccacatgtgtgcctggtgccacagagatcagaaggtgtgacatcagatccctgaatcagaagattgtgaacctccatgtgggttctgggaatccaatccaggtcctctgcaagaataagtgctcttaaccactgagccaagtctacaggtccaagactaaaaacgttttaaaataacagttggtcatcataagagaagctcatctttagttccctctaaaattgtaaatctgacaagtatgaaaaaaatattgataacatctttgtgcgttccagaaaaagaattataacaaaactcacattgcctataatagagaattgattgtaaaagcagtaacatctcaaatatatgcaagtactgcttaacctgaataaaatctttaatcttccctacaaaaacagaagttgatcatcaacttttctgaatacagacggcatgagacagggtgggccagagccctgggtctcatttggggagggaagccctgtggagaggcgtcaaggctggctaaggactttgggcagcacagggtcttgcctagagttggaggctagtgagagctaatgcaaggaagattgcaagggctgcacatctgaaatgggtgactgcctaccttgtcatcagcagcatgtgttctgctttcaggacaagcacaaaactacatggtcacctgcaggtttgttttcttacccaacacctaagtgcagagaatacgtgtcagtggaatgcccaggcacaaatagagctttttaccactaccccacaacgctcaggggccactgaggaagaggggacaggaagattgtaagagctaaaggccagggaggaccagaccaaagcatccagcctcccagggtgcactccttagggctcttctgggaacttcagaagttcttattcagaatcctcccctcccatcctttgtgcttttagtcagtgactgaagtcttgacgtcttgcctggattggccaggtggttgtctggaccctgcaaagaggaaacagaggaagaaggactctcttgggagtacctgctctggccttaatccacccttaagctcacagggatgtagacagacccttttcctaaaaaatatgtagaaaagccagagagccagacagctcatgcattaacttgtagaggaagtcctgtgggtttagggatgtgggatttctggaacagcctggattacacgagacgcttgttggatgtgggtaagacatacatcttggcttttccattgaggtcacagtaaatgagtctgcctctctctccctgaatcctggcctgccactgaagtaaatgctcccagaaactcagagggcagatgagaagggttgcttcagggttcagggcaacccctgggatcactattaagttccctgtctctctgctttctctcccacaggacccagccgccgcctctatctcagacggagactgtgnnnnnnnnnnnnnnnnnnnnnnnnnnnnnnnnnncaagtgaagctgggtgagtgtgtctggaggatgagggggatgtgggaagtgaacaagatactctcgggccgggtttacagcaaggcgctacaattaaagtagctcaggctagatgattccaagactaaagctccaagtaagtcattggtactcccaggcgccttatgtcgtgcaagacaaagaagacagtgatggtctctgagtgagagacctctgaggctagagaccctaagtattcaaggggtggctgtaaggtatgtaaagcatagaaccccaggacaggattcagaagggccagccaggaggaacctgcctccaaaagatatggctgctgccatgtttgagggacaggtctcaggacctggatggggagattgtccctttcttagtgaaccccagaacacctctctttccggatatctcatcatctttctctcagggtgggttccatgtccactctgatgtccatttcctgctttgaaatcacctggctcccacaactgcccagagctccccattctctgccaaacactgcccctcgcacttcatggaccaaaatctcactnnnnnnnnnnnnnnnnnnnnnnnnnnnnnnnnnnnnnnnnnnnnnnnnnnnnnnnnnnnnnnnnnnnnnnnnnnnnnnnnnnnnnnnnnnnnnnnnnnnnnnnnnnnnnnttctctttaactaacttcccctccacagctatcaggattccgttccacagtgtctgttcttttagtctattcaaaataaataaataaataaataaataaataaataataaataaataaataaataaaacagaccttgcttctttgcttctagaccatatcaaagaatcccttctggctaatttctaaacaaagcagcagttctctattttctgtcttcctaggacattttcttcagagcacagccagttttgtttattattgtttaatgcaacgataaaagtatttttaaatgcatataaattctttactctttccagaggcaaccactgcaagttcttgtagcttcattttgtactttagcacaaatggcattgcattgtacacatgttccctcccactacataatgtctcagaacctctatagagaatgagttcattcttttaaatggttgcatagtagtccttagtctgagccttgccaacttattgtctgcattttttatgatttcaaacaaacttagcacacttttaaaatagcattttttatttccttcacattgcattaccaccaaagctcatgaaaattcacagcttgtctcacttctgataaaagaaaatcaccaagaactgtaagtcaaattgcaccccctagaggctggatgtggtaatggcagttactgcctgctgaagagaagctggaaaaatcccctgtagccaaagaggcaaaaaaaaagtggtcagggagtaagacgaaagagcttcagaggcgtgggaatcagaggacatttcaagtgagtcacaggtgctgtaatggccccttccatccttatgctcttgcttttttgtttgttgtttgtttgtttggaagggtttctctgtgtagctctgactgttctagaacttactctacagaccaggctgggctcaaactcagagaaccatctgcctctgtctccagagtgctggtattaaaggtgtgctccaccactgcctggctcatgccttccttcttaatgtcctcctccctccaggcttccctggctgcttcatccttctgtgctcatctttcctctctagcctgtccttggcttcaggcacatactgactgcctggcacaggaactgtggttcccagaggcaggactcggctcttttcctcccctacactctgccccttaagttatgcaggttcaagagcatgtccctcagcatcaggtgcctggaggaccatgggctgtgtgccagggagaaaaggaaatgcacaaaaagggcccagagcaggtcgccctcccccccccagcccccgaagcagggcctggggcaggacacagcgtctttcccatgttcccctgcagagaagcagcgggagctggcccggaagggttccctgaagaacggcagcatgggcagccctgtcaaccagcaacccaagaagaacaatgtgatggcccggacgaggtgggcatcctccctgccccactgagaccccaccagccaacacctaccttctctggtctccagcctctccctcctcaggggactgcagggagggggaggaaatgagggagcaggaccctgtcaagccccctgccatgtttgtatgctccagctggtactccatctccccaattctttacccaggctggtcgtccccaataaaggctactcctcgcttgccatgggccctgatgagaagccactggtagctcttgacacagacaggtgtgtatggggcctgggggaagctggacaaacccatatttctatgtgagcacagatggggttgtacaggacacatctgccatattgccagaagtggggtatacttcaaccagagctctccatgggtgaaatttcccaaggggatagattgttttttaaaggaatgggcatggagaggacatagtgagaagaaccctatcccaggggagcatctggctagccagagaccttaagggaatccaaacagccaggatgatttgaatctagggagagaaaagtaaaaacaaaaacatgaggacgaggcagaaagaaagagactatagcagttctatctagaaggaagccgcttttatttgaaggttggaccgggaaacctgtctttgcaaacatatatttgcataataagcacggattatttaaatcatactgttggagaacagtgggtatggcaaagatgcagagaattttctatttaattttcctgaatcacttcctttctctcttatttccacggccagtgatgatgacttcgacatgtccagatactcttcctctggctactcctctgcggaggtgaggctccacccccttgcctccacagactaaggggagctagaccacttctccaggctgcaaggctggggctcttcaaggggaggtggggcggagcctttggggcggggcttcgcatgaggcggggtctgggctgggagagcctgggaagaaatcactactctgacagccccgggttattaaagcgggactctaaaacagaacatgtgtggaatgcaggcaacacctaacaggagtggacctgaaatcggggcaaatcctgaactgaagcaagagtagagaagttgacactgaactgggcaggggcctgtagaggcccggccttaggaagacttgcctggaggaagtgagacccaagccaggccggagtttaaaataaacctaggatgagtaggggctgtcactgtggcctcagggtggcagtggcggccccagcccagggagatgcccttccagctgactcgaaccttttctacagcagatcaaccaagatttgaacatccagctgctgaaggacggctaccggttagacgagatccccnnnnnnnnnnnnnnnnnnnnnnnnnnnnnnnnnnnnnnnnnnnnnnnnnnnnnnnnnnnnnnnnnnnnnnnnnnnnnnnnnnnnnnnnnnnnnnnnnnnnnnnnnnnnnnnnnnnnnnnnnnnnnnnnnnnnnnnnnnnnnnnnnnnnnnnnnnnnnnnnnnnnnnnnnnnntgttcagttacttgggggagaccacacccaagcaccctgccacctctccccagagctgcagtcagggggcagcactgaaggccaggaggccaactgtaagcagaaagaggaagggatcacaaggccaggggtttggccccatgccagtgaagccatgaattccccagccctagcctggaaaggaaggaaagggggttggggaagaaaaggccccaagcaatggggacaattctcaacacctcagagcccctcaccccaacccccgtgccagcccatattcctatttgtgtttccccctcatctccagatgggaagctaggcaaagccgtccaaagggatactatcatccctcattagatcactgccttctccctccctccactcaagttcccctgcttccttacattctgaggacggggagtgtaaggtgagccttagaggccaggtttggggattgtatgatctgttctcaacagcctctaaccagtgcatctgtccctgtgccccaccccctcaccccagtcttctggttattgcttccaggctggtagcaagagatagggctggcctccagtgcccggttcccggttcaccctaacccaaggtccaggaggctggcttccagaaaggctcttcaagagcaagcttgagagaatgcagtgcaccaagtggctgtatgtatgtggtagggtgtgtgtctgtgtgtgtttaacctgtctgtccaggtcaacctgatgggtatgtgtggtggggaaatgactgtggtcgatttgctgtatgaaaggctgcttaagaaatgcagtggactgagggcctagcctggcagtcagaagcctgggttctagtgtcagctctggtattctccctgggctcttaagcagttcccaggcttctccaggtcttcagttctctcgactggaaaattcagaatagctgacattactaacagtcttttcagatctgaagaaatttcttcacaggaatttctgaagagagctttgagagcaactaggaggcctgaggtgtgtgcttgtgtagacataagaagcaaatacagatttgtttgggaaagaggtgtgtgtgtgtgtgtgtgtgtgtgtgtgtgtgtgtgtgtgatttacaactttgtcatttttgcttttgctgatctgggggaggaaagctgaggctgcaactcaatgaggaagagatggtagctctcccttggctggcagtatagccctgccttcattggaaaacaactgaaaacacagacagcctcctcgcactgctaggtctgtgccccaccagtctcctgccatctggccaaagtgtagcttctctgggcctcctgctgaccctccacaccttctggtgttttcactgtcatggctgctcccacccactctctgggtgccagtcctgggaggtaggagctagagtgggtgtggtgagaggaagaaatgaggctgttgactctccctacaccacccaggggctggctgcccactccaaagtgtcggagtgtagctctccactccccacagcttacctcccctagtgcagagatcctaattagatgagaaaatgccaaaggaggcaaggcagagaaagtgtctgcaggggccacaaggcccnnnnnnnnnnnnnnnnnnnnnnnnnnnnnnnnnnnnnnnnnnnnnnnnnnnnnnnnnnnnnnnnnnnnnnnnnnnnnnnnnnnnnnnnnnnnnnnnnnnnnnnnnnnnnnnnnnnnnnnnnnnnnnnnnnnnnnnnnnnnnnnnnnnnnnnnnnnnnnnnnnnnnnnnnnnnnnnnnnnnnnnnnnnnnnnnnnnnnnnnnnnnnnnnnnnnnnnnnnnnnnnnnnnnnnnnnnnnnnnnnnnnnnnnnnnnnnnnnnnnnnnnnnnnnnnnnnnnnnnnnnnnnnnnnnnnnnnnnnnnnnnnnnnnnnnnnnnnnnnnnnnnnnnnnnnnnnnnnnnnnnnnnnnnggtttctccgagctcactaatttatttccaagaaggtgtgtggaagacatgagccgtgtataatattttttttaacatttccatcgcagtattgaccatcatccttggttgtgtatcgtgtaacacaaataatgatattaaaagcatcaaacaagccagactcagctccttacctggggtgtgggctgaggaagggagaaaactgaccccaagatgcgcatgtcctctacctctgcttgttgctgatgtgtggccctaaagaatcacaacccctcctaacctctgcctctcttcagcagtgagacgtctgtcctacatgtctctaggagcctaggaagtggatattttgaagggtccaaggcaggaaggggctggcatagggaggaaatcaggcctcttatacagggatggggccaaggcgagtgatatcataatgggcactgcccatcctggaaaggaagctgggtggagtagaagcaggaagcctcgggggagagatactgagagatcccccaaaggaggggttacaggtgggaggtgtgggatatttaggggaaggggtggtcactgatgtccaccaggagtccttgacaggcagagcccactacagcatccctgagactccatcatgttcctcttctcccggaagaccaagacccctatcagcacctacagtgactcctacagggctcctacctccatcaaggaggtctataaggacccacctctatgggcctgggaagccaacaagtttgtgaccccagtaagtacagattgtgggtagggtggatatacaattgtgtgtctagatgactggcatgtggctgtccctgtgtagttattttcagtttttttaatttcatttatgaatttgttttttgtttttgttttttgtttttttgagacagggtgtctctgtgtagctttgagcttatcctggcactctctctggagaccaggctggccttgaactcacagagatccacctgcctctgcctcccgagtgctgggattaaaggcatgcagcaccaacgcctggctcatttatgaatttgttttgtttacttatttattgagacaaggcctcactcactatgtagcctaggctggccctaaacttgtgacagtcctcctacatcagcctcccaagttggctgggattgcaggcatgccccatgcctagccatttggtgattgctttgcatttacggcagattctaataactcaggcaagccttaaacttgtaatgtagcctaggctggccttacattcctcatcctcctgcctcggcctctcacattctgggattatagcatgtacatcaccatatctgcctttattttttttgtcattgttcattttgtgtagtgctggaaatcaaatccaaggtgttaagaatgctaagcaagtattctatgccttgaattttaagtattatttgtttgcatcatattgaatgcatcacattcaagactgggattcaaactcaggccctcatgcctacacaacagatgctattactcactgagccattgctccagattcttaaggtttgctataaggtctcagtagcttacttactcaggctacccctgaacttgctctgtgtgcctcaaccctccaacagttgggattacaggcctgctcccagcttccttttctgtattttattcattttcctaggtacatccagcagtgtataaaatagtatagggttctgtcctcgtagaactacatggggggggtactaataagaaaaaacccacaattttcttaagttgtctaaaatgctgttccgcaaataaacatcataatggcaatgagggaagcccactcctacatgtcacagaaggcctttctctcaaggtgaccttgacctgtagctggaaagatagggaaaaatgggtgaagaattaaaagaagagctgaaagtgcaaatgctctggggctacctgcaaaatgggtcagaaatgtccaagaggcaatatcattatgcatgggcattacattcccttctgtgtacaccgggagatagaagaggagcaatggatgtggggaattatagtttgtggtaacaaaaagaatttatgaataggatttttaaagtattttgtctaaatatgctctgtagaaaaggaggagggagaacttggaggatggcaaactgggccaaactgggctgcatatggatacctgtttaaagccctacatctcacataaagttaatgggttttttaattctattttgaacaatcaaaagacaggattgcctgataacaaatgctaataccagcctatgagagatgcttatcttaaactagctgaaagtagaggaactactgtgagttccagactgaaattcaaggttcaatgtctctgactacacacacacacacacacacacacacacacctctgtatgcacacacactcacacctccatacacacacacaacacacacacacactttcaggcatacatgaatgcacacaccagcaaacatacatacctgcacgcacacacaacaaacacctgcacatacacacctgcataacacacaacacacacctacatgcacacacacacacacacacacacacacacacacacacacacacatctacatacacactcaacacacacgctcatgcacaacactgtataacttctatgagagaaaatatcctcactgcaggtcttcaggtatccaaagtgctgccaaatcaacataagttcacaataagatataagacaataaatcagggctggtggtgttgcttggtggtaaatcacttgcctagtctgatgcacccccaaccctgctaaaaagaaaaagaaaaccaggtggtagcacatgcctttgatcccagcactcgggaggcagaggcaggcggatctctgtgagtttgaggccagcctggtctacagagtgagttccaggacaagctccaaaacaatacagagaaaccctgtctcagaaaaagaaaaagaaggaaatatgatatgaaaccttatctgcataatgaacttgtatttgcattctgtatacaaaaaataataatagttgcctaccaaatggttctggggtggtgactcctgactgactgacctggtctcttggacccacatggtggaaggagaggacagactcctgtaagttgttctcctgcttcacacacacacacacacacacacacacacacacacacacaccccacaaaatgaaacacaacaaaaatatttttggcccagtgtgatggtacacaagcatgataatgtacacctttaatcccagcattcgggaggtaggtgaatctctgtgagttagaggctagcctgagctacacatcaagttcgaaggcaggactacacagagactctttctcaaaaaaaaattaagtggggctggagagatggctcagtgattgctgggcaaacatgaggacgtaaattcaattcccagcacccagtgtgaagagccaggtgcagtcctcacacctgtaatcccatggctggagaagtagagacaggaggacccctggggttttctgtctagtcactgaaactagatttctgggttcagtgagagaccctgtctcaaaaataaggcagaaaatgatggacattgccttggtcttcacataaatgaccatacatttgcagttgcacacacacacatgataaagaatttttcaaacagatatgaattacatatattcactacaaagttataaaaagtcataaatagatgaataaacaaaatagcatagttcaagaatagactcatacatatatggaaacaatattcagcaaaaatggttgacaataaagctatggaaaaagattcatcaggcttgggtggcatggcaaatccataggggaagaatagactgcttagtaataaaattagttattcatatggatagaaataaaattaatatataacaccacacccaaaatgaaagtcctggaagattaaatatggaaagtaataccacatagctttcagaagaaaatacaggacattatttccattatctgagagtatggatagatgtcttcagtcataaaaagcattaaccatccaacagattaataattcagctggtttaaattaagaacttctgttcatcaaagacatcataaagaaaattaaagaaaaaaaagccacgaactgagagatttgcaacatgtaactgattagcattcagaatacataaagaagtataatcctttgggttaaaattgaacacacgtgggttctgacccctgcctgaaaccacagtaaatggatacttgagatccagattcacaaggatgatgagaaagcaccaatggcaaggaaagcctggcaaactgaaatatgacagagggcagtaactgacctagcacacctgaggaggcagacgaacagccagtcgtgggatgcccaacgacggcattcagctcaaggacacagaattcaaaaaggctcagggacgaacagttctggttccctggagctgaaggtgggataggaccaaggctaaaatcagggttatttgaaagtcacttaaacagtcaaacctactaattgtttctattcattgcctcggggtgactgcctggctctggctctggaaaagtcacaaggcttttcttttttttcttttttggcaaggatcttgaaagcagatgagcatccatagagtgactactaaaacccccagcagcccttacccacactggcatctgggccattaccctaggccaaagattaaaggaacctttccaaagaagcagatccccattaaagtgtgagcatactggtgttgtggtcctcaagcaacagcccagtgatgctaatggctagcaaaatcgctcaaggcctcagatagttttttagttttctatttatgaacatgagcaaagaccacagacatcttaggaaagcctctaacagaaaaatggttgatgcctgtgagttcttccaaataggatctctctctctctctctccctccctctctctctctctctctcctctctctctctctctctctctctctctctctgtgtgtgtctgtgtgtctgtgtctgtgtctgtatgtgtgtgtctgagtgtttagtatgtggtatgtgtatatatgaatgtactttgtgtaggtttcagtgtagctagactacgtgtatataaagctcagggaagcgctgaattatggacccttgcacataaagctgcttccacccacatgggaatgtcactgtgccagatacctcaggacatcagttgggcacacgttttcccagaaggtcctgaactaaggacttttctgggagcaaccaggcaacacacacacacacacacacacacacacacacacacacacactcacagcctttgcccttgaaatcaaagggtcaagtatgagtgatctcagctagcttttcagactggctgtccttacagataccttatttgggattctggcctcagctgaagaccatggaccccaaaaaaacgaggtcttcatttgggttttcataaatctatccaaacaaggagtgacgggctgaggtgaggtgaacttcaataagtagatctcagtgtccagaacaagaacaggaaaaaaaccggtgtggtggtgcatgcctttaatcccagcacttgggaggcaggggcaggtagatctctgtgagttcgaggccagcctggtctacagagtgagctcaaaaacagcagggatacacagagaaagctttctatcttgaagaaaaaaatttcaaaaaatacaggaaaaaaatatcaagggcagataatgaccagaaagaacaaagtgagtctcaaggtcaaggctgaaaacactgctgtcagagaaagagccacggcagagtccaggtgttgttacatggtaaagcaggcatctcaccaaacccatccttcagtttcaaggtgccagatgccctccctgccccagaaatctacatagagcagtcaggtcccaggaagtcagccttccctctagattgtgtccactggccctgttagaggagactccagccctgtccccagtgagggctgcagtgcagaagagacaacagccacacatgtctcttaccttcctgagttctctgtcagccaggaatgggcagaaacaaagtcagaaaactaccccaactagggccaagggtctggttctgtgtatcagttttagatgagaaaacaagcaagcaagacaaaggggcaagaagatgattcaaaagcaggttgggaagctggagaaacagctctgcagttaagagcacaggctactcttgcagaggaaacacattctgttcccagcacccatacggtgactcacaaatgtcacctctagttctcagggttctggtgccctcttttggtctcttcactgtattgtgtggtgcatgtctatacatgtaggcaaaacactcatacacaggcaattaaaattaaaacaaaaatatgtctatgcagaagggccatgagacacgagatccatccctcttggactgggagcagctggaaatccagccaggctgaacttttcaagaaagactagatctagctccagcgaggtccctgggcttgggatctctctataccacttttcctctcttcctctggccagggtctgactcagactatgcaccgccatgtggatccggaggcccttcagaagatggtcaaatgtgctgcacaggactacacctacaaaaattctatagcaggtcacccttacttgcctgagaaatactggctctctcaagatgaaggtaggctctcaaccacttcctgtttttgaccttaaaagtggcccatcaatgaccctcaagttaagcccaatttggatcctgatctctaccctgattgtcaggactttggctacttccctaattggctaattccctagtgtacagggaccccctgtacactccgatacctacttattccagcccttggccctggagaagactcaaacccatattttgggggagtttgcaattttaaaatagagctagaatctaaccaggcatggtggcacatacctacagtctcagttatgcaggaggttgagtcaggaagagatcacttgagcttggcagtttgaggccaacctgaacagcatagctagatactgttggaaagaaaaaaatcactgggtaggtctgaggtctcacccacagcaaggtggagagagggttgactttctacaggccccacccacctcttcctttcccttagccaccctttcccatcagctctctctgctttctatcttccttccagcccttttacagcctggggtatagatatgggtctatactcatatcatttaggaaaaatcaactttctcctttggctacatgtttatgatctgtctccctatccatttaagaaggagggaatgtcttattcatagctgtaccttctccatcatggggcttcattggtacttttcttcctaagtatttgttgaatgaattgataattcccagttagtgctgggagcctggaacgctgaaatttcatgtgtgtgtgagatttttcacaccaactggaactctcggtgtttagcctctgagacaagtcctgcatctcactcttctggccactctccttgaaataacctccttcctcgacttcctagtctctagtacactcagtatggaaatgggggcttccccagggtgctagccagagcctccatctcttctcctaagatttatttgatgggttatttgatgtaacccatgcatgactttaatgactttttaaatgatttatttttattttctggcattgtgtttttgctggaatgtatgtctgtgtgaggacgttggatcccctggaactggagttagacatgtgggtgctgggaattgaacctgggtcctctggaagggcaggcagtgctgttaacccttgagccatctccccatccccatggctttagttgctgttatcataaatctttcaggccttgacctctcactagcattccattctcttgcactttgacctggatgttcaaacctcaaactcagcatgccaaatcccccagcttagaacagcaaacataacactcctctcctcaggcagctatttttcttgggcttcttttatgggtttataggatttgggttattttcattttgttttgtttttcgacagtgtctcactatgtacccctggctagtacagaattggatatgtagaccaggctatctggaacccatagagatccgcctgcctctgtctcctgagtgctaggtttaaagctgtgccaccatgtccaggctttaaaaatatttttattatatgtatcaattttgtatgtgtgtatatgagggggcaagcccatgttccagcccatatgtggaggtccaaggacaactttatggaattagttctctccttctaccatgtgagtctcggggattgaactcagattgccaggcttggtaacaattgcctttactcattggatctttctgtagcccaggctagcctaaaatacacaatgtcaatcaggctggcctccagtccttggtgagcctctaacccaagccccacaaatgctgagattgcaggaatgcaccatcaggccagagttcccattcatcctgtccctcaacctgtctctgtccttcagattttgggggagcgtaccatagagggccttgtaggatatagttaaaagggttttggactagaatagtatcttgtttaaatttcacttgtgggaaagtatcatagcttctatgttgatgttgggttgtaggatttcaaagatggagcaaggagaccagcgggataatcatcatagctttctatttccaagcattctttttcttcttttcctcttctccttgtcccccactcctcttctttagacatggtctcatgtagcccagaacttggctacaatttgtagccaaggagaactttaagctcttgatcctcctgcctccacctcctcaggactgggattatctagactttttgtttttgtttgtttgtttgtttttttcgagacagagtttctctgtgtagctttggagcctatcctggcactcactctggagaccaggctggcctccaactctgggattaaaggcgtgcgcccggccttgtttctggtgtttttaatcaggatatcaccatatagtccaggctggccttgaactcaaagcaattctcctgcctctgcctactagaattacaggaatgggccactatgttcagcattttttccaaaacttttgtatagattaactcatctagacttcacaacaaatcctacacttttgccccctgcagtgctgtaatttgaagccaggcactgtatgcaccgcagggtatattctgctaaccatgacattatttttgtctcctggtgaaggccatacaaggataaaggaatgagaacatagagaaagagggaagaaagtcaattttaaggttgaataggcagacctgggggcctagatatgctagagagaggggagggcctggcgtgatactttccaggctagttgactcaaagagggcggggcccggatgaagctgatagcctgatggatccaaaccttgctccaaagcatcccttaagtgagacatctgcagctcagtggcaaaaagaactagggttgtggacagggcatgatggtgttccaggcctgtgatccagcaccagggaaggtgaggtaggaggatagacagactggggctagcctgggctacacagacttccaggctacatagtaagatcctgtctccaaagtgaataaatggtacaggatctgcaagtctggacttgggagttggggtcagtgagggtcagctttgtgacagagatcagagaagaaacatctagaaggtcccaggctctggatggactgagaagtaatcctttctgacatctccactactatgatgaagaggacaaatgctgtacaagctacttagataatgaccgttacaacacatggaggacaggaccttacaacagcttctggaacaagtataacacctgtcttcctcgactgcctaaggtacctactgtgccagccacagttgcctgaggtctaggacatgaaaacacacacacacacacacacacacacacacacacacacaccgtcttaacattgcagtgacttccccatctgtaaaattaggggtttctattttttttttttttagctgacaatggaggccaggagttggcctgcaatagacccctgggtttcagtctctgccccggcttggtggtgacttgttagtgtgcactccttgaccgttttgaagcctgccaagtagtactgcctcagttgatctggctactatgactcccttgcgtcaataatgagcttggtcctccctgacccaccttcccctcctttgtgacgggaacaagggcgaggagacagttcaaaagcaaggtgaatacagcaacaactccaaacaaccccgagactaggggagctgatgaggggagactctgaagcctgaagaccgtttgggtattcagggaagacaacccctacccccaccccccaaaaagagtaaaatgcttccaggatgccgggatggaaacaggaatgcgaggaatgacgttggaggaccctcgtaaaccggagcgcctcaacgcctacggtaaatggcgggtagagagttgaagagtattgctgggtgtcaaggaggaagccagagggcagaatggggatctagagaagctagagagggtgtagttgtgtgtgtgtccctgtttttgtctctgcctcgggctctgatcctgcttttcccatccctctggctctgtctttgggtatcctggactctgggctcagagcgcgaggtagtggtgaacatgctgaactcgttgtcccggaaccggactctgccccagattgctccccgctgcggnnnnnnnnnnnnnnnnnnnnnnnnnnnnnnnnnnnncccggccgccactactgtctgcgcgggatggactactgcgcctctgggatgcctcctagcacagaacgccgcctgcagcctttgtgttcggtgcagccgactgtaaggttcgcagggatccgcccgccttggccgggctccacccactaacgagccccgccccctagagtccctcccaagtctcctgcaggctggcatctagcctcattctagctctgttgtttccacgccaggcccccatcggcttctgcctgtttacagggcctcagggcacaagcgaacagctaagacagagaaccagcaagaaggttactcccaagtcctcagtcctgtcccttccaacagtgctcaaggtcaacctgacaagtgtttgtattctggagatcctgcaaaacagtttcagaggattccaaacccctcacatcagccgcaaccttttctcacattcacaggccctggtctgtattggacccttgggtctggagacagaggttctagcctgggcctaagagaaccctcagcagtgggcaggaccatcgttggggcaaaggaagtggttactgctttcccacagggttcgtggattccttgagagcctagagagaaactcagcatccagactgcatccagccacagcagacaatactggtgggaggggggtgctttcatgtctgtgagtgttgagagctgtgcagagggggtcctgaaccgtatccctaatcctatgatgatctagccctcctcaagcctgattccttgtctaagatcaggtcttttccttcagaaggggtgtgtgttttgggaaagtgtgtgagcctctagaaggcctagaaatgctaactacttccccgagttgaagaaatcgctgtctcacagaagcgggggtgggggtggggggtcgggtatgctggatcctcaaaggctgcatctgatcctgcagattctggcagcaaaaaccaggcattggtggggaggggacttcctggagccttctcagaggccctgaagtagtggatttatgaagggcaaagaaggaaccacagaagtgatactgtacccaggttcttggtctggaatattgagatatgaggttatcaaaacaaaacaaaacaaaacaaaacaaaaaaccgacctcagccgggcgttggtgacgcatgcctttaatcccagcactcaggaggcaaaggcaggcggatctctgagttcgaggccagcctggtctccagagcgagtgccaggataggctccaaagctacacagagaaaccctgtctcgaaaaacaataaaacaaaacaaaacaaaacaaaaacaaaaaacaaaacaaaaaaccgacctctccttgctgtttcttccttcactaggaatgtctcgacctgcggtcaccggcccggaatgcattgtattgttacaactcccccgccgtcatactacccatttcccaaccttaagtaagtttggcgcattcacttgcacgctggagacagtgccttttggaggtggggatggtgggaaatgcctgttgaagtgctcaggcaggaaattaacgccagggggcgctaatgctattgggaagtcaatggttgagatacaccagaagacctcaatgagagctttgagttggcagcggacttagagtcaagggaattgggttcaaggttttatatatagggtaagaagtcaaggctgggaaattatgtattgggtatcgtaaatttaccagtagaacttgaggtcagtgtgtggtcagtgtcagaggtaaaatgttgacatagggttaatattgagaattggagtcagggttatctctccttacagatgggacacaagtcacttcaagaaaactggtggtccccagagaaacaactatgttgtacatcctgagtttgtgtctgagacctatcccgtctaccattcctggtaaagatttggccaggccaaggaagagggtggagcaataaactcttcaccacaaagactgtttcctgtgtccttacctagaaagatctggatgtgaactctctccagtcatctcaggacactcctaagtgccctcctgatatagcagtaatccagctggggtccttcccatcactgcagggcttgagtccagctagccattcagatctgtcaacttgaagactctctagccaacgttccctccaatatatccatgcacatagactcctctccatctcatcccaggtctccattacacctcccaaatgttctctgctcagaaaactttgccacccttcccccccccaagtctaagagctacagaacataattttggaaagactcacgatcaagaaacagattggtttctctatcctacaagggagcagagggtggggagctttgaaatcttctcttgctccaatgcttgctttaggggaaagggtatcatagcacagcacacccatctctgcactctgaagtacaggcctttttgttatttattttggtttttcgagacagtaactattctgaaactctatagaccagactggccttgaatccacctgcctttgcctcccaagtgctgagaataaagacatgtgcctggcccagcataggcatttataactaaaagttgtcactaagggaaggggctacacattaaaggtcagagggtgggcagtgcaaaacactgagcagaaacagagacactgctggtgctccttctaaggagctcttgactggggtattagtggacagtgggagcacaggtcctcccagaattgtgatacccgtttttacacttattatgtgttgtgtggagatgagtggttggcttgtgggagtcagctctctccttccaccctattggttcttcagcaggcttggtggcaaatgcctttacctgcttaccatcgctccagtcccgttttagttctttaaagtattcagctgcccaaatctaaagggaatggattctcaaagacttcttagtcagtgtttattgctgtgcagacacaccatgaccacagcagctctgataaaagaaagcatttaattggggcttgcttacagtttcagaggttagtccattgtcatcactgtggggagcatggcaacaggcaggcatggtgctggagaagtagctgtgagctacatcctgatctacaatcagagagactttgggtctggaatgggcttttgaaacctcagagcccacccccactgacacacttcatccgacaaggccatgcctcctaatccttataaacccttcatagagtaccatgctcaggtacctaagcactcaaacagacgagtctatggagccattcttattcaaaccaccacagctacctctgccccttcactttgcggtgctctcatacacataacaaacctagtctggagttgcaagaactccaacattcagcaactccttcatccttcagaactacatctcccataaggcctggggatcagccaggctagcgatggcctgctcataacaggggcggcgcctgaggcaggaggtgaaaccaaggggcaccaatctagaggcgggcccaaagggcagagcttgggcggagaggagaaagtccggacaaggcactcgcagcttcaagaggctgtgggggaggggccgcaggccaggggtggggccggagtcccaggcctgaagccacattggacggctgggcgtggccgagtagcccaagggcggggcgtaggaggggctcggccgtgcctagccaggcagcaaccagcaggggctgtggctgcttaacttctgttagcgtggaaagagaatctgccgggagatcccttctccccttcttccgtgtggtggtcactgcggtgagtgagcccagtaagaggcccttgaggccgaggggtgttgagctgcctaagagcacagtttctgaattttctcgttggtagagcaaccctggacacctgcgcccctcctttaggccagagggtcccagccggcgacgggttccttgactttcctctgcccctttgggccgcgtcgggtgtggcgccaagggtgggtgtcaagtattccaggctgagttagctcagtcacttgatctttgtggatcctgtccctgagcaggggagggagatgggcaggatcgaattgcctttgacatttccactccccttccaactatgtccgacaatggactctgccttaagtggttcagtttggctgatctgggccctcgcccttaaactgtaggctaagggctggcagccaaaactgagcttgagtgtgaagtcagcgggaagaggcttcttgggctgagcctataggaaggcccgctcagccgatcccacctgctagctttagcctgtgtttggccagatggtaggcgcgacaaattaccgggtcttgaatgccacttaaaagtggagccacagagttcctccccgacagctgcaataccagatgccattaaattgcccctttcgcacccctaaaatcttcctgatctgtctgcggcgagcagaagctgcaacagcccttgaaaagacaggcctcaacggtccacgcccatctctctttatggaaggtggaggcaaaattttgaatcccaaaatttcgccatccgggtgactgctgacaagccctgttttcccatctgtaaaagggacacaatagctcacagtgttgttggtgttggatgctgcaggttcctttggaaggacacagtgaggccccaacaaagtgggtgcttaagtctgtgggctcctgcccttcatcaaagaacataataattctaaaaattggttcttgaaacccaagtggtgaaaaaacttttgagaccatcaaagtgagcttttcaggcctccaggggccataaggccaacttaatatgtaagttttgaggctgagggggtctttctcatttagaaccagaccctctccttttaaccctttagtgcccagaatgtagccttggctgttgaataaatgacagacatgtacaatagtcaggcttggggccccacagacttctttgtgttccccttagctttgtgagggtatcagcaaaagacactgctacctacaggaaactagggcaactctaaatgtgtaggtggaaataagaggttattccagactagggttgggcagtgcctggggagattaaagttgtctggagggataaaaatggtaatcccagcagaggcagaggcaagcagatctctgaggccagcctggtctacaaagggtgttccagaacagccagggaaaccgtctcaaacaaacaaagataaaataatggtgctaagtattatcttctagaaccaaaattctgacctgcacctgacttgctatttttaagattcatttatgtttattttaatgtatgggtatttgcctgaatgtctgtgcaccacatatgtgcctggtgcctgcagaagccagaaaagggcattggatctcctgggactggggttacagacacttgtgagcagccgtgtgggtgttaggattcgaaccctaggtcctctggaagttaagtgcttttaactgctgagtcatctctccagcctctgcacctggcattcttgacagattctgcatgtaagagctggacaagtagaagagcctgagtagtttttcaccttggaagtcactggagacagacagatactggcacctgggaggcaactaattaaccatctgccagtctctctccttcctcccccccccccagctggggagttaagcaactactggctggcagtgtgtctgcctgtgtttgcttgtgacaggtgctgttcctttgttggactctgcccctgagggttgagacaggaggagttaggggcctttatcagaaggttgaaacaaaccttccaccaagcctaagttttcctgcagacatatttcaatgtttagcataccttgtgtgaatatttatgtgtgtggtggtgggcatctgttccctggtgagctgaagagaggttatcaggctagatgactgaaacctaccaaagaggtgacttgagggtttagggtagggaatgagcttggtagtcttgagataggcctggctggaatcagaaaaggagctgagctcagatgtggtgatatatgcttgcattgccagctatccaggttagggcaggatgatcacaaagtcagggccacttttctgggctgcatagaaatgtatctagaaccataacatgtctggagctctgattgcaatgcttacagcgtctctcctgggagacaagaaagatgagcagagaaatggatttacttgatggttagtggcttagagccagggagagtttgtgagcaaaggggcagagcagacaagcaagattcttcagcaagctcccgccccagccctaatgttggaccccagttctgccttcctccaaatcagtctctgtgactgaatgtggctttcagtgccttaatttccaaatagccgtctacttggattcaaaattaaattccatgactgaggtgtcctttttctcttgtccttgactctctagaggcagggaggccagcctacagactgccctgttaaaggtctcaaggaattggctggaccattcgtgcattcttaccatggccagagcttcttcaatcctcctccttcaggggctgtatgcttatgctgcgggcctggacagtgccttgcttctccgggtttgttttccactgggaaagggcagaagcatgctctctcattcacatgattctctccattcacagagttctcaccagtttggcaagcggtggggcctgagagaaaggagggtaagacatcaaccgattgtcctggacaagagccctgcctttgccatttgctaagctcttgggcccctcttctaggctgcagaaatggaaataccgtggaagagaaagctcagtgtcctttctctcccctttgcaggctcccgcaggccatattcagatgggtttggtgtggtgcttccttccttagctggggactaatgccccagaaccttcgggagaagagccaggtctaccagcgacaccgatctggtagcaacgcgggccccaaaagcctcaaagccatcccagcaggaaccatgtacactttcctgcctgacaatttttcacctgccaaacccaaggcctccaaagagctgagnnnnnnnnnnnnnnnnnnnnnnnnnnnnnnnnnnnnnnnnnnnnnnnnnnnnnnnnnnnnnnnnnnnnnnnnnnnnnnnnnnnnnnnnnnnnnnnnnnnnnnnnnnnnnnnnnnnnnnnnnnnnnnnnnnnnnnnnnnnnnnnnnnnnnnnnnnnnnnnnnnnnnnnnnnnnnnnnnnnnnnnnnnnnnnnnnnnnnnnnnnnnnnnnnnnnnnnnnnnnnnnnnnnnnnnnnnnnnnnnnnnnnnnnnnnnnnnnnnnnnnnnnnnnnnnnnnnnnnnnnnnnnnnnnnnnnnnnnnnnnnnnnnnnnnnnnnnnnnnnnnnnnnnnnnnnnnnnnnnnnnnnnnnnnnnnnnnnnnnnnnnnnnnnnnnnnnnnnnnnnnnnnnnnnnnnnnnnnnnnnnnnnnnnnnnnnnnnnnnnnnnnnnnnnnnnnnnnnnnnnnnnnnnnnnnnnnnnnnnnnnnnnnnnnnnnnnnnnnnnnnnnnnnnnnnnnnnnnnnnnnnnnnnnnnnnnnnnnnnnnnnnnnnnnnnnnnnnnnnnnnnnnnnnnnnnnnnnnnnnnnnnnnnnnnnnnnnnnnnnnnnnnnnnnnnnnnnnnnnnnnnnnnnnnnnnnnnnnnnnnnnnnnnnnnnnnnnnnnnnnnnnnnnnnnnnnnnnnnnnnnnnnnnnnnnnnnnnnnnnnnnnnnnnnnnnnnnnnnnnnnnnnnnnnnnnnnnnnnnnnnnnnnnnnnnnnnnnnnnnnnnnnnnnnnnnnnnnnnnnnnnnnnnnnnnnnnnnnnnnnnnnnnnnnnnnnnnnnnnnnnnnnnnnnnnnnnnnnnnnnnnnnnnnnnnnnnnnnnnnnnnnnnnnnnnnnnnnnnnnnnnnnnnnnnnnnnnnnnnnnnnnnnnnnnnnnnnnnnnnnnnnnnnnnnnnnnnnnnnnnnnnnnnnnnnnnnnnnnnnnnnnnnnnnnnnnnnnnnnnnnnnnnnnnnnnnnnnnnnnnnnnnnnnnnnnnnnnnnnnnnnnnnnnnnnnnnnnnnnnnnnnnnnnnnnnnnnnnnnnnnnnnnnnnnnnnnnnnnnnnnnnnnnnnnnnnnnnnnnnnnnnnnnnnnnnnnnnnnnnnnnnnnnnnnnnnnnnnnnnnnnnnnnnnnnnnnnnnnnnnnnnnnnnnnnnnnnnnnnnnnnnnnnnnnnnnnnnnnnnnnnnctagccgaggtccgcgttgggtaccagtcacagaacatctcctgcttcttccgcctggtggaccgcgactcggtatggggctacgacctgggcctgcgctctcttatccctgctgtgctcacggtcagtatgctgggctatccgttcatcctgcccgatatggtggggggcaacgcggggggggagcgcacagccggccgccaagatgggccggggccggagcgcgagctctacgtgcgctggcttgaggttgcggccttcatgcctgccatgcagttttcaatcccgccctggcagtacgacgcagaagtgatagccatcgcacacaagttcgctgctctgcgcgcctcgctagtggcgccactgctgcttgagctcgctggtgaggtcaccgacactggcgaccccatcgtgcgccccctgtggtggatcgctccaggggatgaaacggctcaccgcatcgactcgcagttccttatcggggatacgctgttggtggcgccggtgctggagcctggtaagcaagagcgcgatgtctatttgcccgccggcaagtggcgcagctacaagggtgagctttttgacaagacaccggtgctgctcacggattaccccgtggacctggatgaggtcgcctatttcacctgggcgtcctgacccactttcaagacccaggaatcccacagtcctgactccagccttcatgcagatttttaatcctttaccacacccgaagggtgcaccctcaggaagttcccacctctaggaaatgggcactgacaaaatgggcactgactgaaaagtgctccggccaacagcagtaggtgagacctggaaggggaagtacggaaacaacctcctgccccagtgcacactcctgacagcgcctcacccccaccctggacatagagaacagaaacctcttccctgggttggatggcccgggaactcaggaaaagtctgttctttctattacaagggtctggttttaaaaagcacacagaaacatctctcctcccactggcctttgtagccctttgtcctctaaggtgaggaaccgatgctcttcaaaaagttcccaaatagttttctaccatattatttagaaagtgtacctttagatgggcagtggtggcgcacgcctttaatcccagcacttagaaggcagaggcaggcggatctctgagttcaaggccagcctggcctacagannnnnnnnnnnnnnnnnnnnnnnnnnnnnnnnnnnnnnnnnnnnnnnnnnnnnnnnnnnnnnnnnnnnnnnnnnnnnnnnnnnnnnnnnnnnnnnnnnnnnnnnnnnnnnnnnnnnnnnnnnnnnnnnnnnnnnnnnnnnnnnnnnnnnnnnnnnnnnnnnnnnnnnnnnnnnnnnnnnnnnnnnnnnnnnnnnnnnnnnnnnnnnnnnnnnnnnnnnnnnnnnnnnnnnnnnnnnnnnnnnnnnnnnnnnnnnnnnnnnnnnnnnnnnnnnnnnnnnnnnnnnnnnnnnnnnnnnnnnnnnnnnnnnnnnnnnnnnnnnnnnnnggactcattccggactcaaccttggacccagccctgggccagaagtgcctagtgggcagatttgcagggccatgcaggccagacttgatgccttaattcaagaacctgtgtctgtgtgtatatgtgtgcacacgtacttagagagagagagagagagagagagagagagagagagagagagagaggagagagagagagaaatatatagagagagatgcccaccatagtctctgaatctacagaatgaacagaatatccctgaaactgaataagcctagaggaaggaggatacaggggcaaactcaagactttgattgttgaaccagccccttcccagatgctttccctaggacgatggcagcaccggtttgagtttagcacactagagctcggctgaggaggtgactcaatggatgaaggcacttccttcatggcaagcctgacaacctgagttcaattccaaggtcatattgtaaaaggagagcactgtaggaaatcaacagccctttaagattacttagctgtctcactcggcacacatgctcaagtgtggcttaaaagggaaccatgttctcatcccggcagtgatgtgtttggcacatgagtggcatcaaacactgatacctgccaacacatgtttcggggaaggtctttcatctcagtaattctcctgttctgagatcaactccagccagggtttttcctgactatgtggctatgtctggaggagtggcttgcaagagaaggtggacaatgagggagagagcagcttcttnnnnnnnnnncagcttcttccctcagtggctctggcaacaaagcctgtgcccgaatccttcactttctctgagtgaaaagccctgagcttcagggttcccacagatgcctgtctccagtgccaagtcttttgtttctttttgttggcaatgttgaagatagaacccagggccccaagcatactaagcaagcacttctccagtgagctatatccccagtcttcctttgtcaatcagctgggtgaccttgaataagctgattaaccccactgagcctgagtttttttttttttttatgtaaaagtgatgatgacacctacctccaaggtaattgtaatagtaagcacagatatatggaaagtgcctggcacaaagtaggtgctcaataaaagatagctgttgtagtatttgttgttttcttgcttgaaaacaaggattctatgggattttttaaaagacttacttattttatgcatatgagtgctttgcctgtgtgtacatgcatgcctggttcttgtggagatcagaaaagggcaacggatcctctggaactaacattatggatagctgtgtgccatcatgtgggtgctgggaatagaacccaggttctctgtaagagcaacaaatgctcttaactgctgaactgtctttccagacccttctggccttgtcctccatccctgacagtacctcttgtgcagtccaaagttgtctttcctgcacattggatctggcgagcttaacgttgctccaaaaggcctccagcagccttatattcactggtctctccctgcacctaggctgttgtgtatgtgttggtggggtgacatacagcagtctggaacccctttctagaaataatgggaggacctgaatggccattgagataatggccacctgaatgggcttccagatgagttaggaatgggttacgctttagccaagcaggtcttctaagaattttggccaccatccacccatttctgagtgaggtgtctctgattcttgcaagcattctactggtcctcctctacaagcacccaagacccttctccttccctgaatccagggtgagagggagtggcctctctatctgctggccactgttgaacaaagacttaaagggtaatttgctaaaagcattgactcttcccttggccctccaggtgcgcaatgagttaacgaaaaggcagaacaaaagcttggtatgctgcctctattttgcacctgtttcttttgcaccaagtcattctcttacagcctggtggtttccaggaacagaccccctagataaatatctgtgacaaggaacaaaactacccctacctggaggcaactgaacaaggcctgccagaccaatcctgagataatgatcaaccaggccacagttgggccacagttgatgaactgtgcatgcttcttggtctggattttgtcccttttctacataatctggaagctattatgagaacctctaatgccagggctgacgacatcaccccctttgtcttcctagtcagtcatactaattaaaattcctttcctgatttccactatttctctgttttggagtcagatttgtcaggattcctagaatctgacctagcaacattctcaacttcagaccttatcagccacattccattgatagaccttcaaatcctacctacacaatatatccatagccataccaccctgaacatgtctgatcttgtccaacccacacaacagtcaaggagaggtatccaaagttcagtcatgtcccttgtaggatgggggtccaagttatggttggtgctcgagtcttctaagatctgatccttctcatacctgtttcacccatgtactcaggtacataaagtatatttgggaaagcgtttgaagaaacactgccttctatcctgggaacaactgtacagcttatcccttgccaggagaggtctgctcagacttagctttgaaagaaaatgcagtggccactgggtggtttcctttccttccattgtttggctccaagagtttctgctgacaacccccacagggtacaccccagctcctagacacagcctgtttttttttgttgttgttgttttttgtttttttatcttgaagctaatcatttacttcagtaagacctaggatctttccagcagcttgataagaggggaagctattcagctttgggtggtaaaccctaaggggcattggaggcgatgtgggaatgactcaaaagaaagccctgttcctgggtgtgcccagtctagaggatgtggaaatttatgcccttgtgctctgaatctttgcactgtttttccttctcaggtgcctttcccactccagcttacacaacaccaagtggaatgagggttttggagtagtctaagttctggctgcacctacatcaccacctcaagggggcagcaggaaaaagctggcaccaccctccagccctcaaattggtaaagaattaggtcaggccaaaggctaagatgattggggagttcagcctggacgacaggatggctttgccatgcatggttcccacccctgcacagaaatttctattgtatgtcatttcttaaggtcttcaattcagcaaacaagggccttctgttgagacataagccattgttttctttttctttttttttaaagattttatttattgtatatacaacattctgcttccatgtatatctgcacaccagaagaggccaccagatctcattatggatggttatgagccaccatgtggttgctgggaattgaactcaggacctctggaagagcagccactgctcttaacctctgagccatctctccagccccataagccattgttttcatgatcaagaggccattatattttctagagtctgtgccctaggaaaggaaacttatgcttgcctttcttgtagggttaagtccatcagttgctgcttcaccctaggtggaggaggtgggagtgaggaacaaggggattccagaaagagcacctctgggtcctggaaggaaatagaacaggtggctatcagggaaagcttccaggagaagcagatctagattttggaaggcaccaaattgaagaaaacattgaagcttctgtcctttgataggtgaagccatatctacaatcaaggaggtaagatacccttctccactgccaaggtatttacccagtcacctagcaggtatccaccctgaaggcccagagaaaaggcatgtcattccatgtgcattcttctttgtgcctgagatatgaaaagagataatggtcactttctaaacctcacagtctttatggaccaggtcctagctggtccaggggatttagtctgttccacttaggacattcacttcctcttccctttccagggcccatgattagcttttccatcctaccatgtttttttttttttttttttttttttttttttggttttgttggttggttggttggttggcttttcaagacagggtttctctgtgtagctttggctgtccaaaatgctcactctgtagaccaggctggccttgaactcacagagatccgcctgcctctgcctcccaagtgctggggttacaggcatgtgccaccaatacccggccagtcttaatattttaaaggcttaaaatatttttaaaggaataagcaaaagaaatgtaaggctatacattggaaactatctctacatgctgttaaaagacattaaagataacatggagagaagtgaagacacggccataaattgtatgaaaatggcagtactccactagcctacagattcagtataatacctactaaaatcccagctaaattctttgtggaaatcaacaagccaaaataaaattcatagtgagccaggtgtaatgtcacacacctttaatccagtcccagtgcttgagagacagaggcaagtggatctctgtgaggtcaaggccaacctagtgagttccaggctagctagagctacaaaatgataccctatatcaaaagcaaataaccaagtgaataaatagataaaatccacagggaaatctaaggggcccagaatagccaaggcaaccttgaaaaagaacgaagttgaagactcacacttttcaatctcatactattgcaaacctataacaataaagataatgtgtgtggtaccagcattaagatagacatatattgtcgggtgtagtggcccagtacttgggaggcagaagtaggtagatctctgatctaaatagtgggttctagaacagccagagctacataatttagttctagacagctacatcctgtctagaaaaaaacaaaacagatagacatataatctagggatggtgagtatgtgctgtgcaagcctgacaacctgagttcaatccctagaacccacataaaggtggagggaaagaactgtcctccacgtgtgcactgtggtacatgtgcaatccttcatccccaccctggatcccacacacacacacacacacacacacacacacacacacacacacacacacacaaaaaatgaggtcctagggtttagatgattcggtgactaagagcaccaactactcttccagaagacctggctgggttcagttcccagtagccacatgacggctcacaaccatttgtcactccagttctgggatctggcatcctcttctgctctctaaaggtactaagtgctcacctggtgctcaggtgcacacacaggcaaaacccaataaatacagctttaaaaataaggaaaaaatatagttcaatgggatgagtttaatggaatggtttgaaaatccagaaataaacacatttatggtcagtgtgtgtctgtgtgtgtgtgtgtgtgtgtgtgtgtgtgtgtgtctcgtggggggggtgggtactgggtctccttatgctgagcaaacattcaaccactgaactacacttccagttcaggaatcatcatcatcatctttttttttcttttttctttttttcttttttcaaagaatagtttgggtggaggagagcagtctggagtgataactcagcagggaagagtgcttgctgctcttccagaaggggctgggttcccagcagccatgccatatggctcatagctgcttgtcattccagctccaaggactctgatgtcttcttctagcctctgctaacacctgcatacacgtggcatgcactcacacaaacaaacatgtaaataaaaacaatgaaataaatctgtttgttttgagacacggtctcacagcgtggccctaattcactttgtaggccaggctggcctcaaatagatatctgcctgcctctgccctgccagcactgggattattaaagatatatgccaccatgccctgcagatccatttattttcttcttcttcttcttcttcttcttcttcttcttcttcttcttcttcttcttcttcttcttcttcttttcttcttcttcttcttttcttcttcttcttcttcttcttcttcttcttcttcttcttcttcttctttcttctttttcttcttcttcttcttcttcttcttcttcttcttcttcttcttcttcttctagagaatagtttagtgtcatgaaagggaagagtgggctgaacaataactagaacatacattgcccaggaatctttttctatttttaaatagagtctctctattaaatagctctggctgtcctagaacttgctctgtagactaagctggccccaccacccgtctagcaggtccagttattcagggtctgaagaggcactgcctgaaaagaatcatgggcgggagaaaagaaggagaccatgcaagcataagtttttgtcacgttttcactttattgaaagaggagtaaagctcatataggagtgtggcaaggagggagggagtgagcatgtagcggccgctgatggtggggctcccgggatgggcatgcggagacatggaggaggaggtgaggagggagttagtacatctggtgcaagcggctagctaaagaatgtctgttgcctgaaaacctcctatgtttcttgtcctcagagctgcttatctcttcccggaacagaacagccagtggtggcagttgccaggtggcaagtccttcaaggacctgtaattttccattgctctggatggccccttaacttatggctcccaacagccccaaactcacagagatccacctgcctctgcctcccaagtgctaggattaaaggtgtgtgccattaccgtccagcagaaatcattttataaacaattggtgccaagacagcagaatactcacaaagtatgattggtgttggatcctctacttaactatcacataaaaaattaattcaaaatgcattacaggcccaaataaaactttaaactcctagaagagcgggtcccagtggtgaaagtctgtaatcctagctacttagcaggaggcaataggatcacacatgaaagcctgcctgggttacagtatgcatgggcaatttagtgagaggttcttccaatacaaaataaaaggagagctggagatgtaactcagtggcagagcatttgccagcacacctgaggtcctggtttgaatccctagtactgaaaagaaagtagatatgtaaagctccattatcttaggtcacacactaaacatatatgaaatctccattactttaggtcacacacttatgagacactgcaaatatagtcaacaaaagaaaaaagttcaccaatttaacttcattaaatttaaaaactttcatgcttcaaaatacatcaccaagaaagtaaaaggaaggctggcaagatggcttagttggtaaagacacttgccaccaagcctgatgaccagataattactgataaatacatggaaagatattaaaaatggtatctcaccaggacagcaaggataaaatcattaataccacttaatcctcactagagtgcccataataatatttttaaatcagatataactatggtgatttgaatgtaaatggccctaaaaggctcacagggagtggcattatttgaaaggactaggacatgtggtctgttagagtaggtatggccttgttggagaaaatgtgtcactgggggcggtgggctttgagatttcaaaatctcaagccaggcctagttggcacactgtctcttcctgctgtctgctgatccggatgtagagctctcagctatgtctccagcaccatgtctgcctgcatgctgccatgcttcctaccgtgatgataatgaatgaaaactctgaactgtaagccagccccagttaaatgttttcctttgtaagagttgttgtggtagggctggagagatggctcagtagttaagaacactagctggtcttccagaggtcctgagttcaattcccagcaacgacatattggctcacaaccatccgaaatgagatcctgtgtcctcttctggtgggatacctgcagacagaacactgtatacataataaataaattaaataaataaataaataaagagttgctgtggtcgtggtcatgtttctcttcacagcaacagaacattgactaaaacagaaaagatgttgaagaggctgtgtaggatcccagtcctcacctcaaacatcactggtggatctgtaagaaaaacagccaatttaaagccagtctacaagtacctcaaagactaaatatagctagcacctgatatacaattctacatttagttatatccaaggaaataaatttttattcacagaatttgtagcattttaaataatagctaaaaaaaaagagaacaactcaaattgggtcaactaaatatggtattttggaactatggaatatgaagtactagtgcatgctacaaagtgaatacccctgaaaatactagtaacaaaagactacatattgtataagttcactacatggcatgtccagaataggcaaatctataagggactaaaagtagattagtgcttgcttatgatttgggagaaatagcatgattgcagatggttatggggttttgtttttggttttttgaaggttgattaaaattctctaaaattgtgccaggcagtggtggagtatacctttaatcctagcactctggaggcagaggcagacagatctttgagctggaggccagcctggtctacaaagtgagttctagaacagacagggctacacagagaaaccctgtctcaaaaacaaaaacaaaaaacaaaaaaaaccctaaaattataattcccacaactcaattaatatattaaaactcattcaagtgtacactttaaaatgggcatttcatatggtatatgaattatattttaacaaagctataatcataaaagtggaatgaagtaatgacacattatgacatgaataaaccttgaaaacatgctcagtgaagaaaagtaagacacaaaaagtcacaaattgtatgatgcaacttatatgcttacttactgttttttattgttggagatgggggctcaagtagcccaggctttggactttctagctgctgaggatgacctaacccttgtcccttcttcctgcacctttcaagcgctaggcttacagctgtgcaccaccatgcttgggtgcagggttccagttacatgaatgctgagaaagggaaactccacacacaggaagtagggcaagtgtcagccaagaagacacgagaatgcttactaagaagtatgacagtttcttttttttttttgagtgttaagagtcttctaaaattaggtagtggtggagataattacgctgccttgtgattaagaaaaactaaaaaaagtatatttttcaaaattatgtagttcccagggtgttggcacatacttttaatcccagcacttggcaggtagaggtaggtgtaactctgtgagctcaaggccaacctgctctacatagtgagttccaggccagccaaggccttgtaatgagacctatgtctcagaaaaataaaagaaaaaaagatgtactctgttatatataaattatgtcacaattgcctttttaaaagcctccaatccaggtgtggtggcatatgccatgaatcccagcactcggaaggcagaggcaggtggatctctgtgagtttgaggccagcctggtctacaaaacaagttccaggacagcctccaaagctacatagagaaatcctgtctcaaaaaaccaaaatttcaacaggcgttggtgctgcacacctttaatctcagcacttgggaggcaaagacaggtggatctctgtgagttcgaagccaacctggtcaggacaggctccgaagcaatacagagagaccctgtctcaaaaaaacaaaaacaaaaacaaaaacaagcaaacaaacaaaaaatttctacccttatactcaacatattttacccattgttatgtctacatgaagctttatctgatgctggggtgctggggaaggaataactaacttcaatgtccctttccaattgaaagaaatttcccattgtctttggttcttctttcccatttctcagcccttcggagcttcatactgttaaaaactacatctgctcataaacaattttgccagactttgaatattttctgctcacacccaaaccagttttgtttttcttacatgaacaaaatctctctccaaaagtatgccttttcagctaggtgtggtgttacatgtctgtactcccagcacccaggaagttgaggcaggaggattgtgtgtctaagggcaacttgggctacatagttgagaaaatttgtctcaaaaagcttaaaaaaaaaaaaaaaaaagaaggagctggaaagatgctcagtgggtaagatcactggctgctccagaggaccagggttcaattcctgctgtacacatgcagctcacaaccttctgaacgccacttccaggggacccaatgccttcttctggccttcttgggcactgcacacaggtggtgtgcatacatacattcaggcaaaacacacacaggaaataacacataaatctaaaaaaaacaaacatttaaatttgtattcttttaaaaagccaagaatcaaaacaaaaataaataaaacgtgtcttttactaacagccacaataaatagaaacaaaacattttaaagctatgatttgtacaaaggtaataataatatatcagcattttggaaaactcataaacataaaaggacagttatcattctttgttgtctcaaccagaaacatttgtttctgaaacttattttctaaatttccaggtaagtttatataactattatttacaacatgttgctttttttttttttttttttttttttttttttttttaaaagcgggttttttctgtgtaacagctctggcctccggagtgctgggattaaaggcatgtgctaccaccacccagttttacaacaagtttctttaaagtacacacacacacacacacacacacacacacacacacacagcacgtgtaatggtttaatctagccaattaacatacacctcactttgttgacatttttgacgtgggaacacttaatgttcattctcaacatttttcaaaaatgttctacacaccggctggggatagagtactagtgctgcagacactgggcatggcaaattcccctttaatcccagcacttgagacagattcaggcagatctctgagttcaaggccagccaagtgtactctgtaaattccaggccagccaaagagctacaatgtgagatcttgtctcaaaaaacaaaacaaaacaaaacttaaggtcatccttagctataatgagtttgaagacagcctggggtttgagaccctgtctgtagaagtaatagtggtaaaaataataaacaaaaaagaaaaatattgttaccatgcttggtaataaatccagaaatgaatgctaacaacccttcccttattttttttcctttttttaaaggtttattttcattttatgtgtataggtgttttgcctacatgtacgtctttgtaccatatgcatgctctgtgccatggaaccagaagaggacagcagatcctctggaactggagtcacagatggttgtgagcagacatgcaggtgctgggaactaaacccaggtcctctacaaaagcagccagtgctcttaactgctgaccttcctttctagctccctccccttactgttaaaatgtggttttattgcctagtttggatcatattcatacatatcccctctgaatatcagagtccagcaacactgtccagatggacctataaagtcctgggctacagtgatcctgcctcactcttctaatgagctggatctatgactgtgatttcccaagaaaaaagtttcaaacatgctgaaagtctatacaacacacctgaatcatcaccctgagtcaatgtctgtagagcattttctttcttttccttccttacttccttctttccttcctttcttccttccttcctttctttgtttttcaagactgggtttcactgtgtagccttgactgtcctggaactcactctgtagaccatgctggcctggactacagagacccacctgcctctgcctcctgagtgctttgagtaaagacatgagccaccactaactgaccagccatttattttattttttagacagagctatatagccctgactgtcctaaaactatgtacaacaggctggccttgaactcacagaaatctgcctgcctctgcttcccaagtgttgggataaaaggtgtgcaccactacatctggcttgtagaacattttcttgattaatgattgatgttggtgggtctagctttcagtgggtggtgccactcctggacagggagcctgacttgcataagcaagcaaactgagcaaggcctgaatgggcaagccagcaaacagcattcttccagggctttggcttcaattcctacctccaggttcctatcctgacttccctcagtggtggagagtggactgagagcggtaagaagaaataaaccctttcctccccaagttgcttttggtcatggtattttatcacagtactagaatcattaagacacaaattggtattgggctcatgggctattgttatgacagacctgaccatgttgattttggaacaattatggaagaatttggaactttgtgttggaaaagttattatgtgttcagaggttaatgagctgttatgctggctaattttatgccaacttggcacaagatagagttatctgagaggagggaacttcaattaagaaaatgtctctataagatctggctgtagggccttttcttaattaatgattaatggggaagggcccagcccattgtgggtggtgccatccctgggctggtggtctggggttctacaagaaaacaggctgagcaggtcatgatgaacaagacagtaatcaatacccctccatagcttccacatcagtttctgcctttaggctcctgctctgaattcctgtcccaatgtccttcaatgatgaactacaatgtggaagtgcaagccaaataaaccctttcctccccaacttgcttttggtcatggtgtttcatcccagcagtagtaactctgagatatacgggaacttagaaaataacactgaaaagcagggtagatggtggaaggtctggctcatgaagtttcagagggaagcttgaaagttcctgaaagactatggaggccattaggtattttgaattaagaatctgtgattctggtcagttcatgctgaagaacctgttgtgtttaagaaaagaccaacaccattcaggaaaaatcttctgagaattgctttctcggggtcagcacacaggttttaaggatatgtcggagtcttgaagagcagctgaaacttagcactgtaaaagtccgggagaggccactggtgagattataaatgcatattgccatgactggtttgtagtttatttttttatgcataggagtgttttgcctgcatgtatgtataccatatgcacactacatgtgtgcctggtgcccatggaagtcagaagagggcatcagatcattaggaactggaattgcagatggttatgagtcaccacataggtgcttagaatggaaccaggtcctttgcaagagcaacagtgagccatctctccagccctctgtatttacgttttaatggaacaccccagaaggaccagaggaataattccaaaactaagatattctaactgatgatgatgatgatataacgtatgagtgtgggcatatgcataccatggcatgtgtgaagaggtcagagggaagtgttagaaattggttcttttcttccccagtagcatctggggatcaaactcaggttgttagacttgcatagcaagcactttcacccactgagccatctcactggcctctatgtaagatattttaaagaaccttccctgtggcatcttattttcaaagcttcccacattagacaacttccaggactaggggccatttgctttctttctcccttctcctccctactttcttcttactgtatgctatttttatttttgtttctcttccttccttctttccttccttccttcctccctccctccctccctctctttcctttcttttttttttttcctttttcgagacagggcttctttgtgtaacaacactgcctgtcctgaaactagccctgtagaccaggctggcctcgaactcagagatccacctgcctctgtctcccaagtgctgggattaaaggtgtgcaccaccacctcccagctgtttctttttgtttaagatttaaaaaattatttcatgtgtgtgggcattttgcctgcatggatgtctgtgttccatatgcatgtccccacctgaagtggacatcagattctttgggagtggaattacagacggttgtgagccactatgtgggtgtgggtgctaggaatcaaacccatgtcctctggaaaaagctggcagtgctcttaactactgacccatctctttagcccctgtttttgtttcttgtagatcaggttgaccttgaactctcagcaatcctcctgcctcagcctctaaagtgctatggttacaagcataccatgccatgccaggcatcatacatttcccctgcaatacaaataaacagcaaaatcaggtcattttcagtcccttccactttgatgcatgagttttagaatgttcagactctagtcttccactcttaagagcacagggctgaccagccagtccttgttaggaggcagcctgtctgtggtttggcaccactgcccagcaggcatttattaaatcagtgggatgtggtccctgctggcttggaagagaacattaagctccaaaaacttcctgcagcaggcctcctttggagagtgctgtgcaaaggggtgaggaacaaaaccatttaggtccttggctgtgctccaagatctgttcactagtgctcctgccctgtctgcacaaagaaccagtgactggaaacatctggaagcctgcttaagaccgggtgactttgctctccttcctcagggtgactgttcttgactccggtaatccaggttgacctttgccaatgcccccttccccttcaatcttctgcacttcattgggcaacagccctctaataaaatccacatgaacccagctgcaaacggcttctggaagggctctaagatctaacacctgcctcagcattcctagagccctagtagcaaggcaaaagaaggctaagacccaactcttgcaccttggggtcttaaagaggcattgtggagaaagccaataggcagggattaggaagaaacaatggcaagtctgctgaacacggggaaggtagttcttcgtgaggagcacacatgcaatgacctgggtagagcctgtaaacttgggctagcctcattctctacctcaatcatgatgacaaggctcattactctgggagacaggccagggtaaaaggcgagggtacatgtgttactaacctggggatccatggatgcctgtttcccacctctgttttggcccaggcagcccaaggttttgggtctgaaatatttcctacataactacaaagtatgtcggtgctggagagatatcagaacaaaacattcaatttctgcactccagttctattgccttggaaatcccaactccatgggtgtgtctgtgggcgaggatgtgcttggagttgcagcagcagaagggttgcctacatatgctggatttcttccaatctcatcccctagcccttagcttttgggggtatagcatttggacatagggttttctctggtttacacagtcagaacaacggtggtctaaggattccctctggctaaatccagagctctaattcacttcagtttttcctccctcactccctcccttccttcctgtttttctgtctgtagccctagctgtcctggaactcactctgtagaccaagctggcctcaaactcagaggtccgcctgcttctgcctcccaagtgctgggattaaaggcatgtgccaccaatgcctagcaacttcagttttctttttcccaacccatggcatgagtccaagaagtaaacacacaggctaaaaggcatgtaagctgtttgaagtttatcaagtacaaggatacagttactggggctggcattttaaaaattttacccctctgctttttaacttagctaaaattcttgctcttattttaaaagtaattattttctatggtagggattgaacccagggcttccttgctctcacctgaaaatgttgagctaattttaatttcaccaacctatctgctctgggttatagcaagccaaggaccagcacatccttccctggatgggaggatgggttcatttcagaagaccctcaaaggtgaaatggaagcatgtgttgcagtcagctcacaccggtgtggagcagaggaagtggtgtccttcttggagtgttgcctgcatctcattgaactgagccaactggcaggcctcttccagccctagccagcggtaagcttgatgctcctgggagaggcagatctctacattgtagtctttcactacagtcagccagtaaatgactgttttaggcttcttccaggccacatagttgagttcctttctgaagccctcgatgatggtcagttggcttgcttctatgcctgtttcctcctgagtctctcgaagggctgtttccaagtcagtctctccagggtccacatggcctggttaggaaataaagaagaaatcttcaacaggaactgaagctggattttccaggacagatgatctaacctcagggtcttcagtgactttcctgggaatacctgggcgaaaggaagtctaccgatggtcagtatccaaacatgcctaggaagggctacaaggcagacagtgcctggttctcatggtctgagaaatcccttcttcctactccatctttgtagagagtgacacaaatgtgcctggtaagccagatttagtggctgcttcattattgctctgttctttgttacactggggtggtgtgcacgggagggaggtgctctatcaccaagctacatccccaccgcagaacaggctctgccttctggtgttgagatggctttcctcggatctctgctctcctattcttttgagttttctccctctgatatgcacagggaccacttttctcttggagaccttaaagtaatttttctaaggagaggcagaatctcttgacagagtgagggctaactggaaaatccagtgaggactcaacaccctacagttaacaggcgcaaacgctgcactgctgcaccagcagctggttccaagtagccatcaaggctttttcaaattgttttcatcttcctaactgagcaaggccagatttcagactcacagggaaagtcctgatgggaacttaagactaaggacaagccaagagccagttctaagaaaatttgttggcaagacccaaatccaagccgacagctgccaaaaaactgttgcagcaacacttgaagctctgcagactgtggtggcccctagcgttacccatggcctttcccacaaattcttagtgtcccagaagggcccagaagcagtgagagggctctggtaacctgtacctcctcctggctcaggcactcatgtggagcaggaactgatagctgttcccttcttggcctggaggtggagctatacactagaagttatacttccagggctctgcacagcagcctagtggctagggaatggaaaataggaacttggcacttagctcccattctggagaaagttttctgcacaacacttcttatagtgtgagcaaaccacactgacagtgtattgaggaaaagtaggagagacactggtggtaacagggaatactattcaggatgtgccccctcctcctagctgtctgccaatcttagtacacccctcctggtaacatctatccagtttactgcctaccaatgttagcagggtaatttcatcccaggccagaaacagaaatgattagaagtcctttcacatctctaagtgagaggacccagcagtgtgactccggttatcaggagataagtgtgaatactatttacagtatttgtgacacctcttttaccttattctttcctgtgcaactcaaatgtgcaaaaatttctttcctattaccaagtcttgttttcttccaatctcagatatccatccatgcctcctcatcccactctctgtttttaatctgttggggctgttgactctggggctcatcccagcaactgccagagccaatctactattgctcactgggaccatccaaatggactcaatcaaggatggcttcagtatgccatccctatctgaagcagagttggattaaataaagacgttttaatgtaagtgtagcatgaggatttttttcccttttgcttttcaagacagggtttctctgcatagccctggctgatctggaacttgcttgctctatagatcagactggcctccaactcagagatctgcttgcctctgcctcctggagtaccagaattaaaggcgtgcaacaccactgcctggcagcatgagaattaacagaaaaagaggcagtcagaaaaagtaagacacatccaacagcatgggtggccttcagagaagagtaatgaaaatccatactcaggtgggtatggactcctcaagggacagtcattcagctcacttcttccagtgtagtctgccttctcttttaggaacttctgagagaatcttctgtaccctcaagatagcatccagaatgctagtggatgaaacctgcttacaaacacatcttggccaagtctaacccttcaggccactggtcttcactgttttgcttttgaaccctgactagctctatcctgggttctaagtgaggaactcggggcaaagatagccgttgaggctacaaccccaaggtctttatgatctttatagcctcttggtctgagaaggaccctttcactcttacccactgttcctgccagaatatgtagaagacctatgaataggaaacccagcttctctgtgctctaacggctccgaagtcatagtccctggatatgtgattcacaaaagaaaacccgaatgaaagaacactaaacaaagaagcaaaggaatttatcacattaaatcagaaaaagggcaggaaaaaaacatgggatttttaagtcaagctctactttgatacatgaaaaactaagaaaggtaggcacatagcccaatcattttactcaatttaaacattcttaattcccaagccagtagctcgtctcccgtttagccattaatgatgaaagcacaggtgaatgatataaaaacaccaagtgctatgtctgccttgggtcagctgcagaatcctatttctaggtctggggtggattaagtgttcctgcctctcccacctcctcctgctgtacagttggaaaagggacttgtagcggtctggcagggtggattcctgagctaaacttgacatttcccccaaaagctaatccctctgtccccaaacctttgggaggagtccagtgatgtatgccatttgatgcctgcagcagcagaaattcaattgtactgttgtccactttgggaataaggtgtcttcggaagatgatcaagccacatgctctcagggccatgatgtatctaggaagttaaaaatgatgtaaaacactgggaagccatacacagaaggaaaatccacatatgggggcgtagctggagaataccaaggactggataacagtgatctcacaacccacagaaggactgcatgccaaggaatggaggttagttttttagttttgttgttgaggaaattcctctaggagactggcctgtgggtaagcctgtagagcattttcttgattaatggttgatgtaggagggcccatcaaactgaagatggggtcatccctaggtaggtggtataagaaagcatgctgggtgctggagagatggctcagcagttaagagcactgcctgctcttccaaaggtcctgagtttaattcccagcaaccacatggtggctcacaaccatctataatgagatctggtgccctcttctggcctgcaggcatacatacaggcagaacactgnnnnnnnnnnnnnnnnnnnnnnnnnnnnnnnnnnnnnnnnnnnnnnnnttaaaaacatacacacacacacacacacacacacacacacacacacacacacacacacacagagagctaataaggccacacaggaaaaacatgtgataggcaacaatctgactccctctgagagattatagcaatcttactgaaagaagggttgtttgaacagagaaacaagagagtcaaaaggtgagttcataaaagggaggaagggagaatgtgattcaggtgcagggtaacaccctgggcaaaggtcctaaagtaggacggcagaaccaaaagaaagctacatgctatttcccttgttgttcaatcaagatgggctgccaagcacgatggcacacacctgtaatcccagcactatggaggctgaagcgggaggatcaccacaaatctgaggccagcctgggctacacagcaagaccttgtctcaaacaaaagaataaacaaaaagaggcactctcggctctcaaggcataaaagtcaggcaggcccaacacctcttccagagtaattctcaggatggctgtcaaatgctattttagagaagagcaccttctcatggataaaccaaacacctttttctcccctctcctttttttgcttctccttttttgttgttttgttgtggtggtggtggttgagaccaaaaagaaggtctcatgcatgtttggcaagtgctttatcaccaagttacaactggacacccacatcattctaaactggtgggtgagaaggtcttaagaattagaaatggctcagtgttttaagtctgtgtaactgggtgtggagatacactgtttgggagtgtttgagacagggtttctctgtgtaacagctctggctgtcctggaaattgattgtagaccaggctggccttgaactcacagagatcctcctgtcttttcttcctgaattctgggattaaagatgtgcactatcactgcctggtatatcaccgtttaaagcagaaaaaacatccattggaactggaatggtcagttacatttcagtataaacatctacctctgaggcatgcacacacacacacacacacacacacacacaccagtagaaccaaatgttctggctgtaagaaaatatttttggatatattaattgcaagaagtatggtacagaatatgtataatgagatcttttttgagttaaaaaattcatatgtaaagtagtagtacataggcttttacaaaacaccatgttctattttccgtgactccttatttatgctgagaacattccccattctggaagctgcaaggaaacaccttgtctctgtagaactattgaacaagtattttattcactggcttagcattcatgtagaaacaggtaactggtcctatgcccttcccacatctgaaataaatatagggtaccttcctcttgcctaagtaagcttagaaacctaagactagaaaggatcttgcccttccagagacaggaagccctagtatattcctcctttccactaccaccacaaatagagcatgaggaaggaaagatgccgccgtcatgaaggacaagaatgacagacctggggtggccatacaagggaggaaaggctagtgttttcctttggaaaggaacggaagtggggagaaagtcttaggatagtagaaacggtgcattctagcagtgtgtaaagaggctgcgctgaagaaacagtctggcctacaatctggtcagacagctaaagtcagatgtgaattctgtgtatgctggtctcacagagaaggcaaactgctagaaagggagagctcccggttaccctttcaattgactggcttaagccagctgtgtactagaagcctatcccccaacctcatagaatcaactcttcctactgatccctttaaaaataattaattgccaggccgtggtggtgcacacctttaatcccagcacttgggaggcagagacaggtggatctctgtgagttcgaggtcagtgtggtctacagagcgaattccaggacagcctccaaaactacatagagacatcctgtctctaaagaccaggaaaaaattattattatttacttatatttattgttattattgtgggaagtataggcatgacatggcacatgtgtggaattccctcctatttttatatgttctagtgattgaactcattgttcagctttttagtaagcattttatctatttaagccacgttgctggctcctacttctaactttgttttattttggtttttcaagacagggtttctcgggctggagagatggctcagaggttaagagcactggctgctctnnnnnnnnnnnnnnnnnnnnnnnnnnnnnngggtttctctgggtagccctggctgtctagctctgtagaccaggctggcctcaaactcaaagagatcagcctgccttcctgagtgctgggattaaatgtgtgcaccactacacccatctaatcattaaattttattattttacatgcattgatgttttgcctgtatatgtctgtatgagggtatcaggtcccctggaactgtagttccagatagttgtgaggtgtcatgtgggtgctgggaatgaacccaggtcctctggaaggacaggcagagttcttaactgatgagccatctctccagccctacttttaaattttttttttcttttaacttttgaagtagctcaagtgtcacctttttaatgaggtcttcttgcttgtaataactctataaatctctactataagactccatcagagaagactttgcctcacagaaatttaaggatttataataaggattcagtatgagctgagattttgtcaggcctgagccatcagactggtattaaagtgtatgcactgcaaccgtgacggttgcatacatacaacatacaactccagcttttcaaacctaatgcaaaagtttgttgtggtcagtactgagctagaaccattaagaagggaattctggtgctggagatttggctcagtggttaagagcatttacttgttcttggaaaggacccaggttcaattcccagcatccacatagaggctccccacctccttgcatgtgatatacagacatacatgcaggcaaaacactcatacacattaaataataaaaaaaatatttaaaaagaggattctgggaaatgtagttccagtatagctaaagtgacccagtacaaagccattttaagtatgcatcccttgtaaggtaagtctctgttggtacctttggcaggaaagaatcagactcagtctgtttccttggaaccctatttagcagttcaacagatgttcattgactcaacagaactctttctccacctcccactgaaacaaatgtttaagtatgttctgggaccctgggaaacagcccagtgttttcttgaagagtgccatttgcataaaagtcaatggagctattgttggttttctggtgttttggataagagggagctgaaagatccagaggcttgaaagtattcagctctcatacattctccaagtagattcaaacctcagggggttaaagaacacagcatccaatatgcaaatatgactgcagccaggattgcggaggtgagaactccaggctgacagcaggcaattcacacttcagaaaagtggcagagtgcctgcggtggttaggaaaaaagaaacaaaaaacaaaatacccaaaccctcaatgtcatcagaaggttctagaagctaaggaaaaatgctcttggctttctccacagacagaatttcctcacagcctaggacattcaagaccaatgggtgtgtgtgtggggggggggggaattaacagataaatggctatgctgccatagtccaacatgcatcaaattaatcaagaatgctactgtaaacagttacctgcaaaagctctcacaaacacatatttttatttgcttgcttatttttgtggaccagagtgtgaactcaaacttgtgtgaacaagtgaggtaagcgctctccaactgagctataccttcagtctttatataacaggttccctaaaattacttcacttttctgatggtctaaatcccttaaagcatagtgttttaagccaccatgctgtcataacaatactgtgtcacctacactatgccaagtttttgacaacttaagtttttaatgctgtaaggcaactctttaaggccaggcatggtggcacatgcctaaaatctagcattcaggagatcgaagcaggataatcttgtgttaaagatcttgtctcaaacaaacaagcaagctttttttctttttcttgagacagggtttctctttgtagccctggctacacactttgtaaaccaagttggccttgaactcagagatctacttctctgccttccaaatgaacacaaaggttatactaatgtacctttctcaaagctgaaattttaagaaaggttaagccaggattagtgacctgtaccttgcacctgtaacctcagtacacataaatttgaggtctttctgggccacttaagtcctgtctcaaaacataaaatacacataaggaagaaataaacataggtggctggtaatatggatttgaatctagagaaatctaactccaaagcctgtaattttatttaacatttaacagcttccttatcatgaaatagggttaagcatacacacatggctctgacagcatgaacaagtgattaataaaatcatcaccagtttaaaacccattggcctttaatctgtagactggagactgtataggatgtctagctggaaactcttctaccaaacaaattttatgtggggaggatgaaggtaaccaatccaactcaggtggggaaagtgtagccttaggctcctacaagtgcctagttgacaagggtatccatgactgcactgctgttttctaagaaatgggaactgaaaaccacatgttttgtttaaacctggtgactagaaagtctgcacaggcctgggaaggggaaaccaactctgttgctctcaagcagctccacgctctctctcttcacaaagcacaatggccctcaatccaactctccaacttccttctttgtttttggaagaagatgaggcatctgtccagacaaagttctcttgtaataaaaataaaaggaagaaaagagtaacagaggaggggctggagagatggctcagaggttaagagcactgactgctcttccagaggtcctgagttcaattcccagcaaccacatggctcacaaccatccgttatgagatctggtgccctcttctggtgtgcagatatacatggaagcagaatgttgtatacataacaaataaaatcttaaaaaaaaaaagaaacaggaaaaattatatgaaaaaattcgaaacaaagaaaatgctccctcaactatacctttctctgggccttggcttcctctctgggagatcaagtcgatgaatcatttttcaatctttgctatttggctgaggagaaagtcttacctgcaatgacatactggtttctaggatcagggcaaagtcagacaaggttgggaccaaaaaaaaaaaaaattatataatgttaattctgttatgtggccttttagcgccacctgctgttcagttacagaaagctgacttaagtaattctaatactagaacctacagatggatatcctttagtcacctgttgtctgctgagtaagttctctatggcaggattgaaggggaaattgttctagagggtcacagcctagtgaaagcaaaagacaaagagatgttatgaagtgtttcatacatcataaggaagtatgtaagacagaaaagcaagctggacagtgatgcagcaggcaccttgggaggcagaggcaggctgatatgggtgagttcgagttccagaacatccagggtatatccctgtcctgtgggagaaaaagacataaagacagtgaaacaggatctttgggtcaaaggggtaccccataaggatgttcatgtgtgcagcacatgtgttttcacctgggtgttaggttcagactcagatccccatagttgtacagcatatactttgtttagactgagccatctctggagcaccatcataaagacctcacactaaatggcattctattggcaagcagcttagtttatattgttttttatattttatttttattttagggtctcactacatagcccttgctgacccagaactctctatgtaaatcaggctagcttcaaactcagtgatctgtctagctctgcctctggagtgctggtattaaaggcatcctaccatgcctggattaatttatatcctgtacacaataaggactactggttttaagtaaattacattttggtcagactgacattttacaaaagcattttgacagtaagcaaggtggagaacaaattggaagaaaaaactgcaggcaaagagaccgattgttacaagcttatttcaacagcttgtaaataacaggaaactagattaggagcgagcctatgagaaagaagcaggccgggcgatggtggcacatgcctttaatcccagtactcgggaagcagaggcaggcagatctctgtgagttcgagaccagcctggtctacagagcaagttccaggacaacctccaaagccacagagaaaccctgtctcaaaacaaacaaaaagaaaaaaaaaaaaaaggggtgagtatgagatgtcttaaggaacattgacgaagttgatatttcattgtgtaacagagaaatttcctaagtccaagggaaccaggagaggtgtttggtttggataacaggatgtgaaaggaagtagctactcattttcatttgaattgagctgaatttaaagttctatagactgtccataaggtaaatagaaactaggtctaaaattcagtgatatctcactcaattcttaattttctaaactggacactttttattcgaaaaataattgttttcatcattgatactttgacaacccacgtgctgactactttcatgtcaacttcacacaagctagactcacacaagcaagagggagactcagttgagaaaatgattccataagatgtaggcaagctgctgtacggcattttcttctctttttttttttttttggtttttcgagacagggtttctctgtggctttggagcctatcctggaactagctcttgtagaccaggctggtctcgaactcagagatccacctgccccagactcctgaatgctgggattaaaggtgtgcgccaccaacgcccagctgtacagcattttcttaattagttattgatatggaagtgccctgcacattgtgggtggggtcatctcctgcattggtggtcatggattctgtaagaaagcaggctgaacaggccacaaggagcaagccagtaagtagcactcctcatggcctctgcatcagctcctgtctccagattccagtcctgtttgagttcctgtcccaacatccttggataatgagcagtgttttgggaagtaaaccaaatacccccccccccccagtggtggcaaacgcctttaatcccaacactcctgaggccaacctggtctacagagcaagtaagggctaggcattgtgctacctttcttcacttagtcttttctgcaaactggggaggcattactaccatttttcagaaaaggaaaaaaactacggctcagaaatatttttcagttattcaaacgcagggatgtcaaacttctaacatcattaatcttaacttccatcagatactaaacattttgcgtttgacaacttgattgctctttctaagattggagtcttgtggctttgtttgaactgtctcttcattaaaaaaaatcttttgtggctggagagatggcttcgtggataagagcacttgctatccttccaagggactggggttcggttcccaagaacctatactatctcacaatcgcccttaactcctgctcctgggatccgatgtcttctggcctccgagggacctacaagcactcggtgcacacaaactgagacaggtgagagcgcgcgcgcgcaaacacacacataaataaaaaataagtagaatttaaatatatatatgcatatacgatcacttggaaggcaggcagggtttaattgataacaacaaagcaatgttgaggcctacgctatgatgactggccttaaaaatcccannnnnnnnnnnnnnnnnnnnnnnnnnnnnnnnnnnnnnnnnnnnnnnnnnnnnnnnnnnnnnnnnnnnnnnnnnnnnnnnnnnnnnnnnnnnnnnnnnnnnnnnnnnnnnnnnnnnnnnnnnnnnnnnnnnnnnnnnnnnnnnnnnnnnnnnnnnnnnnnnnnnnnnnnnnnnnnnnnnnnnnnnnnnnnnnnnnnnnnnnnnnnnnnnnnnnnnnnnnnnnnnnnnnnnnnnnnnnnnnnnnnnnnnnnnnnnnnnnnnnnnnnnnnnnnnnnnnnnnnnnnnnnnnnnnnnnnnnnnnnnnnnnnnnnnnnnnnnnnnnnnnnnnnnnnnnnnnnnnnnnnnnnnnnnnnnnnnnnnnnnnnnnnnnnnnnnnnnnnnnnnnnnnnnnnnnnnnnnnnnnnnnnnnnnnnnnnnnnnnnnnnnnnnnnnnnnnnnnnnnnnnnnnnnnnnnnnnnnnnnnnnnnnnnnnnnnnnnnnnnnnnnnnnnnnnnnnnnnnnnnnnnnnnnnnnnnnnnnnnnnnnnnnnnnnnnnnnnnnnnnnnnngcttggctgcgttgccatggggatgtggcctggccggcgtctgaggcgggttgacaggacactctggtagcccggccttcgggctttctccagacggtgttatttctcgtatcctctgagaaagttggctgaagaggagcccagcagccctcgaggtgagaaagggtagcgggtttaagccccgcgcctgcgcgggagagggcgcgcctgtccgcggagccgcgcgtgcggagaccggtgtttgctgggcagctagaaattgtcttctcctggttcttcgacggttgacatattcccccacgtttcatctccctgtctacggtttcttcagcaattgcccggaaaaccaccgttcttggtttttttctgagtgcccaaagtcctcttgcctttgaaacacacttcagagcgcttctattccactttggattgttttgtgtacttccggaaacctcgttcttctttttctcatataactgtgaactctgagataagacaagcgttttcacatatcctatacacatagtagacttttaagaaatatttgttcagtcgaatttttttccttcagatttctttttatttgaattagaaacaagattgttttacatgtcaataccagttccctctccctctcctaccccccccccccaactaaaaccctacctatcccataccctttctgctccccagggagagtgaggccttccatggggggggtcatcagagtctgtcatatcctttgggatagggcctaagcctcccctgtgtgtcttggctcaggaagtatccctctatgtgaaatgggctcccaaagtccacacctatgctaaggataagtactgaactactacaggaggtcctgtagatttctgaggtctcctcactgaaacccacggttctgggttctggatcagtcccgtgctggtatcccagctatcagtctggtggccaagagctcccctttgttcaggtcagctgtttctgtgggtttcaccagcctggtctgaacccctttgctcatcactcgtccttctctgcaactggatcccatatcagctcagtgattagttgtgggtatctgcttctacttccaccagctgctggaaggctataagatggcatataagtcagtcatcagtctcattatcaggggagggcatttaaggtagcctcttctctgttgcttagattgttagttggtgtcatctttgtagatcttcagatatttcttctgttcagtcgaatttaactcactacaaatagattctattttcttccatgccttgttccatgcaaagatgatttgggggcaggtggaagagagaggacacactaatctcgtatacaaataagcctgaaaattcagcattgggatttccatcttttggttacaacaactttcctacattgtagtctatctaccaataccttttatcaggctcctaaatgtatttcctcaaaacagaccattctgttgttatataccagaggatttttctctttttatttcttcacctacaactattgtcacattttatctgtgctttgggaaaatgtaatcagttatttgagtttgaatttttttcacttacattacatgtgtgtaccacagcactcaagtgaaggtcagaagacagctttgaggagtcggttctcgttttccattatgttgaggcagggtctgtcttgtttctgctgctgctgtacagcggtctccaggctagattcccgttatgcctcccatttctccaaaagaatgctgggcttacagacgtgcactaccacatgtggcttttgtttgtttgttttttgttttgtttttttttcaagaccgggtttctctgtgtagctttgtagaccaggctggcctcgaactcccgagtgctgggtttaagggcgtgagccaccaccacggggctcacatgtgactttttatgtggttctgggcattgaactcaggtcattaggcttatgaattgtgtgcatttacctaccaagccctttccttggccctgatttgagtttcttttttttttattttatgtgtatgaatgttttgcctgtattatgtgtaccttctttttgtatgtctggtgagaaggaagccagaagagggtgttggatccggttgaactgtagttacaaacacttgtgagctaccatgtggatgctgtgagtagaaccccctgttcttttgaaagaacagccagtgctctttaaaaaaaaaatacttatttattatgtatatagtgttctgcctgcagtatgtttgcacaccagatctcattacagatggttgtgagccaccatgtggttgctgggaattgaactcaggacctctagaacagccagtgctcttaaccgtctctccaaccccattatttgaggtttgtttgtttgtttagttggttggttggtttttcgaggcagggtttctctgtggctttggaggctgtcctggaactagctcttgtagaccaggatggtctcgaactcacagagatccatctgcctctgcctctgcctctgcctcccaagtgctggaaataaagacatacgccaccactgcctggcactatttgagttttttgagatagcatttcatactgtagcacaggcagtcctggaacatgcagtaattctcctgtctcggcttcttgagtgctgtaattataaataaaacatttattatttgttgtatgtgtgtctgtgtgtgaacagaggacagcttttggggagtagattctcttttacagtgtgggtcctggggattggttcaggtcatcaggcttggcagaaagtgccgttacctgttgagctcttttgccagcctttaaaacatctttttttttttttctttgcatttatattctacagagtttttgagtgttttgttttggtttggtttttcgagacagggtttctctgtgtagctttggagcctatcctggcactcgctctggagaccaggctggcctcgaactcatagagatccacctgcctctgcctcccgagtgctggaattaaaagtgtgcattactactgccccgccctacagatggattttttttttatgaccactctcttcagtgtgtattaacagctcagcctctatacattcatcaggtatccataatcctattgtgtttccaggactgtttcattgttaacttgtggcctatatcttcacagtattattgctgattattcttcctaatatgaaattcatagctcaggcttaactttattgaaaggattaaaaatgttgctgggccagctggagagatggctcagcattttaagagcactagctgctcttctggagggcccaggttcaattcccagcacccagatagcagctcacaactgtctgtaactccagttccagggtatctgacaccctttcacagatatacatgcaggcaaaacatcagtgcatataaaataaaaataaataattaaaaatagttttaaagcatgttgctagacaatgatggcacactcctttaatcccagcacttgggaagcagaggcaggagaatctctgagtttgaggccggcatggcccacagagtgagttccaggacagccaggactgtttcacaaagtaaccctgtcttgaaaaaacaaaaaacaaaacaaaaaagaaaaaaaaaagttttgttgaatgaggctggtagtgtggtggtgcacacctttaatccctggatctctgtgtgtttaaggccagtttggtctaaataatgagctccaggccagcagggatacatagagagaccctgcctacacacatacacatacacatacacatacacatacacatacacatacacctacacatacacgcacacatacacatacacatacacctacacatacacgcacacatacacatacacatacacctacacatacacgcacacatacacatacacatacacctacacatacacgcacacatacacatacacatacacctacacatacacgcacacatacacatacacatacacctacacatacacgcacacatacacatacacatacacctacacatacacgcacacatacacatacacatacacctacacatacacgcacacatacacatacacatacacctacacatacacgcacacatacacatacacatacacctacacatacacgcacacatacacatacacatacacctacacatacacgcacacatacacatacacatacacctacacatacacgcacacatacacatacacatacacctacacatacacgcacacatacacatacacatacacctacacatacacgcacacatacacatacacatacacctacacatacacgcacacatacacatacacatacacctacacatacacgcacacatacacatacacatacacctacacatacacgcacacatacacatacacatacacctacacatacacgcacacatacacatacacatacacctacacatacacgcacacatacacatacacatacacctacacatacacgcacacatacacatacacatacacctacacatacacgcacacatacacatacacatacacatccccatacacatacacatccacataccccccccccccacacacacacacacacacgtttaaatgagtaatggagccaagtataacaacataggctctagtctgtagtctgagctgcttgaaagctgaagcaggagaaataccctaatccaagatttgaagccatcctaagtaacatagcttggccaagacctagacctgcagtgctaggggtggagcccagggccttgagcatgcttggtgaatgtttcactactgagctacatcccaaacaagaaacagttttagtggtagtaataacagcagaaacagtagtagtaatggtggcagtaacagttgtagcagtggtggtaataatagcagtagtagttgttgatgtaggttctaggttaaaggagaagaagaaatcctaatatgctttctaattcaggtctgagtggtaccatcacccacttccccaatccaccccccaccccccggcttttgtaaggaaatagcaagtttttgttttgtttttttaataaggaagtgataagttgttgttatgtgatacatatgttcagtcatggaaacatttttattatgatgggctgaagatagagctcaattgatagtgtttatttttcgtgcatgaaaccctaggttcagtccccagcgccacataaaactggcagtggttgtcgaaaatgcttagcatttgaagcagagaaaaaggtcaggaccatcctgggctttaggaatttaaggttagcctgggctacatgagacatcatctcagaaaacaaaacaaaacaatgaaaaacaacaaaaaacatgcagttgtctattttgctgtgaagtgaacttacgtagtatttggcagcattgcataatactggtatttaactagtatctggaatagtgcatctgaaataggccacaatttccagctgagattttaccagcaacgaggagtgaagctctatctattgtagtctatttttagttagccatctatttatgttgacatacattggttctagccaggagcatggctttactgccagcacttgggaggcagagggaggggaagctggggtacagagttccagaataaccaggggtacacagagaaactatgtcttaaaaaactaaccaaacaaacaaaaactagtggtatagattagtgtggccaatatatagctatccactcttttagaaaattcatgtagttgttttaaataaataaaattattcctcactttatttacttgtaaaaaaatgaaagattaattagatagcaccattacatttaataatctaaataaggttatttatttttttaactttaaaaaacaaattgttttttcaagacagggtttctctgtatagccctggctatcttggaacatactctgtaaaccaggctggccttgaactcagagattctcctgcctctgcctattgagtgttgggactaaaggcgtgtgccacctccctgccagcctggaaatttataaagactggtgttatggctgcaaactggcaaaaatcttttaagtgatgacttcctgagattggattagaccaaaattttaaaaataagccactcattttaaagccagcactgattactacctgtccctgggagtgcattcagaattaaacctctgtgtttagagactagtatttagagactagtttagagactgcattgacttaagatgactgggttcagcgattttgttatgtttatttttaggtgattaccactaaacttaaaaacttaagcctattaagggggggtggcctttaagcaaatcacatagtatttatagttaactgtaaatgaactgcaaatatgacagtaattcacaaatcagtgtccaaaaatccacacctggccttaggaattccattgagtaccatctgttgtagttcctctgcagctgttgctttaaacagttgtctcctgtcctttgtcttctgtaaagcttagtcatctatagataggataaccctggagtttgaagtaactggttctcttgagagagaagtatatactgtattgtttaactttagttggcctcttggaatatggaatttcttgtgtgtccttagggatctaatacctaacctgagatacagaaacattttttatggaaagtgattaaagaatgttgagtttatattgtatctgatttttaaggtgcacatgtgtgcttgcatgagcgctggtgtgtgtgtgtgtgtgtgtgtgtgtgtgtgtgtgtgtgtnnnnnnnnnnnnnnnnnnnnnnnnnnnnnnnnnnnnnnnnnnnnnnnnnnnnnnnnnnnnnnnnnnnnnnnnnnnnnnnnnnnnnnnnnnnnnnnnnnnnnnnnnnnnnnnnnnnnnnnnnnnnnnnnnnnnnnnnnnnnnnnnnnnnnnnnnnnnnnnnnnnnnnnnnnnnnnnnnnnnnnnnnnnnnnnnnnnnnnnnnnnnnnnnnnnnnnnnnatacataagcaggcaacatcagagtctaataccattctgtgaattttgatactcactctagggttcctcatgcttactaaatgtccccacttaaaggcagataagcctgaaaaatctcttagcagagatccatcctgtctgcccctgggacagcttctaacaggtgactttttccgagtcattcagtatatatttgtttcagagacttgggtttttttctttttggattgccataaatcttattggtataaatgctcagaaattgattctttttttactagcaactgtcacttaaaaataggtatgaaaaacaatataataatttcaacttgtttccaaagtcctaagaaagaaaaagtaaaatttccacaatatagaaaatctctgtttagtctcaaattatatgattgtaaaataatgactctggctagacctggttgcacatttgtaaacccaggacttgggagtataagaaacattaaatattagtcttcctgttaaacaacgtagaatttttttacaacaaattcaaatcttttgatcttccctaccttttaaaactgaatacaaatgttttaaattccctattaccaccaccacctagctaatagctaggaatttgaatgatttggaattacagtcttggaatttgaatgatttaagtggccttccccatcccccttttcttcatttcctttatgccaattcttttaaagctaactgattgagaaagactgtgaggtcagaccaaccaggaaaagacagtcactacctaagttagaatcaaaaccaagtgcatgccaggcagtggtagtgcacacctttagtcccagcacccaggaggcagagacaggtgaatctctgtgagtacgagaccagcctggtctacagggtgacttccaggacagccagggctacacagagaaaccctgtctcagaaaaaaacaaaaccaagacaaaacaaaaaacaggcacactttctgccctggcatgcatgctcttcttttacaagcagtgcactctttttatccagagtaaagttttgctttgttcagacacttcagttggtgtggcggcctttatttgcaaccccaagcttacttctttctttccttccttcctttcttttttttattatatatgcaacattctgcttccatatatatctgcacatcagaaaagggcaccagatctcataaaggatggttgtaagccaccatgtggttgctgggaattgaactcagggcctctggaagagcagtcagtgctattaacctctgagccatctctccagccccctttctttcttttttgaagcagggtttctctgtggctttggacactgtcctggaactagctgttgtagactaggctggtctccaactcagagatccacctgcctctgcctcctgagtgttgggattaaaggcatgcaccacgactacctagcaccaaacttatttctaacaggaggtatgttttctagtttgaagacaatctgagcttggtgttttttatatggtttcatttctttattttggtattgaatctttgctttgggttatttgttttaataatgttaactcttctgagaagtccatgaaaaagttttttttagtgatttcttccgtttctttcatcaatgttttaatagttttcattatggagatcttaccttccttccttccttccttccttccttccttccttccttccttnnnnnnnnnnnnnnnnnnnnnnnnnnnnnnnnnnnnnnnnnnnnnnnnnnnnnnnnnnnnnnnnnnnnnnnnnnnnnnnnnnnnnnnnnnnnnnnnnnnnnnnnnnnnnnacggagatcctcctgcctctgcccctagattgctggggttaacattgtatagcaccatgctcagtaaggtctttgatttctttgattaaatttattcctaggtattttcttccttctctcccccctttgaggctacagtaaatggaattgctttcttgatttttttttttaagataatttgctgttagcataccaagactatttctgattggcacctcaacagctgggaactaacagtctccagacttccacaaaggagagctccgaatatttgtgttgttggataccaggagagtcagtatgtaaaaaacttgcatcctccctcatcctgggctcactaatttgcacttcatttttctggtagtgacagctgtgagctactccctgcagtaggggtcagctaagggggaagtgactgggcctgtcagtggtagtagaaagagtcagacatgagaagacttaaattccaatcttggatgtcacttgttactctggccaacacacagattcattatggacaagggaggtggagacaggagtgatatggttaggtggagagaggaatatatggcaggaggagacaagagaggcagtctgagatttgtagagatggaggcagtctgaagcagcagtctgtgggagtcagtttgaggaagcagtctgaggaggccctgttggtggaggattctgtagaggtaaaaggtctctcttggggtatctcctttacttctttgatccttcagctttcatcccctgataactgacttcaagtttttattattaagaacaattagaattcatgctacaacttagtttagctttcaaaattctcatcctgtttgtttttttgtgacagggtttctctgtgctgaaactcactctattgacccaactgcctcccaagtgctaggattaaagttgtatgtcaccactgcctgcctctatggctaactagtgtggctaactttaagctctgatcctcaggcaagctttgttaggtcataaaataacaagtaattgtcattttacttattatccacctccttacacacttgaattaaaaatttaccatttaaaagaaattaccattaagggggctaaagagatggcatagtgattacaagcacttaccactcttgcaaagggccacggttcagttcccagtacagatgggattgctctgtttaacagccttggctgtcctggaactcactttgtagaccgtattggccttgaactctcaagtgctgggattaaaggagtacaccagtacctcccaggtcttttaaaaaaatttttatgaatatgtttaagtgctgtatgtatgtatgtgtaccacttatgtgcttggtgctgttggaggacaaaacagagtattggatcccctggaactggagttattgtcagttgtgagccactgtgtttgtacctaggaaatgaatcaaattctccacaagagcagaagtgcactgaactgctggaaccagctctctaatccccagaaaggtggtctaaggagaattccgtaaaggagaggttcagaaagtcaccaatttgcaactcctaataaaataagtaaggaggtattgatcaccaactctcttaacttaaaagaatctctcagcaaggggatcaggctgcagtcctcacagactttgtatatgttctgattcgatgttcatgaaacctgctaaataacaccgacagagcatttgccagaaatgtagatgctgcttctaatgtaggcttgccagatttagaccaaacaaaattcaatttgaatttcaaataagcagtgaatgacttctttagtattaagctctatgcttggaacatacttattttgtctttctataagaagtcagaggaacagaaagaaaaggagatgaagtttgtaccgagagagggtaaatgggactgctttacaggaaaaaaacttaaacataaccatcaagtttgtggaatttgtatggattctgatttttgtaaaaagatattttagagtcagcaagacaacttattagataaaaagatcggctacttggtttcagtcttggggcccatggtggatggagagaactgacccccacactttgtcctctgacctccacctgcataccatgacatgggcacaccacactgccatatacttactaacagtaaatacaaaatttaaaatatattttaaaatgcatattcaaaacatgtttgaactgggaatggtggcatatacctttaatcccatcactgtggaagcggaggcaggaggatctctgtgtgtttgaggccaatctggtctgcatagcgagtttcagggcagcaaggctacagagagagacccggtcttgaaacaaacaaaaaattgatagaaatagactgagtatatagactgagtataaggtaacaaagattaattttacaattttttttttttttggtttttttcgagacagggtttctctgtgtagctttggagcctatcctggcactcgatctggagaccaggctggactcgaactcacagagatccgcctgcctctgcctcccaagtgctgggattaaaggcgtgcgccaccaatgcccggcctaattttacattttataactataataaaccatatataatgatgacattaaaatgaatttacagataaaatttacctatctgcagtttactgtaaaatatttcaaaaaagaaaaaaaatggaccaagaaagcaagtgtggtagattttgataaatgaaaaactacagggtagtttagtaatctgcattagtgttctttggttttttgagagatacttaaaatgaagatctatcttatttaacattttaaataagaatgctctctgcctttacattttagcatatattttattacattctaatttattttgtgtgtagatgtgtgttgcacaggatatgtgtggaagtcagaggacaactttttggaattgattctctcctctcattatatgggccctggagatcaaactcaaagtcgttagactgtacagcaagctctgttaccactgaaccatgttgccaactctccaccttattatttttttttattagttcaagttaggaaacaagcttgtttcacatgtaaaagtcccttcttgcaccagggaaaaatgctaatccacttccagaggctccctggagtgcagaggcctccttattaacatccatgttcagggagctggatcagtcttgtactggcctcccagatagcatctggggtcgatgtgctctcccttgttcaggccaactgtttctgtgggtttctccaacctggtacagacccctttgatcttcattcctccctctcttcaactaaattccagatttcagctcagtgtatttctgtggatgtgtgtctctgcttccatcagccactgaggactctcgtgatgagggctctcgttgcggatcagtcggtggaaaaggaagcctccaccttattttttgagacaaactggagcttagactactggtcagcaagcgttgaggatcctcctttgtttcccaggattgcagacatgttctatcacacctagtttttatgtgggttccagagactcaaactcaggtctccatgcttatgcagcaagcactttacccactgagccatctttctaaccctgaaaagtgttgttttttaattaataatagcatcatggagttggagagatacctcattgattaaagagcacttgctgctcttgggaggacccaggttcatttaccagcacccacatggtggctcataactatctgttaactccagttcctgggatccaatgacctttttcacctctgagggcaccaggaacacacatgtgatgcacagatatacttgcaggtaaaatagtaatattcataatttttaaaagtagtttcagaattaagcacaagcacaacattgttcaatgtcttgttgggtaatggaaaagtcagtgaaatacaaatcacaatagggaaaacaatagctactaacattcattgctgtgtaatagtctacttctcttggttgcccactagtacttacccgttcccctctctgcaagagactactctcatttgtgcaaccagccaaggatatttatgcctgataagcaaagttatagctctattttggatcaattaactttctctttaacaaatgatgcctttatgaactgttctgtaccttgctttattcacttaccgatatattggaaagctttctttttcttcaataaatattggagagcttagttaagttttgtaattgcttcatagtattattccacatgaaagacaactgtaatttatttaaccagtctctgttcctttgctattatcaacagtgatataatgactttgtatttctgtcattttctatttgtacacaatagctgtaggatgtttctagagttagaattgctgggtagtgaatttgcttatgaaaataaatttatttatttacatatttacctgtttgtttaagacagggtttattgtatagccttggttgtcttggaacttgctgggattaaaggcatgtactaccactgcccagctaaatttttatatgtatgtttgcatctgtgtgagtgatatttacaaatcaccttgggaaagacagtagctaccaatacttactgctatgtcatagttgacttctgtatgcatatttctatatgtgcatatacctgtgtagagcagagaccaaaaaacgtcagatgccttagaactagagttataggcatttgcaggttgcccaggttgttatgtggggctgggatctgaactccaggcctctgaacttcattgcctgaacaccaatcactcttaactctgaacagttacctccagagcccagggcctggctcatattaagcatgcactcaactgcagatatccctccacagcctttaaatttgtctttttgacagagatcagtaaagaaaattttcatctgagcaaaattttccatgcatctatcccccaaatctgggagtttattttgtggttttgttggtggtggtttgtttgtttgtttgttttttgtttgcggcttaggggtagagttcaaatgtttttgcttgcagttgcaggagtgattctgatgcctatttcataagttaaaggaggggataaacctctgtaaaatggactgccattgcagagaaacatgttgtttgaaaacaaaggaacataggctgactgtagtgcccacaaaggtgggatggctgcagctgtgctagacgcttgaccatgcctacttaatctgcatgatcaaattactgctatttaaaaaaattattattacattttatcttcccatgatcttataggttatacaaggtttataaaattaaaattttagtctcatttacttattaggaatgcagtggaggctgtgattatcagagttgaactgagaaatgtttggtatggcaccaagggaattggtgtgcaaaatacagaatcttgcacagcttgtgcatagcacttacagtctgttccatgggtaagatgagccaagaagagagtgcagctgcttaggatttgcttaaaccaaaacactgaaggtagaataagttctgttcttggttctgtgctaggtggtgaagataggaaaaatgcaaaaataacaatagcaatggtaataactgccaacacttattaaatatggaatgctgaatgtgtcccagccattatgctgagcttgtttgtctgtctgccagccactcaggcaggcctcagacttgctctgtaaccaagaatgccttgaacttctgatatgcctgcctctaccttccaagtgctgcaattataggtacatgttaccatgcctagagttttgtagtgcttgtgagcaaacctagggctttgtgcttgttagtcaagcatgatataaattgagctccaaccctcaacccttacaagtatttccatattcaatctgaagactttaaggattctattgcctttttccccccattcagtgtcatgaggctaggtgtcattatgtagttcagactgacctcaaactttctacatagctttgttgctaggaccgaccaaattcaaggcagtcctatctcagccttccaagtgcttggattacaggtctataccaccacacaactcacacatgtttgaggggtggagggatgtgcacatacacatgaagtcaacaatgagtgtctccctcagttgttctccagcttttcctttttttttctttctttggctggccggtgagttccagagagcctcctgtttccacctccctagcactgacattacactcaaacactaccacacttagctttttttgtttttggagatcaaattgaggtcttcatgtttacaagtgagacacttcactaactgagctgtctccccaggtcccagatagctttttaacaaacaaaacaaaacaaaacaaaacaaaaaaattgggtttcatatagcccaggctgttcttgaatttgcaatgatttcctttgtctcatggttgggatttcggatgcccagcttctatggcattcctaattcacagttggaaaaaagtgagtttttgaaacattaagtgattttaactttctacacacttacctcctttataggattgcatggagatgaacaaatacagtgtccagaacagtgtctgttatgtattaaatgctcagtaaagccaggtggcacaagcctttaatcccagcgctcgggaggcagaggcagacggatctctgtgagttcgagaccaggactggctccaaagctacacagggaaaccttgtctcgaaaaaccaaggggagggggagaagctcagtaaataccagatgctgttactgaagcacagagtaccatgtattccctgttagggcccatctctttcatgatagaaaaatacagtgtccttctagcaaagacaggtattctagggaagaaaaaacagtaataaagggattggttggtttagttttgatattgtataatgtgttgggtataaaatgatagaaaaaaatctagatgaggttggagacatggctcagaggttaagaacactaactgagagcactggctgctcttctagaggtcccaaattcaactcctagcaaccacatagtgactcacaaccatgtataatgagatcttgtgccctcttctggcctgcaagcatacatgcaggcagaacactgtacatgtaataaataaatcttttcaaaataatctagagatgggactagagagatggttcagtggttaagagtactggctgctcttccagaggccctgagttcaattcacagaaaccacatggtagctcacagccatctaatgtaattttctgtcatgtaggctctatatgcaccatatacataaagtaaatcttttttaaaaatctagagatgaaaatctcattttgagggaaagtccttgagctgtcttgaaaggataggtgtagcccacacataatgacaaatgatgagaagtaactggcgttctcattcattgcttgtagaaatgaaaatagtacagccacttaaggagatagtttggcagtttcttataaaactaagcatttcttatcatacaatccagtaatcatgcaccttggtatttatataaaggagttgaaaattatgtccatgtgaaactgcagagatgtttatagaagccttattcataattgcccaaactgtaagcctctaagatgtccttcattaagtgaacaaataaataaaccaggacacattcacatgtgaaatgggtttcagcagtgaaaataaatgagctaacaagccatcagaagacttggaggaaatttaaatatgaaatgaaaaagccagtctaaaagctgacatactgcatgcttccaactgtgtgactttctggaaaaggtaccgtggaagcggtaaaaagatcgctgggcaggtatggggttcacacctttaatcccaacacttggggaggcagtggtaggccgcagtgagttgaaggccagcctgatctacaatagtgggttccaggatagacggtgctacacagtgagaccctgcctcacccaggatttttagggcaatcaaactagtccatgtaaccactgtcacataatgatctagcccaaaatttggtggctcaaaacagttgcccttttatttgcttaaagctctgtgagtcggttatttgggccaagcttagttaatagctctttacttgatctcacctggagtcattcctttggctgtgctcgtctagtgcattggttcttaacctgtgggtcttgaccctttggggcctgggggaggtcaaaccattcttttacagggatcacataaaactgtcagaaaacacagatatttacattgtgattcttagcagtaacaaaattaaggttatgaactagcaacaaaaataattttatagttggggtcacacaactggaggaactgtattaaagggtcgcagcattggaaaggctgagaaccactaatgtaatggcaccgctccagttggattgtctaagatggcttctcttacacatctgttttttgccatcgtggtggtagtggtggtggtggtgtatgagctcctggctattggctaaacttcttcacatggcagtagaagtctaacaaatgtaaaagctatgatggctctctagacctaggcatgacagtctatttcatggcattctgttgccccccaaagaaattagaaagctattctagatgcaatgtggggaagaaatagactccacccttgatggaaggactgtgaaacttttgtggacttctgcagaggggaaacctatcactaatagatgatgtcaggatcagtttaggatatgttactcggaccctttggtctttctttttgcctaaatagtattttctccaaatttaattattcagagctctttggttgcccttgttatcctgtctttaagcttgcatacacacacatacacatactgttcctcttaaaaaggacaaaaataaaatgaaagcaaattttgaataattaattgagttttgaaaactccgaaggaccaaaccattttgaaaaagaaaatataagtggctggagagatggctccacagttaagagcactagctactcttgctaaggacttgggttcatttctaagcacccacatgacagctcacaacttcagtctgtaactttagtcctaagggatccattgccctcttctgacctccatggacatcaggcacacatgtggtgcccagaaatacatacagacaaaacactcatacacataaaataaataagaattttagaacgttaaaaaaaaagcataaaactaggcatagtgatgcctgcttgtaatcctagagattgggagaccaaggcaaggggatggccataaatttgaggccaacctggactataaactccaaaccagcctacactctattggctatacaaaaacaaaaaaagacaggttgggtagtgcacacctttaatcccagcacacaggaggcagaggcaggtggatctctgtgagttggaggccagcctggtctacagcatgagttccagggtggcccaggctacacagagaaaccctccccaaaacgaacagaacagaggttgaggagacagtgcagtggttaacagtgtgtacaagttcttctagcatttcatctccagggatccaacgctcttttctggcactgcagttgtatacatgtgcaagcagttacacacagacacacacacatacacatttaaagtattgattaaatattttaaaatgcaatttaaagttttttttaaaatattcttaggaacttgagcttgattaacaggaataatggagaacaattcagaattctgacttataatagacaaaaattttgtactaccacatcacctgttagtgtttagttaaatttctgggtttgattattttattgtatagctgtttaagttgtaactgtagtactaatttcttaggaaaattatttgactggtattctgttcaggtagacatgtgtgaccgaccaccttttagaattatctgaaatactgaatgagttgattctgaattggttgtttttacttctatctaacttaccaatacacagcagataaaaatgcaattttctctggctgtgttagtttattatccttgtggttgctattttattctgctttctattctgaaagactccttagactttgttcattaatcataggaaacagttgtgcagcatgccttgacattgagttgaacatctaaaattagtcctcctacaatcagtggttgagaacaggatttcatcagtgtattgcctgtgttaagtagacactgctgagttagaaggaactcccaagcaataagtaagtgatttatgttatgtctgtgtccgtttatttacttacatgtataattaggaaacattattaaacagatgaacaaattgcaacttgttagctcatatgctatatataaaatagctttgcttataaactctgctgtttaatgaatcatttcagaagaaacatacctaggaaacttgagatgataaacatttttttgcatatttgtcaatgttttaattttggggttttttgtttgtttgtttgttttcttttttggtttttccagacagggtttctcctctttgtagctttgtagaccaggatggcctcgaactcacagagattcgtctgcctctacttcccgagtgctgggattagaggcatgtgccactactgctgggcaatgttttaatttgtaaaggaatatgttctgtttactctatacagatgacttctttttctctttttcttcagagttcatataaatctagtcacaaaaatggcatcctggttatatgaatgtctttgtgaagctgaacttgcacagtattatcctcattttactgctcttggccttcagaaaatagatgaattagccaaggttacaatgaaggactattccaaattgggagtccatgatatgaatgaccgtaaacgtcttttccaacttatcaaaatcattaagattatgcaggaggaagatgaagtcctcaatagcccagagcatcctcttcagacaagcaacctgtacaacaagcctcaggaatttagatctggcccccgaagacaactgcattttgattctcctgctgatagcaaagccagaacagccagcaacgaagcgtgcaacttatcagacttctctgtagaggagcagaagtccacttccctgaaaatgctgggacacatgctacctgatgactcccaggaccagacaaaaataagaaccctgaatgcctctgctgctgctgcttatatgcaaacagaaactgacactccactcttttcatcaaattacttttctccaaaactaggaaatggtgatattcctgttattcaaagagtctctcatgttttggggtataactatggaattcctcattcttgtgtcaggtaataatttgtttttacatttttgggagaggcaaagacaaatctctcctttgtgaccagaggaatataagtactctttattcctagtaattgactgtaacatagttagcaagttttgcattaataatcaaggtaagtgggtagaagacagaatagtgaggaaactggagctttccagataaacaactactgctttccagggtctgctgtccatgtaacatgatacacctagtatattcttgaaagcaaagtagttaactggccttctacaaatggaaaaaaaatcacacaagtcacaggattttgttttttgagacagggtttctctgtgtagtcctggctgtcctagaactcactctgtagaccaggctgtcctcaaactcacagagctccacctgcctctaccttctgagtgctgggattaaaggcatgtgacacaaccacccagcaggatgtttttttaaaggccatcaaattcatgagtcagatgccctacagcttacttaaggccagagacaggtagttaaattaagtagttcttaaatcatctgtacaattgaaataggttcctgattttgactgcgattttgttttaaatccaaccctgggaaaacagataggttttggtaattacaaagagtaagaccttttgatcgcaatcagaggttgtgaatcagaatgacagtaagctattttcacctagtacttcaagatagaattttaaataagatccctgagaggtgaaagactcaatagtccccaaatgctaataatgatataatagaaaatatgttttttaaaaatatattacttgttgtattattatgaaagtaatatatatgagttatgagaaaataaattctctctctctctcttttttttttcttttctttcttttttttttttttttgagtannnnnnnnnnnnnnnnnnnnnnnnnnnnnnnnnnnnnnnnnnnnnnnnnnnnnnnnnnnnnnnnnnnnnnnnnnnnnnnnnnnnnnnnnnnnnnnnnnnnnnnnnnnnnnnnnnnnnnnnnnnnnnnnnnnnnnnnnnnnnnnnnnnnnnnnnnnnnnncattggtcttatattgggtaaagttccccaagtatttcatgatcagttcttatattctcccaaactagatgatttaggtttaaatttttttttttattttatgtgtatgagtgtttcacctgtgtgtatgactgtacactgcatgtgtgtccggtgcccatgcaggccagaagaacatgtcaaaaatcctaggagtggagttacagataggtaattcctgagccacatatgagtgttgggaattgaacctgggtcctctgaaagagcagcccgtgctcttaaccactctgccatttctcctgttccaaggtgacttagttttataagtgaaagtacctatagtaatttgaaatacttgttctagcagaggacagaggacttagtactatttttcttctttaattatagattgtaaatatgaaaggtaaaggagagcaaacttttttttttactgtcttttattgaacaacacagaaaaatataaattagaattatttatagaaatactactttccactggtttaacacatcatggtttagaatgtgtattttagtgtaaatattgccattacatttattttacaagtattaagtaatagctgtgatgtctgactctaggtatgaagataattaagatatctgcaggctcttagatgttagggggcaggtaagagatgacagacaaacataaccatttgtgccaggcatggtggggtataccagcaaacccagcactcacaagacagacaagaggctaatgagctccaaccagccttggccacataggaagaccctatctcagaaacaaactaaaaggtacccactaggaacagccagccttggtcacataggaagaccctatctcaaaaacaaatgaactaaagggtacctaaggaaaagagcacactttgctttttgcctcttaacttaaaactcacaaactatgaacctttgtccatgtgactcatcctggaatccctagctgggcatattagtactgtgtgatcctagcactgtggatgcaggccacattgcaagaccttctctcaaagcctaaaaaaaaaaaaaaaaaaaaaaaaaagaaggattaagaattttgtagcctctttgattagtgtcctatgattaggttattaatgctaagcatctagagattttgtcccaaaacactgttaaaatagtggattagagtaaaacataaaacaaaaagtagattttatagaggaacagataataatatgaaaccaaaaagtagaatagattacaaaataataggttaaaactttcttttttttccttgtgaaaaattaagcacatatgcagaaagaccagtaaatccccatatactcatcatcaagtctcatgcctcaaatgatgcattagtttcatattttaattaaaatatgctttaaggtgtcttaaaatcatgcactatttattggaaattttgtttcttgtaaaaattaatttagatcctggcaaaaaataatttttcagccagttggaaggctcagaaaatcagaatttatatgaagcaattaggtaactatatatttttatattagattttttgtaaaatctattattagagtttctgaaaggggctatcaaattttatagtgtaaaggagggaacaatttgtcttgataatgcatccttttacatagaccaaaactattaatcctgataaaaatacctgctttcgttgggtggtggtggcgcacacctttctttactccctggtagaggcaggtgaatctctgtgaattcaaggccagcctagtctacaaagctacacagagaaaccctgactaaaaaaatcaaaatcaaaataataataataataataataataataataataataatacaagagacaaagtgtacataaagcaagaaactgctcctgccactgatctaaattagttaaagagcccatatgagttcagaatgtcctttctgatctacagaggaccagagatgcaggagtggggcatggggaacccatgacagcnnnnnnnnnnnnnnaaattgttctgagaagaaatacatggttatcagggtggggctaaaaaaaaaagtaaggaggctgggaaaatagttcagctgataaaatgcttgccatgcaagcataaggacaagttggatctccagcacacactttaaaagccagtgtggtatgcatgattgtaatcccagcactgggttcatagagacaggtggatggatctttgatgctagatgccagtgacaaattctgtctcagaaaacaaagtggctagatcttgaggcaaaatgacacctggtctacagaggtaatgccaggaaagctacacagagaaaccctgtctcaaaaaaaccaaaaaataaaataacagagtttagatattagcctttttcttctttggggggcaggataaggcaaagagtgaggtggagtaggtaagagatagaaaccagaggtttgccagtaaaaactttctcattgctgacatttaatatggaattgtttaaatgagcttggtggggtgatgtaggcctataatctcagcacatgggaggtgagggcaagagaaacaggagctcaagctagcctgcactacaacagcaagaccttgtctcaacacttgggtttggtggtgcacacctgtagtcctagcccttgggaggctagggtagaaagttagggccagcctgggcttcatagcaagttctagatcagcttgagctacaaagtaaaaccctgtcttaaaaacaaaaaccacaaaataattatattaaatatactcaaaatttgctgacactttgaccatttaaatagttgaatccttttattaaaaattaccgtctttttgtaaacatatatcagacagattacctcagaaaatccttggactgaaatggagaaaatcagagtttgtgttcgcatacggcctaggtgtgagagaagtacgtcgtggagaagttaatattattactgtagaagataaagaaactctgcttgtacatgaaaaaaaagaagcagttgacctcacacaatatattcttcaggtacaatcttttacttactgtgttgcaaactactattatcaagtatgtcagttttctgctttatgtttaaatggttgttttaaaacccagcttctgattcaggtattttggggggggggggcagggtttctctgtgtagttttgtagaccaggcctgcctctgcctcccaagtgctgggattaaagacgtgcgccacctaagcccggctccaggtattgatttttttaatgtttgtttattatttattttgagacaggctcttaacctcctttagaacttacagacatctggctgcctctgcttaccaaatgctgggattaatggcatgtgccactgtgcccagctcttgatttttattctgaattattgatactttgggccttcattctttaaaaatgtagtgtgattacggtatacatagttggaaaactataattcctgcattatgcaatgaagatctacaatagattcacttaacatgtttatgtgaatttttaaatattttttaatgcgcattggtgttttgcctacatgtatgtctttgtaagtatgtcaggtcctttgaaactgaggttacagacagctgtaagctgccatgcaggtgctgggaattgaactcaggtcctctggaagagcagccagtgctcttaaccactgtgccatctctccagcctgtttatgtgaatttaattatgcatatttagcaaaatgaagggcacaggagagagaataaaaaataatttaactaagtagagagtgatggtcacaaacttggtctcctttttcccctgcatcatgcaatatgaacattttggtttcttttttgtttcgttttgttttgtttttgagacaagatttctctgtgtaacagctatcctggaactcactctgtagaccagactggcttgaaactcacagagatcctcctgcttctgaacctgagtgctggggtaaaagtgtgtgccaccactgtctggctgcttttgctttcttgctttgtttgtttgtttgttgttgttgttgttttcttttgttgtttgtttttgagtcaggatctcactctgtagtcctggctgtcctggaactctcccagggtggtcttaattcataaagatctgcctgcttcttcctccctaatgctgggattaaaggcatatgtcaactgagctcttgtttgtttttaaacaaaatctcattatgcagccctggttggcctagaatttgctagacacacgtagactttactaggcataccagtcaaaacttgaatttgcagttgtcctcctgcctctgtctcctgcatgatgggattacaggcatgtgcttttcatgctcaacgtcactgtcagctcagtggagtattgttgagggcagggtatgactctgtagtccaggctggcctaaaaataaaacttgctgtatagcccaagttggccttagaatatttttctgactgagcatactgagtgttgttacaggcaagtatttttatgtccaactcttgagtaatagtcttgtatttcattatggataatatgttgttagggatatgttcccacatttaatatgtaagggtttaataaaatagtgttcagacacaaaaaatttcaaactgtctataaaaaaaggttggtgttgaaaagaatttattctaaggttgtaccaattctcatagagaaacaacaaactctacaaatgagagaaagtcatataatccatagtatgttaagattttggaattttaggggctaaggaaatgactcagtgctttcagtactggctgcacaagtgtaaggagctgagttcagaccccagcatccacataaaaagttgggcattgtggcagatagctgtaaccccagtcctgggagatggaaacaagagatctgctttctgactagtatagtttattgatgaacctcaggtttagtaaactatcctatttcaaaagatgagattcaaagtgacagacagactcctaacatcaatccctggcctttccatgtgcacgaataggtatatacacctgtatgtacacacaaggactttggaacgcgtaatttccgttactatgaattgccttcttaaaagagtcttccttcataaacattcatattgaacattggttctttctcttgttcttttgcaaaaccctgtgactgataatgagaaaaaaagtgtggtgattaatgggatgtgctagcaattcaccttagtcagctgagatattattctattgcagtaaatcctgtaacactgaagtcaaattgtagaaacttaccccttcttcaaacttgcattgttcttccaaaaattgagtttcacagtgacatttagagtaatccaatagtctctctatgggcaataaattactaggccacagtacagccaacccaatcattttaacagcttcatcgattgttgatcaatgcacagtctattaggtttcagtgggagatacttacattgaagatagtctaaatgaccaattagttgtaaggctagttagttccacagctactatagccagagtaatcgctctgcccgatcaccatctgcccaaggcttccttaatgatgcttcagtcacagtaattccctccaagagtcatcatattatcttttgtatttttccattatccccaaacacaataaccttacttctttgtcactgccattgatcaacatttatcgaatacccatagatcccatggcattttctctgctgttgaactttggacctttgatcttataggtcagagtccttatctgtcaatgctatgatataaaaatactggatttacatcctctcctttttttccttcctcaaaaagaagtccatatcgaacttggtgctaaatgaaagtgatcctaagtcctttaggttttattttgaaacttaactcagggagtaaaacagaaaaaatgtatatgtagttaaatatcctatctccttcaaatcaagtatatctgccacttatccattaaaaattttatacaagtgtagccaggctatggtagtgcattgagaggtagaggcaggcagatccctgtgagtctgaggccagcctgtctactgagcgagttccaggacagcctccaaagctacatagaaaccctgtctccaaaccccctcaaaaatttttatacaagcacaataagtaaaagcaaaattattttcctttccaaattattttttgttctattttctccttttgttttacttttacagccccccccataatagaaatttaattcagggcctcatctatgctaggaaaatattttaccactgagctgcatcccaagatcttccctactttccagttttaaaaaattattttatttacatatttattgagggaatgtatcacttcctagtccgctggcttggaatttcctttgaagcccaggctatatacttgtggtcctcttgccttggcaactcaagttctgagattacaggcgtgtgctacaatgccttcttaatccttttcaatttttagggctctagggagttggctaggtgagtaagagcactcactgctcttccagaggatttgagttcaatcccagcacctgtgtcaggctgctcacaacaatgtataagtacagttccaggggatctgacaccctcttatggcttctttgagcacccacactcatacagtagacactcatatatatcagtaaaaattaatttgtacagggactctaggacttaccatattggcaaaaggcctgtgctttttatttcattttggttttggtgtgtgtttgtttgttaagacagggtctcactatacagccctagctgttctagaacttactctgtaggtcaggctcacctggaactcacaagattcccctgctcccaagtactgcctcccaagtactggcattaagtgtgtgccaccatgcctggcagggctatgtctttaatttcataagacaaaaaggaatacattctcttttccagaaaggcacttcttgtggttcattgattgagttttttagggagaggtgagtaggggtgagacaggatctttcttaccatgtagccctggctggactagacctcactgtaagagtaaactagccctgggtttaatccacagcaccacataagccaggaagggtggtgcagtcatgtaattctagcacttcggagacagaggcaggatagtcacaagttcaaggtcatccttgactgtatagcttcaaagtcagcttgggacacacaaagaccctgtcccaaatagtaataacaataatcaaacagatccattaaaacaaaaattatgactttcccaatagctaaataattaatagctaactcagtatcataagacactgaagatggggcaagtacaacaactatcagagtgcatattcatttatttcacccatactttctcttaaagctctgctaccagataggtcatctgtgtatttgtgtagatcaaccccttcaggcatggggtaggataatgtcttatctttgggctcctgcacactcctgttagaatatacgtccaccagctaacagtggatgtttgtggaactacaagttaagctatgtaacctgcagaatgaaaattgatctctagaattcacacacattttccttgcttggtctataagataactcttatagaattcatttctctcccagaccaaagaggattgactcactcttgccttcatcagtttacttctcttaagagaaaacaaaagttgtctactttagttgttacactgtaagaacatgtaaggacaaaagtggaaagtaaagacagtcatttaacagttactagttattcgtttttctgagtttattagtcagttactattgctttgaaatgtgtttcctttttcccatgtgttaatagaataatggtggtgaaaatacaaatgtatttctataaaaatcaagtttatttttcagcatgttttttattttgatgaagtctttgatgaggcttgcaccaatcgagacgtatacctgaagactgctcacccactcattcagcatattttcaatgggtgagacagattgattccttctttttcttttagttttctgttctctataaactgtgttcctttactaatacgtggtgcttttctagttcttttgaattaaatataaatttatgttgtcacctagatttaccaaacattgagaaatttgctacaaattttccttttatactagagagattgtttctctgcttcctaggaaagtaaaagctctcaatagtttagtttgtcagtatcttcagaataaaagatgtaagtggttataattagcttgaaccttggcatctttaagcacttgggaagctaaagtggaaaaatagacacaagttcaaggtcgacctggtctacacattgagctccaagaactctaggccagcccggattatagtgatagctgggannnnnnnnnnnnnnnnnnnnntcattttttcctacatgtaaagcaagcattctacaaactgagctatatctctagctcaagttgtgtttaaagtccttatttccttatattcaatagttatcttatgtagtattatcagttctgtaaaagaattcctttaagaaaacacatcgtgaggctggagagatggctcagagattaagagcactgactgctcttccagagagcctgaatgttcaattcccagcaaccacatgatggcgcccaaccatccattatgagatctggtaccctcttctggtgtgcagatatatgttatatacataataaataaataaaatcttaaaaaaaacaaaataacaaacaaagaaaacacatcatggtctgaagatatttttactttttgtgttttcataatataagcctttttatagattcttcttaaagaattatatgctagatttcttcaaagagtctgtttcttcctgacttgtttttaagcatctctatgtaaattatcacttctttaaatatttataagtaattctaattatttttcccccagaggcaatgccacttgctttgcatatggacaaacaggtgctgggaaaacctataccatgataggaactcatcaaatcccaggattgtatgctctggccgccaaagacatcttcaggcagctgaaagtatcaagaaggaacctctttgtgtggatcagcttctatgaagtctactgtggacagctttatgacctcctaaatagaagaaaacggtactagataagagtgagatgctgttctacatgtacatcactgtttgagccagagctccacagatcactctgctcacatgactttaatgaaaggcatttttgtgaaatgacagtttcctgcatgggatgttctttcttccccttccttcccttttctgctttgagactgtctgacggtacagtcctgtctggtataaaacttgctgttttgtgtgtgcaaccttgaacttgtgatcatctgactcagcttcccaagtgatggaattaaagatttgccactaaacttaacattctttaaaatgttaactcagctagagaaaaatgtaaattagccatccattcatatctttttggtgctggggattgaacccagcattttacatatgtttgcaggcattctgctattgagctacatcttcagtttccattagtgttttttagaagaaaaaatttagtatctcccaagactcatcccccttttttcctgtgaaaaagattttagtttagaaagtcaggaaatcagcatctatttaaatattttccctttaaataatgttagtgtaaacttaatgacggttttctgaaattggcaaaaagatttctcttcaatttcaattcagttttttaaatttatttttattttatgtatgtgagtatttagcctgcctatatgtctttgaactacatacatgttttgtgcctatggaggccagaagaggggagggtatcaggatccctggaactgcaattacagacagttagctgtgctgtcgtgtgattctgggaatcagcctgaggtttttttgtttttgtttttgttttttttctcgagacagagtttctctctgtagctttggagcctgtcctggcactcgctctggagaccaggctggtctcgaactcacagagatccgcctgcctctgcctcctgagtgctgggattaaaggcatgcgccaccaacaaccggctcaatctgagttttaaattagattttaatttctttattttgtaggcacatgtgtatgtgtgtgtatgtagatatacttgtgccatgatggggttgtggaagtcaaagaataatttgtaggagtcatttctctctctactgtgtgtgtctaagacagtggttctcaaccttcctaatgcttccaccctttaatacagtctgtcatgttgtcaggaccccaaccataaattagttttgttgctacttcataactgtaattttgctattgttatgaattgcaatataaacatatgtgttttccgatgatcttaggtgacccctctgaaaggatgattccatcctccccccaaaaggttgcgacccacaggttgagaaccactgacctaagggatgaaactcatgattgtcaagcttgatggcagaagctgtcctacctccaattgctcttataacctaaaagtaatctataagtgtatcggtggcctattatatatgtttctagaataaacatgtgacttaaactgaacagcaggcaacaaggatgtgaagggatctactagctggagcataggaaggtgaaggaggactgtcacagcagggtaaacaaaccctggcccatgtggggaggggtgagtggaagtgaagtgtggtggaaagctagggaaggtgtgcaagccgctgtggaggtggccaatgtggcattcaggttcatgggtgggacagttcctgttgagtagggagaccacaatgggaaaggctccagcagggagggcactagggttttaggtagcataactgaagaaaccagcagtgtgtgtagacaggtcattgcattgttgaccattccaacaaagatctatgctggtgtgtcacagttgagagaaaacacagtgttcagggttcatctctgaaacataactgtcaaatgaaggtagtgctactcagtgaatactttggacaagagttacttttctcattcaccatctttgtagtggcgtttaagtctctatgtagctcaattgtggcttttctgtcaaccccaagcaccctcattaaaagccctttccaagtggagagtgtagttgtgtggtagaacacttaacctgtgtaaggccctgaattcaatcctccgtataaagagagacagagagacacaccacacacacacacaaacacacacacacacacacacacacacacgagaaagagagagagagagagagagagagagagagagagagagagaaatggtagcacagaccttgtaatgctaacacttagcaggctgagataagaggatcacattttcaaagacagcctggactacacagtgaaactttgccttatctcctaatcccctcaaagctctctgtagtcataatgcctacttcttttcagtaaaagtcactattgtacatgtgattgtgtgtgtgtgtgtgcacgcgcacttgtgtgtgcatgaactcaagtgtgtcttatgaagagactatccagctgtttcagaatataactctttaatgaattatctaaattacatagtgagaccctgtatcaaacaaaacaaaaatatgtatcaggactccagttacaaaaaaccccagccctatactgtatttagagaaatcattgactcagataacttggggctaggaaggcctcagggacattctgctccttgctcagggatataacatggttaatttgcatctctctgttctacctctatttgctaccttcatcctgaagctagttcttgtagatagagaatagctgctgctgctcccaggacttcatgttttctcttcaagagagtaagtggagaccagagccgtagttgattagacagcaaagatcctgcatccaccattgcactgattactagccaggactgtgccatccatggtttggaatatatatgggttttatgttcattctttttattttaatcaagatactgatttgtttacaacaaggaaggaccaccatggtaatctgaaggtagggctggggaggggaagcatatccctcccatccaaatggcaaaactatgtaatgggacattcgtaggttttgagaaagcaagacaaccacagtctttctcatccacaggctttttgcaagagaagatagcaagcatgtggtgcagatagctggccttcgagagctccaagtggacagtgtggagctccttctacaggtaattcattcttcctccttacaacacacagcagcctcagcccaggggaaacacttcattttgcttcctagcaagtgtgatggctcagataaaggtgagggggggaagggtgtagtgatgccactcacatttgtgaaatgtgagccaccttttgaagttagcttatttctccagtgtcctagagtgggagacagcttgtggcagaaacaaatgcatggcaaagatgctcttgggccagtttcaaaggctgcaattataatttctgtggcagtgggcttaggagaaggctgatagaggcaagtgttcttattttaaataaaattttaataagcaatactttcacatgctctcaaaatccaaagaattggaaaatacctgtttcattccctgctcccaaggcaactaattttattagtttttgtgtattcttccaaaggatttttgaagtgtactttattaaaaagtatccatttattataacaaatataatatttgttcactgttaaatctaaacattacaaaaatacataaagtggtagaaagtaagagccctttgagtctccttaacacacagaaacagtctctgtgatatccactattaattgattgttgcttttttcttgtcagaggtcatttattgatttatgtacaaatatatttctagtgaaccttcttttattgatcctcaagcctggatttcttgggggagcagatgctggggatcaaacacaaagccttacactaacaagcactctgccaccgagctctgggctatcctggctcaaccccagctttacattagatcattcatggcccttttctttgcttaaaaatatagctttttttaataaaaatttattttgtttttttttttttaattttacatgtcaatctcagttctccctccctcccttcatgctgctcccctcatctcccccttaccccatcccccatctgctcctcagggtatggcctccatggggagtcaaagcagtctgttggatgaagcctgactaaggtcttccccccagtgtctaggctgagcagggtatctctccataggaaatgtactccaacttttttttaaataaggtcatatatagctcaagctggcttccaaggatgaccttgaacttatgatcctcagatctcaagtaaaatgattacaggtgtgagccatcatgtctagctctttgtttgcgtttttgtttgagacaaggtgtctatgtagtcttggctctcctggagctcactatgtagacctggcttgtcttgaactcacagatatccacctgcctctgcctgccaagcccagggattaaatgtgtaaaccaccacaccctactctcattatgttttaatgttaactgcaaatgtttactgaacagttaactatctaacagatatttggtgagagatttttccccccaaatatgatgtgattcatcaccttaaagtaagatctgtattataaagcttatcttccagatgagcaaactgaagctaaaattggaagctggtcatcagagagccaagggctgaaagagccagcttccagctcagatttatcaactctgaagcaccgttttaaccatacttcattatctattgaggattattagggatcagtttttcttaagaaagtaaaaacaaatattattcactgaattaatacatttatagcagtgtcttctgggttgtttgcttaaaatcgaacatttacagactgttttaaaccacaaataatagggtgtttggggaattttgttactgctttttcaaaacaaagtattaaggatctgctggtagactggagacatggctcagaggttaggagcactggctgttcttccagaggtcctgagttcaagtcccaggaactacatggtggctcatctataataagatctggtgccctcttctggcatacaggcatacatgcaggcagagcactgtatacatagtaaataataaatcaatcttttttttaaaaaattgctggtaatggtggtgcatgcctataatcctacacttgaaaagctgagataggaggatcataaaccaggccaatctgagctgtataatgagacaagaaaaagaggggagctgaagaggagacttggttgtattgggctggagagatgttcaacagctagacaggtcgcaaacacttgtaattccagtttgtgttagatccaacacctctggcctccctgggcacctgttctcaagtacacatatgcacacacagataaacataattaaaaataaatcttaaatactgtgtgaaatggtgaggcaacttataattaataataccttagtttctaagttttttttcccaagataaatagttaggttttgctttctctgagggttgagcatatttgtgtgcttgggatctgaagacattcctgtgtcttgggatctgaaatctgaaggaagatagcatctgtgtggctgttgtagcagataaaagcccctttgtacccgttacaaaggcaggcacagaacaagctgtccagaatgccctctgctatggagttggaaggaaagtgtttctctcacatgtattttttgtcatcttcttgccctactttccccagacattccttgaggagtttgaggtgactctagtctttgggattcttaaatggggaaggaacaaacaccttagggaaatctcttttccatacttggagccacagctgtgctatttcctccctgcaatgctacggatcaaacccagggccacacacgtgcttagcaagcactctgccaattgagctacacccccagccccacaactgtgcgtaaagggcagtctgtgtcacatgagcctttcctggaaaagtatatggcattgtcttatcctaaagtactgttccttaaaaaagcatgaagatttttgttaacttgctactgtttattgtcattgatccccctagtctacaaaactacaatcaggaagacatcagagatctaggtagaaagttagaatgaattatgcatacctgatacagttactctcataaacatttactgactggaaagcacagcacttacttacttaaatgttacacctactctctcagatgtcattgttggtgccactcaggtgtcacccatgtgtttgttcaagtgtcatcttcaagttttaccctcagttaacgctcaggctcactccagcatggctacccaatactgctggcacaactggcagcttcatttttcaaacaggattctcctttctcccagaaatttacccttccaggtctctgactaactcaactcaccagtgcagacaccaggactgaactaactgccttgacatactgcccatatatggactcaagatttttttattattcttaaaaaaaagaaaaagaaaaaaaagaaaaaaaactttgtttaggggagctagagagataactgggaggttaagagcactggctgctcttccagaggtcctgagttcaattcctagcaattacatggtggctcacaaccatccattaataagatctagttccctcttatgccctgcagacaaacatgcagacagaacactgtatatataacaaatgaatctttaaaacaagaaagaacctatttatatttattttatgtgtgagtgttttacctgcatgtatctatgtgatgggaactgagactgtatcctatgccagaggaacaagtgcttatctgctgagccatctctccagcacctcaagattttgttgttgtgttttttaaattaattaatttttttttggtcagtcaattagggatttccggacttaaatcattccaatcgtttttttattttttaaagatttgttttggggggctggagagatggttaagagcactgactgttcttccagaggtcctgagttcaattcccagcaaccacatggtggcttacagccaccttgaatgagatctggtgccctctgctggcatgcaggcagaagactgtatacataataaataaataaaaatctttaaaaaaaaaaaaaaaagatttgtttttggggttggagagatggctcagcagttaaagagcactgacagctcttctagaggacccaggttcaattcccagcacccacatggcaactcacaactgtcttgtaactccagttctagaggatttgacaccctcaaacaaacataggcaaaacaggcaaaacaccaatgcatacaaaaataaattttaaaaaaagatttattttcatttatgtttatgtgtatatttgtgtgaatttatgacgtggttgaaggttcccacagaggccagaaggtatcagataccttggaactacagttacagaggagtgcaagtctccaccccttgtgtggaagctgaaaaccaagctcaattctcttcaagagcagcaaactcttagccaccaagccatctctgtagcccaataactactttatatagtcaggtttttttctcaagacttgtgatacctgctcatatttttatcattgctttgtgaagatccatacaggaagatgcatccttggtggatctcagttgtgtatggaaggtagagactgtacacagtaccactgcttctcagatcaaggatggcatgcacagtactgtgccagaattttaaaaatcagggtatgtgaacatattacttgcttggacactgggggcctgagacttatcctcccctcctccactcctttgtggccaaaaaatcccacttagccttgactcccaggcaaaggtaagggagttctggagtcaagggaagttacaggcacatgaaataactcacttccctgttcctgaatatcaggtttggcctccttcatgcctgcatcctggtagagcaggtggatgtgatcagtcattctgtgatgtacacttctgtcctttgcttcagttactaagctagatgaatgctatgagaccttgctctgagccaagttttgccctggggatcttagttaggctagatccatcaaagatattaaaaagagtgcataagattaagaagtagattagctcttgagccattgaatgttctcccacaagattagtattccacattgttctcactgctgttggtacttactctatgtgatttagtgtctgggcagacttccacctggacatcaaaaactgcattatgctaacaaaattacatgcctagtctctgctgcttacttagccaactttctggagccaaagggcttttgttttctcccagaggaagtcattctgtgcattttattttcaggtgatcttaaagggcagcaaggagcgcagcactggggccactggcgtcaatgcagattcctcccgatcccacgctattatccaaattcagatcaaagattcagtcaagaggacatttggcaggtgagctggaactatgtgcagaattgcattgtctgtctttccatatgtgactttgaaataaaaatgctctacatgagacaccctgccaccttggattttcattgcagggatatagagtaagcagtgttagccctgaaataaatcattgtataaagtgccatcagttgattaaccatgaagtaatgacctattgttggtcaacccgaagttattaaaagggacattgattacttctaaagtgaaacacagtatcagcagagaaacagcaagttctgcatctcagagagcttgcaggccataaatgggggtggggatccattcttcttgaaagaagatgtaagacaattgggtacattcattgcttttctggtgctgtcttagcaaactctgccatgctgatggatgagcctatctcacctctgagtaatgagtcgcactcttctttttcatcctttcttgttagaaaatagccaatagaactttctatttaattatctaaatagtcacctaactgatttgcattatggtcacttagccttgtggggaaatgctttattaatttcagtcatacttcctcacaaacgagtagagccaatagacatgtctaagcgagcagtgctggctccagctgacacatcaggatcttgtgatgtttttggaagactaacaataatgtcctttacttcccgaggatgagccatactccatttcttcctgaggtcacaaaatgtcactattatgaaaataaaccaaagccccaaataagtcgtccctgctgtgtctttttttctaggatctctttcattgatctggctggcagtgagagagcagcagatgccagggactcagacagacagacaaagatggaaggcgcagaaataaaccagagtcttctggctgtgagttgtttggaatctaaaagtcgtcnnnnnnnnnngccagttgttgagtctgggtaaaatcaggtggttattgcgcttgctgtcccctgacagtggaagtcctgagctggactgcaggtgcaggcagcctctgcacaaagctgttcctctcttcttacccccttgctcttttcctcaatccctaccagttagtcagagccatgttctgcaattgctaaatggctaagaaagctttttcttgctccctaaaatttaaactatactttgggaatacaaacatagaaaagtagcatatctttcagacacttgtcactcagtttcaacagttatcaacagttgaaaaacttaaccagggccagggatgtggctccgcaggtaaaggttcatgctgcctagcctaacatctgggtgccgatctctgggacccacatggtggaaagatagcaactcctacaatgtcctctgacctccacattgtgcaccatgacacacatgccaccacatacatgcacacacaaaataaatataaaaacttaagaagctagaggcagccaaatctctattatgagttcgaggccagcctgatgtacaaaacaagttccaggatagccagggctacacagagaatccctgtctcaaaacaaaacaaaacaaaaaaagaacctaacccttcccttagttggattactttattttattactgctatgtatgtatatgggcacatacatggcaggtgtctacaggtcagaggacaacttttgggagtcggttttctctttccaccctgggttctagggataaaattcaggtgggcatgcttgtgtggcaagagcttttgtccagtgagccatctcaccaactcctggttggatcaaaggaaaccctactttcaaaccattttataaatactccatatatctaaaagaaaggggctctttaattctttaatgtatccacaataaactttctcatactcttgataagtatttaaaaatctctggttaccccataactgtctttcacagttggcttaggaagatgaagacactttcctcgtcgctttcccaggcctgccttgtttttctgtatcagcataatttttttttagggtggaggtggggtggagtgggtaaacacttgcctgtatgttttcccacattctagacatggataactatattccatgttgatgtttaatgtactagtctgttctctacatttcctaaagttggttaagatttgtatatttactgttcagttttgctaggttgtttgttttttaatttatttttcctgtatgggtgttttgctacatatatgtctgtgtaacatgtgtgcctggtgtaggcagaggccagaagaaggcatcagatcccctagattgaagttacagacagttgtgagctaccatatgggtactggaaattgaacctaggtcattgtttcattgttatcaaaagacgcatacacagtatcatcccttctggaaattttccaatgctaaaaatggtagatactagattgacatttaataaagaaggatattgctgagtatggttatgtacacctataataacattccattgctcttaacagctgagccatctctccagcccccattgtagctagtcttatttaaggtgtcttcaaagtaaagtacacataggattttgaaatttgttatcaaaacaacatataaaatatctctgtaatatagtcccatatttactatatccaaaagtaatactttgaataccataggttaaataaaatataattatcatttgttctaccagtcatggtgtacctttagtgtttctgtatgctagtcagtttggttttctcaactctgcgtggcaagtttggcaagtactctcaccctcaccttatagattagggtgcaggtgcaggtgggctgaatgaaccagtcaagtgccatggcctttgaccaaaattgtgtgattctaatatcttaactatagtccagccaggaacagagaatatttccttgctgcagtccctctttaaaatgagatggtaggggatattgagatggcacacacttgccataaaagcctgacaacatgtgcttaattcttggaacccatgtaaaggtgaaagaaaaggactgaggccacgaagttgttctctgaccttcacatgtgcaccatcttgtgtacaagcatgtatgtgtatgcacaacactacagtaatagtatcaaaagaaaaataaaggagatggtagtgtgaagtaatttctcagaacttaggtttttactgctgtgatagaaacaccattaccaaaagcaacttgggaaggtggatttatttagcctacaggtgacagtccatcatcaggggaaattaagacaggagctcctcaggcaggaacctggcggcaagaactgtagtagagaccatggaggtacactgggtactggcttgcctccccatggctttctcaaactacttttttacacaacccaggaccaccagccaggggtggcactacccacagtgctctgggccctctcatatcactcattaatcaagaaaatgccctactgatttgttgataagccagtctactggaggcattttctcagttgatgttcctcttcccagatagctctagcagctgaaatctagcttgtgtcaagttgacaaaaaacaggacagaaccattctgtgtctattgctccaatttctccttccccaatcagttcatacttaaatctgcacttgaatttattcctgtaggtatacatgtatgagggggagaagaaagtagattaggcttgttctctacttgagcttgctagtagttgtgaagagggaaagaacgggtaagccaggcttaccactgcatgagcttagactcaggactcaagtctgggttcctgggtccatcagtctcactatggactcggggctaatctaggatcacagcctctaagtttaggatccttagcaagacagcacagaatggtgtttttccaatcttgcttggttttacttgttgaacaggaaacaacagggcatttgaccttctcttaggaaaaattcccaagtgtagtttgcctgtttgcttttataggaccttgagatttgttttaatgttttacttatgtgtatgtgtgatgtgtgctacatatgtttgggtgtctgaagaggccgggagagggtgttagatgccctagagccttgattgagttaacaggtggttgtgagctgcccagtgtgggtattagaaccaaaccctgtcctctggaagagcagccagcactccagtttttcaggacagggtttctctgtgtaagagccctagctgttctggaactggtacacctggcctcgaactcacagagatctgcctgcctctgcctgcagagttctgggattaaaggtgtgcgctaccactgcctataactcagtcagcactcttaactcctgtgctttatttaagaaaactaagcttcctgcctggagatatgtctcagaagttaagagcactggctactcttccagaggattagtgttcaattcccagcactcacatggaggctcataaccatttataactcctgtcccagaggatctggtgccttcttcttgcctgtgtgggcactagacacacactgacatacatgtaggcaaaacacttgtatatatgtaaagcaaaaacaaactttaaaagagaaagaagcttctaatagatgtagcggctgactttcctcactttttttgtcatgttaatgtgtcgttcattctcccactttacagctgaaagaatgtattcgagccctggaccaggaacaaacccatacacctttcaggcagagtaaattgactcaggtaaagttaaacaaaagccttgagattgttctggttcattcgttgttccttcctccattactttgttaatttagtcaagcatccactactagtaagacatgatgctaaacatagctaaacatattgggagaaggaatttaggtgtcattttccttccaggagctctcagtgtactcaacagggatatctgcagtgccggggcagctacagtcctaagagggcatccatgctcttcttgttaccacctgttgtagtgtcattctgttctgtgatcaaatactctgtccagttcatacttcatcactgaggagagtcactgcaggaacatgaagcagaaaccatggagcactgtcacttactggctcactctcgctcccaggcccatgcttcctcatacagcccaggactacctgccccgatggtgcagctcatgtacttgccccgatggtgtagctcatgtacctggctggggcctcttacctcatttaacaagatagtcacccactattacccagatagtcaggcagatctgatctgagaaatcccttaattaagactcccctctaccaggcagtggtggcacaggcttttaatcccagcactcgggagacagaggcaggtagatctctgtgagttcaagaacagcctggtctacagagtgagttccaggaaagccaaggttacacagagaaactccaaaaaaacaaacaaacaaaaccaaaaagactcccttctcagatgactgtgtcagtttgacaaaactaaccagtataccacctttccatgttctcccagtgtaaagaacctatcttactgcaggggtggtggcatcttcctgaagtccagctactcaggatgctgaggcaggaggatcacttgaacccaggagttcaagaccagcctggatacatagaagactgtgtctcaaagcataaaatactgggtgtggtggtgtgtatctatgttcccagcaacaggctgaggcagaaaacttgcttgagcccgtacactggagatctctaggcaatataatgagatcctaactgtctacccctgaccagcaacacagtggggactaggccggggtgtagctcagtgtgtgcttgcctgatatgcaccagatcctaggtttaatcctcaataagggtgaaaatacatatatacatacatacatgcatacacactatatatgtacacacatgcatatactacatacatacatacatacatacatacatacatacatacatacgatttagtagttactgagtcttgaacttgggatcctcctgcctcagtcttctgagcatctgggaatacaggccatgtttattctaagtaatacaaatataggaacctttctctttatattgtggtgaaaattactggaaagcaccagtagatacaagtcaggtatatatgagctgcagaggagcagccaaaggagagatttgcctaggaagaaacagatgtaaaagttgttatattgtcttgagctccttccaatattagatcctgtacacagggaaaaatagatctggtcttgggaggccaggaggaagtccttggatgagagcctacagtagctccaccttagtcataattagttctctctgcactgaatgtaacttctctcatttcaactatgtgtgtatgtgagaatgtagtggaatgagttcagatgcctgcagaatctagaagaaggtgcctgatcccctggaactgtagtttcggatggttatgaaccacctaatataggtcctgggaactgaacctggatcccttggaagagtctgaagcactctgaaccattgagccatctttccaaccaagtaaagtttctgctcatacatttaaccactcttgactctgaccttcaactttctgtttttaagttttcatccccagaaaatatgcttctacttttaaaaaggaataatctcaacaacacatataatatagaggcaagcatggtgtcacatacctttaatcccagcactcaggaggcagaggcagacagatttctgtgaatttgagaccagccacatagcgagtttcaggcaagccagggctacacagtgagaccttatttatctccacttaggggaaaaactagtagaggataaaaggtaccctaaagtctaatcgagttgacaactaaagttaactattgtagtagtgaagtagggaagttcccacttgtggatcttaacctggtcaaattttcatcagactttcttaaacttatgtacaaaaatgttggactttctcttaaaactatttttcctttatatttatttgtgtgcagggttgtagatgagcatgagttagttgtacatatcttctcccctgtacactcagaggccagaagacctcaggtgtcctgctccgtcactttctttccaccttttcctgtgaggtagaatctctctttgaacctggaactaggctggtagtgggcaagctccatcaacctccatccctactcctcaacaacactggattataggtgcttacagctatgcctggctttttacatgagggaattttttttttaagactttattatgtatacaacattctgtttccttgtatatctgcacaccagaagagggcaccagatctcataacggatggttgtgagccaccatgtggttgctgggaattgaactcaggtcctctgaaagagcagtcagtgctcttaacctctaagccatctctccacatgagggaatttgaactcttgtcctcatacttgctctgacccactgaaccatctcctcagcaccattaatattagtttttctagttgcttatttgtttctctgactgctggtataaataccttttgctttgtttattggttagttgtatttcttattccttgttttagatttatttttattcatgtgtatgtcttgcctccatgtatggctatgtaccacatgtgtgtctacaaagaccagaagagggcctcaaaatccctggaactgaagttatagatgattgtgagccaccacgtggttgctgggaatcaaacccagatcctctgcaagagcaacaagcactcttaaccactgagccatctctccagtctagtaatgtatttcttctttagtgaatagagcaagctgtggccagcatcttcacacacaagtaatcaatattccctttgtttattggcatgtctcttgatttgacaggtcctgaaggactctttcattggcaatgccaaaacttgcatgatcgccaacatctcaccaagccacatagccacagagcacacactgaatactttgcgctatgctgaccggtaagttggctataggatgtcaggttgtgtcagacgtgatggcacatgcctttaatcctagcacttgggaggcagaggcaggtagatagatctctgtgagttcaaggctagcctggtgtaccaagtgagtttcaggacagccaggggtacacagtgaaactgtctcaaaaaccaaaaaagaaaaaaaaaaaaaaaagtcagattgtgtgtgtgggttacatgtgtttgtgcacttgcctctcagatatgtagtgatctggcattcaactccacagccctcttcttggagatactgtccagcattttgaaaatatgaccagtgagccctacatttgtgtgtgtgtggcaagggaaagatggcacatgtccctgttcaagaatcaattggcattgattgatcaatccgggcagtggtggcatatgtctttaatcccagcactcgggaggcagaggcaggtggatctctgtgatttcgagaccagcctggtctacaaagccacacagagaaaccctgtcttgcaaaaaaaaaaaaaagatactgatgggggctggagatatggctcaggggttaagaacactgactgttcttccagagattctgagttcaattcccagcaaccacatggtagctcacaatcatctgtaatgtgatctggtgccctcttctggcatgcactgtatacatgataaataaatgaataaatgagtaaatctttaaaaaaaaaaaaagatactgatgtgatcagtatcttctcaatgtctactaggaaatggaatactaacctagtgtggtaggctcagtaagcttttcttctggctgaccacagcgctgtttgtaggagcatgtaggtccagaaaggaccaatctggacatgtcaataaagataaaggcccaaagcaggggacgacttcccaagaacttgttaaaagttagtggcagaagtagcacctctgtaagaaaaattgcaggaggtgtggggatgtgtggaagtcagaggtagacttctgatagtcagtgccctcagatgtcaggcttgggcagcaagtgcctttaccactggaccatcttgctggtcttaagactagcacccatattaactgtttggccaggtttctctctgaagggactttggtatctgccaacatccctcccctctctacttacaattagtctcttacagaagtaagtacatattataaaaatgttttacattatgtatataagtgttttgtttgtctgtatatatgtatgtgcacccatatatgcctggtgccagaagtcaagaaggcatcagatcacctgaaactgtagttagagagggttgtgagccaccatgtgggttctggggaccaaacctaatagatcctttacaaaaacagcaaagctacacagagaatccctgtctcgaaaaaccaaaaaagaaaaaaaaaaaaaaaaaaaacaatgtggtgctaagttagggggatgctgggaacacatcatctttcccttagtaggactaacacagtctgctcctttttggaggttttgctttcttgactgcccagcagatttagggaaattcatcttcccagagaagcctggcagggtttttgcaggacaacaggagtctgtgagactataggtgaagagtaggcatgaattcctgagttggcctatattcaggacccatggcaggcactgcatgaatatagcaagattctgattgctagcctgtcccccacatggggctgtggtgatttgcaaacttccagtcacatccacatcatgttttttttttttttttttttttttttttcgagagagggtttctcttgtgctttgaatggaggctgacctggaactagctcttgtagatttggctggtcttgaactcacagagatccacctgcttctgcctcccaagtgctgggattaaaggtgtgcaccaccaacaccaggccaggccttttcttttgggccaccaaccacctcccaaatcatgacacggagactaattattagttatgaatgctcagccttagcttaggcccatttcttgctgcctcttataacttaactgtttctcttcttctatgttttacctcagggctttttatcttccttccttccttccttccttgtttccttccttgtttccttgtttccttccttccttccttccttccttcctttccttccttccttccttccttccttccttcctttctttctgcatatcttattttcccgctgtctccatggctgggtggctggctggctgccaggcttctggccctgggcatgtacctttctttgtccctcattctcttcttctcttgtgaacctagatatctcctcctacttattctctctgcctgccagcccagcttatccctctcctgcctattggccattcagctttttattaaaccaatgaggtatcttaaacaggtaaggtgaaacaattgaagcacatctttacataactaaacaaatggagcataagcaaatgtcacacaccttcacatacttaaatatcccacagcataaacaaatgtaactaatctttgcctagttaaaataatattctgtaacacccctccccagagtaagaaagaacttatagtccttgccatacttcccttgtttgttgttttaattccctgaaaactgtaggaaaggaatcacagatacagaagaatatatagttaatgttaaatggttatttccagggtgaaggaactaaagaaaggtgttaagtgttgtgcttcagccaccagtcgaaatctgacatctgcaaattcttctccaaaacgaattcaaaactcccctgttgccctgtcaggggacaaatgctccccaaaaaaagttaaactaggacttcagcagtcacttactgtggccccaggccccacaagagttaaagaccacccttttgccagccatgctgccaatatcccctttgcctctggacctaaaacccccaataaaaggggtagctctcgagggagtcctgccccagagtgggatacaaaggctagccctttgaaaggaaccatgaggtctggccatttgatcaaaaagggagcagaagaatcagcaccattgtgctctgagaaaagtcaaattgtcagcaagactgccattggatgggagagcagggcctcaggctcaagggaaggcctacttcgtatcaggatgcctgccagagggaagaaggtgcagccagtacagccagtgcagaagcagctactgtcacgatctcagctccctggcaacagccaccatttagaagccagtcaggacagcaaggtgggcacacctgacatgcttgcccctgaagcttggacaaactctctcccccagcagaaggaaagggaggaacatttgcggttttatcaccagcagttccagcagccaccactcctcaagcagaagctaaaataccaaccactggaaaggcttttatgtcagcacaggccctcagaaggtcagctcccaaatgagaccatttctgccctccactctaatcctgagagctatgatggagcccaggttgaggaccaggacgacagtgatttcagtgaggattctttctcaaacatgcagaagaccaccttggagaagagcggaagctcattcttcctacatcagaagagggaacacagccctgaggagcaggcagcagaaaggcagcagtgtctgcatttcagctctgagacagacagtaatgacaggatgccagctgacatctgggtatgttccaaggaccccatcataaaccatgcgagaggagtactcggtcagagccacagcccaagtaagctgtgctccgtctggagcaaggaagaagactctgcctcctcagggccttctcataaggacaacctggcccagaagccttcctcctcacaggtaggttttgtgcatcaccaagaaatgggtgaagctcaagcctttgacatcaggctggaggccttcagaagtgaggttcctgggcaggctgagggcagcttgccatccccagaaaatgggctgtctttcccactatcccacattgcagttcctggatccccagacctaagagacagagaagtcagtgacgatagagtgacacaggcactgggaacagtgaacagcagtgttcctttccaagaagactctaaagagcagttacatgcgtgctctgcaaatgcgtctggactcatggatcctctcactatgtccctcctggagacccccaatcaggacccttcttccttggagcagactgctcaggatagagctgggcatggtctcatggctgagatcacaggagggcctgcagtgggacacacagtattatcttacaatcaagaggctgccttgccaggatcttcagcagctgctcacctatggctgtcctcatctccccctgacaatcggcctagtggtgatcttccatctctgtccccgtcacccatccatcagcattcacctgataatctgtccaataggggggcctgccagagcagaaggcctgcactcttgtcccagaatcatgtgggtgatgacccatctgatgacagtgagactaaagagactaaactggggcactccttgccattcccaagaaagcccctctccaggatacacgctggagtaccttattctacacctttgctcacctcatggaaaggaagtagtgatgaggctggcagtccctgggcccaggacagagaacatcctgcagggcttagctggcaggagcttgtttcctccacagactccatcaagccctcggacaagaacatcttgtggctccagcacaagccaatctcaagatgcttagcatcagacactcctgtggtccccagctgttccctcaaggcctcagggacacactgtccactcacactggagcaggcgcagtaagttggactttgttcttaagacttaagcccctctagcaccccatgcccttttccagtttgcttgcctcttcagtggacaaacttgctgttcctgttgtttagaacccaatgaaaggtagacagttcagcttttagccctgatctgctttggtcctgatagaaataagagcagaccttgtaccaaataccccagctgccacagctttatagaatttctcaaggaagccatgggaaacaggcagccgcctgagcagcagctaggaaagcaggacagccagagaagtctgtctctcctgatcttgtgggtactccctagcccttgactagtcctatgaacagaacagagaagaaagcaaagagcagccagccagccttaccaccttgggcagaggtagggcctggtatgaaaatgatgctcagtttccaaaggctgtccatgagtgggaaaccaaaagggtcagtttcttccctatgttcctaggcaggcagtcatccgtgcacaccaggaacagctagatgaaatggccgaactggacttcagggaggataccttaatgacccagatggattccaatgtaagtagaatagccacatgggctattgacagctagtttgtggtttggtggtcatgtttgctgtagtatttatgacatcaagttctgctgttgtgcactaacagttggggccttgtgaccctcagagggtctgggagaggtgggagatggtgttatactgctcactactgtgtccagcctctgtccttagccattctgcctttctgaaggtttgttggagcctccctgtgattattttaacagtggccatcttgctgcttacaacctgtagaccccaagcattatttataagtacccctttgcagaatatagcctccacttatgatggggttcccaacaaaagccatagaaacttggaaggttttcccctaagaagatggtctagagagaaggctcagcagctaaaaacactcattgcttttgtagagaacccgggtttggttcctattacccacggggtgactggtagagagacaaaacattcaaacaaaaaaaaaaaccttatacaaaaaagtctagaaaagggccgggcattggtggcccacgcctttaatcccagcactcgggaggcagaggtagggggatctctgtgaattcaaggccagcctggtctacagagcgagttccaggacagcctccaaagccagagaaaccctgtcttgaaaaaccaaaaaataagtctagaaaagatggtcattaagagaaacacttccacttgtctgtttgttgtcaggattttgaggatttcgtgacccagctggacaaagtcctggctctgaagtccagttgcatacagagtgtgagaagacagctacagctgtacctcacctgcaggccggctgcagcccccaagagaaccaaccatgctgtcttagaggaagacttaccctgggtggacggccaggcccttcctgcggacaaccactcccagccctgcctctagtcacacatggccttggatggccacactactcaggaacagaactcaccttacctcatttctaaccatagaaaccacttataagaaaggaccagactgaagaccttcctgtccccttctatttggggttcagagtatttgctttgttgacctgtgtctgtaggaacatatttggtctaataacagtagatgttcctaagtttcaggatgaaataggggtgttcagtggtaacctgggggtcagaggttagggaccacacactcagccaatagccaaattgcctttctgtcttcaaagactacagcattggtgccagccaggcagttgggtgagtgccttcccaccagagagtagagatttagttttggaaaatataaactgaaccactcttgatgccttaagagcaactgggttgggggttaggctttatgcttgcagttcccttccctgaaacccggctttgagaggggggggggggggctgttggcagcacatttttctcatttactttttgataagacagcagacctatggacggtacctactaggcctcagtttttgtggcaaaacctggctcctgtctatgactcctcactccctgtccctctgaataattaaataggatggaggatctcagacaagtccattgcctagactgaatttccaggacacctgggccagccacactcaaaagccagcctttgttttgggtgtcttggcactgagtgtggagtcaatagtctgaaccttctgatataggaaaaacacactgtactcttcaaatgaattcttgctctattactgtgtgtagggcaggtgttaccaggcacccacaatcattctctgctgtttcactgctgatttggctagccaataagtcccatgggtcagactgtcttagcactctgtgtagaccagctcagagatccacctgcttctacccccaaatgctgggattaaagatgtgtaccacaacatccagctggtccaggctttctgcataggtcctagtgatgaaacctcagcactcatgcttgcaccaccagcactttactgattgaatcatcttcccatctcttgaaacagggtttctctggctttgaaggctgtcctggaactagctcttgtagaccaggctggccttaaactcacagagatccacctgcctctgcctcctgagtgctgggattaaaggcgtgtgccaccaccacctggttctgtatcaccttttaataacaagaaagcacctcaagagcctccaagggtccattagttttaaagggctccctgagttaacctaagattcatgtgtcgcagcatggacccagaagccattaccatatgaatttaagttatgcctgaaactccaagataaatgaggtatggcatcgctcacttgtaatcccagcatttgggaagctgaggcagaatgaggaccttgaaaccaacatgggctatatttaaaaggcttacagtgggccacagacagtgcttgaaatagccaccagagggcagcctgttcctagcttagggttgtacagcacctccttacatggccactaaaaaccagagattcccagccaagaaccccatgggattctactaaagtaagaactagaagttttaggtattaattttgtcagctgcaccaatgctactgaaagccttgcctgtgactatattcatgatggcataccggtccccaggagctgaggaccaaacccaaggcctagcaagtgctttaccactgagccaaccccagattttttcttttttctgtttttggtttttcaagacagggtttctctatcggctctggctgtcctggaactcactctgtagaccaggctggcctcgaaatcagagatccacctgcctcaggaattaaagacatgcaccatcaccacctgaccaacttttcatttttaaagaacatcttgaagtctagtctgcccctctctactctggcaagaaggcatatgccttggtccagatactggactagatcaggtttaaaggtttagatctttgggtctgtatttgtaaaccaaaaaaaaaaaaaaaaaaaaaaaaaaaaaaaaannnnnnnnnngcttccaggtcccacaggcctccagtggaaagagtgcattgaaatgcagactggaaatgattattgcacctaccgccatcctgagtcaagctgttttccaaaataaagaagttaaacacaatgtaccttttaggtttttattagtagttctctgaagaatcaaaatagttagcaaattattttagattcaagactgtattatatcctttgtatttagatctttaatggtgtagaacataatacaaacaaaccaaagagtggtttctatgcctaggtgttactcattgtgtcatcctaaagcagggctggcagagactgttcaagaactggggattagtgctgagtgactagtcatggcctgttttctcatcgattcagtgtgctgagaaggagccaaagattactcaaattgacaacagcctcagcgcagggactccaatgccctgcacagtagaggattatggtctaagccaaaagaaacagtcaacagggacacatgggaactgcctagcagaagactttgccccatgaggaaaagtgcatcttttgtaccgtagagacatccaaaaccagtgtaacactaaggaatgctgtgggaaggtgggcctggaagaacttctcacttgtatttgactcaggttagagttcagtctgcctatggtatggcaaagagaaaagcatctagcccccaaacagcagcagtcttcccctcctcctcttcccagtcctcttgggagccaggtcaggttttggctgaggaaataagagaccccagaaagatccaagtattctttctgaaaggccaatgcgggaaggacacttctcaaaataacagctatgtttaatattgaaggagccagtatggcatttgtatgctcaaatcttcctaccttccccccagcttgggccggggctcacagagactagcaaataatcatctccacgcctgaccttctaacccccaaagaaaatctggaagcatgtcccttcttccccacaagtgagctgtgcagggcctcctgggggatggtgttgctgtggcagggcagtgacaggacctagtctcagctggctccagcccgggccatgaggtcttccaaagcattgtcctggtcattgttgtgtaatagcaaaacttccttaatgtctttcagttcaaagcccatttccttaaatttgctcatcaactgaagaaactccatcatctatgggataaaggagaacacattttaaaaaaggctcagctgaatatagaggtatattgcaggtggaggatctgtatccttccaccagagtcttgtagatctttctaaagttccctagcaagcagaggggggctgtgaagcccagcctctactcacttgctgacctctgtaagagtcccactgaccacatgaatatttccatcaagacaaggtattgaacccctggggttgctctctaggtagaagggaaggcaaaaattctagcagtggtccaagctatccaaaagcctggcttttagcccaattcaatttccccttcctatcactctgattcatctccacgcttcatctttactaagaaaggactcatcttgtctggccacagaggactctgtctttgactgcttctgcctgcagtcactggtaaggaaaggaaacagggcccagagagaacaccaggacagacaactgttccatgaatacggaaggtcctaccttttcttctgaacactggtgcatttccagagcctcttccactaaaagagggtcaaagcccttctcacaaagctgtccatgtgcaaagagatagtcgagaatctaaggaaagaaacaaggtttaatctcctactgccatgcctctgtgctgagttttagaccatctgtgtgaagctccctgaccctccccagtcatcagatcctggacagtcattacttggtaaatagactggcatacttttctagaaatgagcagccacttcccaaaggaggtgctgtcacagctgactcaactctcccagaatgtcaactcaacactcagggcaagatgatagtcctctcaaaacatatagcacatgtcaggaaatgtccccaaggtagaaacattattcagagcttcctgtgcagccatgacaaaagtttctggaggtaagccagtagcagtaggccacacctatatgctagcactcagaaggtggagacagaccatgagttcaatgccagcctcagctacctcagtaccaagcagtgtgggctacataagaccttatctcaaaagaagaaaaggtctagattgagacattaagcatatgctcagttctgtcctctctggagatacaaaggggtgggtgatgacagcggctccagtacacacccccaggctttctcccagcataaagaagtactactgctgaacttctggcttcctgataataccccaggccaggttcaaaacacatagtggaggaggctggagttgcaggcagatcacaaccctgacttgaggccaccatgcttctccacccacaccttgcagatcagcacctcacctgctcaatattctctcctttcttcttcatggctctcaggacacaatcgtatgagtagcccatgttgactactgtctccacacattgccgctcactcggagacagtgcctgcagttccaaataggcctggggacagctgggcacttgtgacactgagaaatttagaggggtgacctggcaatagaaaaacaagatcaaaaacagatgagctgagaggcccaggatgctgaccaagcatcatgggatggaaagaagagtggtaccaagtaccagcctacagcccttggaacgttcaccatagcccttgcatgtgagaatgcacacacaaaacatgctgctccatgccctgatccccatgacttaaaaagcagtccagagtttgaacctacctacaggattattgttggagcaggctgtgcagacttctctctagcattccatcagccctgcatctcaaagtccttaagggtcattcacttcaaaccttcccactctggaactgactctatcctggtctcactcctacgtatcactggtctaggcttcccatgcagttagtgcagggcgtcaggattttgagagcacacaacatactctgcttcatccttgctaacactgctgtcctctggagcaaagaccctaggctggactcctagtcacagtgtacttacactagctacaagcagcttgctgcctgccactggaacctccctagttctcatctgactggttacatctctgatgtaagggcagcgctgcgcactcccagaccaaaggacctattcaccatgggaacaagatcacaagctgttcatggtggctcagctcccaaagaaaacactgtgtttccccttgttttctttttctattgggtagagtaaagcaatgagtagtcctctggcctaaagcaaattctgctataaccagatgttctccaactctgctgaggaaagccagaagagcacaggcctgtagactagtagctcccatcgaaatatcacctctaacataacagtccatttccaggggcttcagcaagttacaggaggcatggatgagtgggagctcctcataaaccagtctagccactttgtatactcaagattatatgaaccttctcaggaccaggctctgcggactccagagtaccggcttctgaaacagtcaaggtagctctttgacacaagccaagaagccaggattattctaaaacatgtgcctctccccttaaaaagccccgagagtcaggtggtagccgtgcacacctttaatcccagcacttggaaggcagagacaggcaggtcactgagttctatgtcaacctggtctacagagtgagttccagtacaaccaaagctacacagagaaaccttgtctcaaaaccaaaacaaaacaaaggctgataaaattctttgatctagctatatacctctagaaatctagtctttgggaatattaaaatgcaaacctaggggctggagaaatgaatccagtcctctggaagagcagccaatgctcttaaccactgaagcatctctccagtcccagtttttattttaaaaatagggtctcactatgtaggcctagaattctctatgtagatcaatttggcctcaaactcacaagatctgactgcctctgcttccatggtgctccaattaaaggcatataccaccataccatgcccaacccaaaagatttttagatttttattttagatttttagatttttattttagatatttattgtgcttgcctgcatttatgtatgtacaccatgtgcttgcctggtgactgcatagcccagatgatgtcatgagatttggaagtggagttacacaaggtgatttagccatcatgtatatcctggaaaccaaacctgggtcctcttttaagagcagcaagaactcttaaccatctctccagctcaatgcatggggttttaaatagtaggacagagaaaagtatcctttctttttttaaaatactaggtctgagactacttctgaacagagacaaatgaatgtctcctttacataatgttttagaatcaaataggcactatagtaactatggcgaccctaaatggacaatgtttaaaaggatcccttattactggggcttagcaagactatctccaaaaaataagaaaggatcccttgtcaaaattaccaatactagagtgtttcaaaccattcatcaaggttaataatccataattatgattaaatgggtacaatttgctgtgtgcagtgtgatactactatgctacatcccagactcagatacaacaccattattgcatttaagcagtcctttcttattaggaattcttccaataaaaagataaaatgtacatattggcaagcataaaattcagttttaatcttttatattcagtgactaaaaactgggctaaccctcagcttggagagaccaggaagggcccaacacagtaactaataagacatatcactaataaatgtcaaactctccagagactgaaggaggttcacaaaggcttctataggtgggagtggacgtgaacaaacccagcctgagaataactgaaatgctagatctgtagggttttgatgaagctggcgatgcagcacctatgctcctgcaaaggattcaggtttgcatcccagagcccacatggctgctcacactgtctgtaactctggttcccagggatccaacacactaacttcctcaggaaccaggtgnnnnnnnnnnagtgacaacacacacccacctccacctcctctacctcccgagtgctgggattaaaggcgtgtgccaccaacaccaggctcaattcttttttttttttaaagaaacaagaaaaataaataaataaataaataaataaataaataaataaataaataaataaatgaaacaagggcctggagatgagtcaggttagggcacttgtctccaagcctgaccacctgaatttgacccctagaaacgatactgtagaaggacagatccagctcccacaagctttacagccacacacacaaaaaaatgtgataaaaatttacaacaaatgtttaaaaattcaagaaattatatacaaggttgtggctgtaactaaatttcagggtactcagcgtgcagagagccctgcctgggctggaccccagcagatctgtgatcccagcactcaggaggagtgaaagttcaaggccaaactcaaacaaaaagccagtctgggacacatgaaactttgccaaaacaaaagcaaaaatacaaaaatttcaacaacagctttttcttaggagaaacaaggaaacagagttagaaaaagaaagctcccatcttggtggtgtacatctgcaatcccagcattcagaatgctgaggctgcagagatgccatgattggtacaaggcttctaacacaggatgggattctgacttagatccctagcacacctgtaatccaatgctaaggaggctggccagtggcctgtcctgtcctcatcggcaaccttcaaggacagtagaaagtgaatgaagacagccaacatccacatctgtcctccacgcaaacacaggtgtgcacgtatacacacacacacacacacacacacacacactctctctctctctctctctctctctctctctcccttctctctccctcttctctctctctcgctctctctctctctctctctctctctctcaaacactgggcacaacttgggaggcagaagcacagaagcaggtggatttgagtttgaggtcaacctgatctacagagctgtctagttcaaggacagccagggtcacatacagaaatcctgtctccaaaaaaaaaaaaaaaaaaaccctgtgtgtgggggggggggaaaaagctctggagcctggtacctcctcctacctctccttctgggactctgattaggctctcaggcttatatgcctttaacctgatgagccattttgccaggcttggtggaacatgtgtatagtcccactacacagaaggcacaaacaagaggatcacttgaatccatgagtttttgttaactcctccactcatccttgtttgtttttttttaaataatttatttaactttgttttatgtgtattggtgtgaaggtgccagatcccctgaaactgaagtaacagacagttgtgagctgccatgtgggtgctgggaattgaacccgggtccgctgaaagaacagccagtgctcttaaccactgagccatctctccagccccccactcacccttttgtttgttttattctttctttctttttttatcctgaggcagggacttatgtgtagtactggcaggtttgaaactctgtagatcaggctggattcacttgcctctgcctcccaagtactgggattaaaggtgtgcacctccactgccagcaccagaaggaatttaagagagatttatataatcacagcactcaggaggtataaggagaactgtcctcaagttccaggcaaccagaactgagtctcaaaaaacgggggtgggggaatgtaaagacaactggtgctattctttttatatttgctgcaactaataaatttaaaagtcaaagaagtttaagtggaaagtgacttcctaaagaaacttgcagttttctttaggaaactcaaggagcttgaatgtgagtgtgcaaactggataaatgacctgggcataacgagcctcactcagaagcagaacaacgctcctgagggactgaggcagtactacactagcctaagactaagagcccactgcatgactgttcttaagaggaatgcaagttccttaacctctagtgttatcttactttaacagtaaaccatgaaatcaaaacctgagtgacgagactgaacagccacctagcctggtggtggcacacacctctgatcccagcactcaggaggcagaggcaggtggatctctgtgagttccccagcctggtttacagagtgaattccaggacagccaagggcacacagagaaacccagtctagaaaaacaaaaatacaaacaatttagatagtcttcaacttgaaaaagaaaagttgtaatctttatcaatccatcctaatacatcctttgacccttcctttcaagactgcctaatatacaatgttgacaggataaaaaagaatcacataattacaatctatagattttaaacaacagatatctacctattactattagccatttggtctgaagaaatgttaaatcctaaagagccacattctgattaaaaaaacaaaaacagaaaaaaaaaaaaaaaaaaaaaaagggacaatgagaatgtggaagctaggagaggagcgggtgtgaaaaggaaggagcatctgcaagaaagacgggaatagacaaccaccaaacggccagacacagggacacacacctgtgatgccagcactcccgaggtgcaggagatcaggccatacagtaaaaccctgtctcaactaaaactaccaacaaaacaaagacaaaaaagctaagatggaacagcacaaaaaagacccaagattagacagagaaatgccattcccaagggtatctcttctatatgcaaaggtaaaggtcttaaagatgcagggaggtgaacattaaccaaggtttggctgtggatgtagtgcagtggcagagtgtgtgtgtaccatggcaatgtcctgggtttgatccctagcacggaagaagaaccaaaagtaaataaatatccaagctgggttcaaaagtaataatcccaatcctcaggaaaacaaccagaattctatcaggtgacaaggccactctacagtatcccatcaagcacaaagcctgtgggagacctttgctaaatgggatcactaagacagctttggggctataagttaggactaaagacttactgtgggacatgtatttggaggtgatgattcttctgtacacacagacaagacagacagggaaggcatctgggaggatgtcatggttggcacttctgtgccactgttcaagttcaaagctgaaagcccaagagcatggtccccattgagctcactggcactgctttgggtggaaggctttaggaaattccgggatgtgccgcttcggaggcaggatgtgctatgaaaagtgctcgcaagcttgactgtcttctgattgctgtcatcagagtcaagtttggggaaggacagagatttgatattgcttactgtagggataggggggagggacactttggaagacagcgacatcttttcacagttgcccaactgtggtagggttataaagccattaggtttatgaagaggcttgaaatctaaggttgcttgctccaaggatgccaagacctcctcgtcctgtaacacagaccccgggcttcctctgggtgagttactatccagtaactgagccattataggtccagtggttcctaccagaatgtttcttagctcctccttctcatcaatagtttttaactccagattatcaaatgggtcctcttcacactcaaagtcagcagggttgaaatctgcttttgtgtggggtgggctaagaaccttctgctttgtggcactactgctgacccgagttggagtgaggatgctgttgtgctgtaagctggcaaggatggggttaattggaggtggcattgtggctgtattgtgagtcttggagaaactcattttgctgtcaccctctgggccactcttagaattcactttagcttccgcatcctcagccttgcgctctgcttctcgctgagcttcttggatcagcttaacatcttcagcccactcaatggttttcttttccaaggagaagtcatactgcagagatacagcagagagaggaggtgtgagcccaggggctgctctcccctacccaactcaatcctgtgtaagtgaagcaggcagcacttcagcagatagctgagcctcctgagaagcatcaagacttccactgtccaaaccatgctcccagattacttcaataaattaactctacacaccagaccacagggagtgtgccacatcctttgtttctcttccctgtggcttatccctttcttaattgtacatggctgggggaaggtgttagccacccactcaaggaagctatcaaaatggctcaattgttcttctaaaattgtatgacatctctatcagtcatctactggtacatgcatgtaaggacatgtacttaatgtgcaaacattaacacttcctgctattggcagcaaccccacagagcacctttgggtctctattatatagcacaatgttctacatagatttcccacgatcaataatgacagcacctaacattgaagaatgagttagaaggtaccacatgagtgaatttactgttttgctttgttttagcagaactgggggcctgaagccagagccttgtacatgctaagtgctctaccatcagcccatgagcacctttcatgggttgactctctaaattagctaaaaccccttagtaattatcaatatccttactttacagccttaaaccccagaaatactggaacctggatctgaagccaggtagtctgtccagattctacactcttaagctacagacggtaatgaatagattcagtcaaaatgcgtgtggagccacagtgctcagctcaacagtgtacatgataaagtcgggatgagattagcatggttctgcacaagacagacatactaaaccatgaagcagtctgtactttgctggacccttttatctgctatctgttactctttccaaggaattcagtaagtcttctccctctgcttccataacagaaaaggggaaagagaagcagaagccacacacgatgacctatgtggaagacagaggcaagaggatcacaattttaggccagactggacattgataggagacaggacagagaaacctagatatgagactggagtaagtgctcagtggcagagggtatgaaggccctgggaagggagttctttctaagatttcaaagaatatcctagtatttgggaagtagaagcagaaagattaggagttcaaggttggctctgtgaaatatttaaaacaacttcatagttccttaatgaaaccttaaaatgtagcccaacttacaaaattctcattgccacagtgctctacagagggggggtaggagctggaggaaggtgctgtgttttctatctaccatgaataaaactgagaaaacagctacagacaaaggccctatagagcttctaactggaggagctcaactcttttttttttttttttttttttgattgtataatagttgcttttctcattgctgtgtgaaatacccaatgaaagtaacttaagggtgaatgtttgttggggctcaaagtgagggcacaggagcttcaggcagctggtctcattgcacccgcaatgaggctgtagagagacaaatgccagtactctactagctgtacctgttttattcagtccaggaccccagcgcatgggatggaccacccacaatttcagttaacctaacctagataatccctcataggcattcccagagacttgactcttaaatgcttctagagcctgtgacaatcatcatcaacttccatggatcccactcagtagtctggactatactaaaactgtgtagttcagtcttagcctcaccgtaagtgctaaggttaaaagtgtataccatactcaaatgaggaaaaccaacctctaataaactgactttccacaagtctctcaagttttcactctcagaatatttagaaatatcttttctaaaacagccttactaagatcctgctttgtttttgtaattattttggtgtttgtctgtatgaggcagagctgcatgtatgtagctgaggctgacctcaacctcacaaaacagtcggtgtacgccatcacacccagttcattcggtcaaacacaaggcttcacagatactaggcaaacactgagctacactgccaggcctgtttcctttggtttatttttgtaattatcaaattaatatagactacatgggaaacagaaaagttgtttttgtttgtttgtttgtttttaagtaagcatgtggtttgagagtaaaatgctgctgctgttggagctcacattgttgaaggcttgcctttgcataaacaaggcaagatttgatccccaacactacataaacccactcatggtacctataatcccatcactgggatggtggaggtaggaacatcagaagttcaatgtcaacctctgttactcaggaagtatgagaacaatgtggggtagagaccctccccactcctctctacctggcaggaagagaggagaggaggagaggggagagtggaggagacaagagaaggaagagggaggaaaggaggagagggagggggaagaagaggggagaggggaaaagaggggaaggggaggggaggagaaggaaaggggggagagaacaggggagggggaaggggagaggggagaagggaagaggaggaaagggggggcaagaaatagcacaaaaaaatccaagtagtagtggcgcacttctttaatccaagcactggggaggtagaggcatttggatctctgttgagtttgaagccagcatggtctacagagagagttccaggacagcctccaaaaccacaaagaaaccctgtctcgaaaaacaaaaagcaaacaaacaaacaaaaaagttaaagaaacagtacaatatggagtagaagaggcaagcatggggctgagactgctcagtggttaacagcactagctgcgcttccaaaggtccagggttcaattcccagcaaccacatggcagctcacaactgtaactccagttccagggatccgatatcctcacacagacatatatgcaggcaaaatagcaatacacataaaaataaaaataaaaaaagaaataaagaagcaagcactatcaattcagtagaggcttccccttggccacagtttctttcgctatagtttcgtttgtttataatcaactccaatacaagaatagtaaacaaaaatttagtaaacaaaaatagtaaacagaaaaaaacacctaacttttgggctggaagacagttcagcagttaagagcacttattgctcttgcagaggacacatgctccgttcccagcacccacatagtggattaaaactatcctttcatttcatatgctgtttttcaaggcagggttctttctctgtgcagccctggttgtcctggcactcactctatagaccaggctggctttgaacacagagatcggcctacctctgcctcccaggtactaggattaaaagcgtgtgacaccactgcccagcaactatccttaactctagttccaagggatctgacaccctcttcacaaccatgtaggtaacaggcactctgaacagtgtgataaaatcaggcctcttctctcactcagtcctgccagagatgagtgtccagcacatccacagcatgtgtgacatctggcagttagtcccactgctgtgggcctgcaatgcttgtatgtggagttggacactacttgaggctttaggcatcctccagaggctgtggaacacatctggttggctccctaggatttttgatcctagtgttgaggtggaaggagtgctgagaggtaggctaggggatggcagaatgtagtgcatttcctgtaggaagtatttctcaatctttcagaacttgcagagaaagcattaataagataaaaaatgggggtgggggagcctggagaggtggctcagtggttgagagcactggctgctcttccagaggtcctgagttcattcatttcccagcaaccacatggcagctcacaatctcaaaagccaattatcccattttacagatgcagaactggagccttggaaagttaaacatctgtacagctattgtacaatgtctgcccacatagcaatgacagtagagtctggcagtggtggtgcacgcctttaatctcagcactcaagaggcaaaggcaggtagatctctgagttcaaggccagtctcttctacataatgaattccaggccaagcaggactacatggtgagattctgtttttttgttgtttgagaaggagagcacaacaacagtcctctaagtagtttatacaggagtactagagcccagccctcctctacagtgagtgctctgagcttagtcctatgtacttatcaatgcttctcgatagccaaaaaagagatgtccagcaaaatctaaagtggcaaaaattgaagctcaaaacaagttttctgaagcatcagtgaagccataaaggaatgaaaaacaaggtacaggcgctttaaactttctcttttagatgcacttctatgatctgagtgtgacttagcacccggttcccaggagggctgcctgaggaaactgtggaacctttagttagaggggtctggttgagggaagctcatttggggagtttgagggatacagcccagtccagattccaggcccatgcatggggcccagaagtagaatatgaagatttgaatgtgaaatgtacttggcaggttcatgttcttcaacagttggcccacggctaatgtcgctaatttgggggttggctgaagagatgggggctgaggtgttttgtttgagcacagtctcttacctgacttctcaatgtgactagttacctcacactcatgtggtagcggacagaagctggtcccacagcacacctccacagccatgatattttccccaaatcacagcccaaataacccccatccccaagtagtttctgtaggaattctgtcagcagtgaggaaagtaagtaacacaagggtctctccgtgttgctatgctggtctcaaactactgtatgaaagtgaacctactgtctcagcttgccaagcctgtaggagtacagtgtatatgtctgctcccagcaaaaatcatcacatctcttgctctttttttttttttttggtttttttcgagacagggtttctccctggctttggaggttgtcctggaactagctcttgtagaccagggtggtctcgaactcagagagatccgcctgcctctgcctctgcctctgcctcccgagtgctgggattaaaggagtgtgccaccaacgccccggcctattttttgaagtgtgcgtgcatgcgtgcgtgcgtgtgtgtgcagtagtagagataaacccagggcttcatgcatgtagcacacatgctaccactgagctacatctttatctctggggagcgggtatttaaatcatattgttacaaggacagcacacagaaaagtatttaatatttattttattatcaggaaaatggagcaaggtataatgtaccttctggccaaatgaagtgtccattaaaaaattatctatccagtatttaaaactacataagatgcttagcatcattagtaaaatgcaaatcaaagtcacaaatacaacttcacacccacaaagtacataatgaaaaaggtggttacactggacaatggtggcgcacacctttattcccagaacttgggaggcagaggatctctgtgaattcaagaccagcctggcctacaaagctacacagggcagcctggtcgagagagagagagagagagagagagggagggagggagggagggagggannnnnnnnnnnnnnnctgcccctttggaatatcatttggtagttcctttaaatagttatgctaaggaccagtgattctacctttgtacatacatctagaagaatgaaaaacaagcgaaagtctgcatatattttcatagcaatactgatcataacagtcaaaagtagaaactaccaaaatgtctatcaatcaatgaatacacaaaatgtgacatatccatacaagagaaatactacttggcccatagtaacagggacatagaggctagttttattaaaatcaccaactcttcattttggtctgtaggtgtctgacgagtaactaatggcaagacagaagtagaagtgtaaactggcccttttctgaagcattctctctcacactcacttgggctccaggaacaagaagtcgaaacacctggttccaaaggctgaaactgccctcccaggcagcagcaacttttctttcttttttttttttttttaagcagaactgaacattttactaatgatacacagtaaggagaaaaagaggtacttaggagacatactctgtatgtctagcagcactttcttatcaacaacaaggccccattctgaaatatgctcaaccagaccacactgtctacctatgcaagcctccagcttataccacagaattctcatgggatagacaggcttttggctttagattaccagtaggtgcccaccctgagaatacattactttcatgtctcaaccaccattcatctcttcatttggccttttgggatgaaggaacagacctggttcactgggagcctccagattcagacctctggcctaggactctaattacaataacctaaattaaatatgcctgtcacaaagaccacagtaggtttcttttgggagtgggaggaataaaatattctagaagttaacacatctgtgttaacttcctgttaaaaaccctggctggagccaggcggtggtggcgctcacctttaatttcagcacttaggaggcagaggcaggggaatctctgtgagttccagaccagcctgagctacacagtgaggtcctgtctcgaataaataacaatgtattatttgttgttggggttttggggggcttttcgggggggggggggggaggtgagtcnnnnnnnnnnnnnnnnnnnnnnnnnnnnnnnnnnnnnnnnnnnnnnnnnnnnnnnnnnnnnnnnnnnnnnnnnnnnnnnnnnnnnnnnnnnnnnnnnnnnnnnnnnnnnnnnnnnnnnnnnnnnnnnnnnnnnnnnnnnnnnnnnnnnnnnnnnnnnnnnnnnnnnnnnnnnnnnnnnnnnnnnnnnnnnnnnnnnnnnnnnnnnnnnnnnnnnnnnnnnnnnnnnnnnnngggcgcacgcctttaatcccagcactaaggaggcagaggcaggcggatctcggtgagtttgaggccagcctggtctccaaagcgagtgccaggatagctccaaagctacacagagaccctgtcttggaaaaaaaaaaaaaaaagagagagagatgagatagctcagtggttaagagcactgactgtcttccagaagacccaggttcaattcccagcaacaacatggcagcttacaactgtctgtaactccagtgccagaggacccaacactcatggcaaaacacaaagtacatgaattaaattaaaattaattaaaaaaaaaaaggtctggtggtagtgactacatctttatctcagtacctgggagacagaggtaggtagctctctaagtttgaggccagcctggtctacagaactagttccagaacagtccagtcaggactggaaaccctgtctcaaaaacaaaaacaaaaaaaaacaaaacaaaaagagagaaaagaaaaggcaaaacaaccactgaagtgaataggacgaaagggtgtgaatttaaaagtctgtgaatcctatcttaataaagctattaaaacaaagcaactgaattttcctgcatgcagactatagaaggcaaaatacttttaaattgacatgctgatgacctagtgagtccccagaagtaaaacttcctttccaacaaggtggagtaaagtcttccatggcgacaggaagatgtgtgagctctgtgtgtacttctggttttgtcagcacctttaagctgtaagcaccttgaggacactgacatgcctctctcctggtccccggaagagcacctcccaaaagcaggcatttgaaaagtgcctactgaagtaacactcagctttttggtgctttcaagaagtaatttcatgtatttatatataactggctctaaagatgagagggttgagagagatgctctggagagcatttaggcacagttctaacagactgatatgacagctttctgtacagtcagaaacagactactccactcagagacagctcacagggaaagccaggcactgggagttgaacaaagtacattcaacaaactcctgctgactcagaacatgaagatgaccaaaagtgctgacaaaatttgatgtccctatgtttgatttagtaataattattgaattataaacttttaaaaataattttaaaaccttaaaatcattattctagaattaatgtggaaaacactgcaaggaagccaactaaagacactcctctagggctggagagatggctcagaggttaagagcaccgactgctcttccagaggtcctgagttcaattcccagcaaccacatggtggctcacaaccatctgttatgagatctggtgccctcttctggtgtgcagatatacatggaagcagaatgttgtatacataataaataaataaaatcttaaaaaaaaaaaaagacactcctctaatagcctgggtgaaaactaaggtagggctgaaatgaagtgtgttgcatagcaaaagaaaaatattatataaaagacaatgaggacatcaataaaggaaagaagtgagatggaaattggaatttattttgtgtaaggcacaggaacccagaaaaaaatatataatcaaataagttaaacaaagcctatgcatatgttaaacatatataaatggaggtctgggtaccattgtaaaccaggcattaacaggagcacaagataaaattaaagagatataagaacagctttatcaaaagtctttaatgcactaaacattaagtaaaatttgccacttacctgcacctctctgataacctgtaagcaatcaggcatggagaagccaataggtagaccaactttagctggtgttttgaatttgtctcctattttgaatgggacatcatcaaggtaactgaaagtccctataataataataacaaaaaaacgcagaaaacatgagcaaatgaccttaatacttattttactataatctcaggctttgtgaacacacattcatttatgctttcctaagacctgagtcccttctccaatagcttacctgacctgagaccagtctactagtctacttcactacgagggtttgttttcaatgtaaaatccaaagaacttgctgggtgtggtgcatggctttaatcccagcactccaggggtaaaggcaggtagagctctgtgagttcaaagccaggacaaccagggctataaagagaaaccgtcttaaaaaacaaaacaaaacaaaaatccaaagtactcactcacagctgcctaaaaaagcttcctaggatctttctgtccacatctcctaacaacttaggcttaccaccctaagtaatggggacctctgtctgaaatgatgtcaagctcaatcctgcctcacaatgttccacactggctgtttctttatctggaatgctgttcacttggattcatataactcactccttcacatcttcaactctgttcaaatgtttctcagccagggttaacctcagcatcctacagaaaatgactacctacctcactactcacaatctgacttggccttaaaagtattatcttctaacacattctgtagctgttttattatccttattgtttgtattgcccaaggaaacataagcttcttaagccaagtcaatttaagtcttatctgaagatgtagtctcaaaatcatttttgtttgggttgttcagttttgtttggaagatgaggccttggtaccagtcctgactggtcttgagctcacaatccaacctcatcctcaagtatctgggattacagtgtatgtcaccagatggagcttgtattctcagaacctgacacacatctgtctgaattgataagactcctcacaacaggtgtctttgatttagcgttctctatgaacttttttctttccttttagggggcgtggggagtagatatcagtgaaacaatcttaaaaaaaaaaaaatacaaacaataggaatactattattttctagaataatatggatttctaccacacccccagtcctagagaatcaaacccatggccatgtctcagatatgtgaagtatacagctattatggagtatcactttaactacgtgaagatgtgttccatttctttatgctgaggagtatgactttaactctgtaaatgtgtgtcacatttgtttatgctacatttgttttatgatgtaaggatgtgttacatgtgtttgtgctgcatttgtctaactatgtaaaggtgtgttttattttttatttagcctttcgtgaataaggcacctgattagtctaataaaaaactaaacagccaatagctaggcaggagagagataggcgaacctggtaggcagagagaacaagagaaaagggagaacaagggaaaaagaaaggggattaagttataagaactagtaggtaatcacaagtgttgtaatttaagaaaagcagctggcaagagaaagacgccaagtaaagggtccaagtagagatttttttgttttgtttttaattggggaaagggattagaaaaaggggaaggggagaccagcctcagaagaagagagaggcccatgtgcagtattgtgcaaaccctctaggaaagactctgaagaccacagtttaaatagccatttgaagaaacacttaaattattgaaggtcttaggatgcacatgttgtgttttgtacaaactttgtttcactgatatctactccccacgccccctaaaaggaaagaaaaaagttcatagagaacgctaaatcaaagacacctgttgtgaggagtcttatcaattcagacaactttgtttatgctattcagtataaagaaacaacaacaaaatactgttaacttaaattttctgatcaaatcatagcttaaaccataatatctaacttcacttaccatgaaaatctgaacccaacttcttagaagccatttagaacctaaaaaacaagttaagatttcttaggtaatatgtcttaagacatcattaaccagaaaataaagacaccccccccccaaaaaaaaaaaaacaaaaacaaacaaaaaaaaacaaaaacaaaaacagtattaatgtttcagggctcacatagtcttcacttctcactcctaaagtcttccaaaagaaggcccaatataggagaaattcattagtttatctttcttttctttttgtttttccttatttttttcttttttcaggatagccctgactatcctggaactcactctgtataacaggatagcctcaaaatcacaaaaatctgcctgtctctgcctctcgagtactaggattaaaaaggtgtgcaccaccaccgcctggtctcatttttaaggtacattttatttgtgtgtgttacatacatgtgtgatgcctacaatgcttggccggagattagaggacaactttgtagagttaattctctcttccatgatgcgggtcccagggatcagatccagcctgtcaagcttggcagcaagcgcctttacctgacaagccatcttgccagcccaaagaaataaggtttttaaacggaaacatcaagctaggtaggatgactcacacatatattactaacacttgggagacagaggcaggagggccagcctggtctacgcaatgagtttcaaacttgcctggacagaagagactccatctcgaaaacaaaaaattctaaaaggaaatttaaatattcctaaatgtgcagggtctgaggaaatattagaagaacagcatactggtagccagctaccaattatatgctggccacaaaagaaaacttactaagctgatcatcctatataaatgacaaatgtacaaacaccgagtaagaaatgtgttttactttgtgtagttaagcaaatgtagatctctgactggctcatcactgtcaaaactaaaatttctggaatgggggaatttacaccttacaaccttttgtggcacatgaatgagaggataatggaaaagcattcgtatttccaattgaatgttcacaataagtgacactgtatatgactatcaagttacacatagtgatacctttacctaagacagatgtgagtgggaaatgcctgaaatcccagcacttggggggccaaagcaggaagggctgcaatctggtagccaacctgaactacacggtgaggtcagatgagaggaagagggggaaacaaagaggaatagaggagggaaagaaaataaaaagaaggaaggggaaggtaaggaaggaaaaaagaaagcctttactaataaaataaaaagctgacaactacatattagtctaattttgttcacttacttttcataatatcactaaacctgaaatcagaaaacaggaaattattttcctctagcacatatacaataagcatctcagatttggctgtttggtttatttattcacttatttctgaggtaagatctcactatgtatctctggctagcctggaactcgctctgtagaccaggttggcctcaaactcagatccacctgcctctgcctcccaaatgctgggattaaaggcatgcatctccatgccagatggaagtttattataatttgaaaagaaaaattttgaaatttgctcttacataaactaagctagtctcaaactaactatatggctgaaggtgaccccgaaatcctgatcccactgcctccagtgctgggatacagacaagtgaccataccaagtttacaaggtgtggggatcaaatccagagctttgtgcctgctaggcagcattctaccaagtaaggtacattcccagcactttaaaaaaaataaataaataactttataaactgcctatcatgcaggtagaattcaataaaggttgaactgaagtaacttgcaaaagaaaaaaaaaaaaaacatttttaagcattgtacctaaccattaaactggtatatctatggacagaaactgtaaacttttagttggatgtggatgtaatagtattagaatcttggtttcagctgggtggtggtggtggctcaacctttaatcccagtacttaggaggcagaggtagtcagatctctgagttcgaggccagactggtctacagagtgagttccaggttagccagaactacacagagaaaaaccctgtctcaaaaaaaaaaaaaaaagaatcttgattttataagttaaaacatgtctctgaagaccaagtttattgggtctgaattttagtctaagtctaataacaaatcagacacgactttcataatctatcactgtccaaaagctctatgtttgaaaactagacctcctttttagagactattcacatcagtcaagaggtcaacacagtatcctgactgatactgggtcccaggaagctctttatgtattaatttcttctcttaattgttcagattgttcagaatctgattattcagatctttcttaaacatcactgttccatgaagaactagaatgaaaaatttaaatcattaatttgcagaataagatctgatgagctcttacattttagaaaaggagccaatgtggagagatggctcagaggttaatatcactgactcctcttccagaggtcctgagttcaattcccagcaaccacatggtggctcacaaccatccgttatgagatctggtaccctcttctggtgtgcagatatacatggaagcagaatgttgtatacataataaataaataaaatcttttataaaaaaaaaaaagaaaaaaaaaggagccaatgtactactgtactacagaaacaaagaaagatattcttataatgggtgctaagactataggtgggcttcaggctttcattttgtactatttattttcagttttctatattgagtatgtctctctatatgtatcaatcatttaacccacctagagaattaaaaagaaacacagtgatgtgtaagtaatcaaaagttttcacctcaaaacaagaaaaataaatgaagaagagctcagtaacttctagtccaataagaatacccaatagtggggggtgggggtggaatggagatgtcttagagatgtaacagttattattaactatacagggaacaatgtccaagaagagctcagttacgaattgccacaatatataaaatgtccactcaaactgccaaagatagtaactactcaagcactagactaatggagtctatatccagtctttggtgttggggtggttttgtctgtttttgaggtgagacctctctgagctagtcttgtactatatgtagtcccaaaatagcctcaaggtaccacaacaagatatcagaatacccttttatgtttttattttaacatctgttatgtctatgccacatatgccacagaagcatatggagtgcatcagatcccctgaagctttaattactaggggatgtgagagccacctgaaatgattgctgggaaatgaacttgagtcctctgtgggttcaaggccagtctgatctatagagctagttccaggtcagtcaaggctccagaacgaaaccctgtctcgaaaaaactaaaaaacaaacaaaaaaactcaaagcaaaaacaaacaacaacaaaaatcatcttttctgagttcaaaagccttctcacttacctggggagttacacacacacacacacacacacacacacacacacacacacacacacacacacacacacacacacccacagaggtgagatggctcaggggctaaaatgctgtgtgaagcatgaggacccaatctcagatccccagtagccatacagaagaggggctaaagacatggttaacagtactcccacgggaacaaacacaaactcacacacaccctctagttaccagaattggactgttccagtaaagtaaaaagtcatcaatatcagcttgataaagaaacactctaaagtcctagccctattctctggagaaatggctaattaaggctattgtaatctgaaaagcattccccatggccaatgtgaaaaagtctcagaaagcagtgcagaatttttaacccaaagggtaaagtaagtgcacttaggcacatactgaggtcacctaacagctaacacccatttcagatcttgtaattttccaaaaacaaaccaaaagtgaagtccattctccaaaatacctggcagttttcccaagtttgttttttcttttccttttttcttttgtttgtttttctttgtagctctggctgttctggaactccctctgtaaaccagacttaccttgaacttggagatccacctgcctctgccacccaaatgatgggattgactatcctaatctaaaaatcagactgaagagtacttcctgcagttccatccaacacaaagcccaagctcagacacactgaaccagaacagccagcaaccccaccaaatttggaacactgcttaccaacagcccttcccagacagactacagccaagggacaccacccaaccatagggcacaacatgcagctcacacaattgcagagcccaatttacagccagctcatctatgaaatagagcatgcagcccaatctgtccaaggatagcagagcctacaatcctcccatcataaaattcagccagaagcatcctgaacatgaagcccagccaaaagacccaccaacaagagcccagccagaagcccttctcagtctcaaaacagacagcattttggttggttccaccaaatcccagctgcaagctattaaaacacacacacacacagagagagagagagagagagagagagagagagagagagagagagagagagagagacccacactccaaatgacccgagtgccatctccagaacccatggtcaaagaaaaaaaatcaactctcagaagttctctatactccacacatacaccatggcaaatgcacacccatacttacacacacatatatgcacacactcacaataaaataaatataatatgtgggtgatttaacatcccccccaaaacagaatctcactatatagctttggttggtcttgaacccagagatcctcccgcctctgcctcccaagtgctgggattaaaggcatgtaaaactatgcctggtatacatctttttaagcaaaaataagtaagagccaggtatgtgctgtttttctgtcagcttagtagtttcagattaatctatgatattttcattattgttctccaccccatgcccccccccagtcaatgccccaatagcctggtagggcttccagtcctgcagtgtcgtggggcactgaatgaggggccatgggatagcagatgagtatcagtagattcatctgcagccactaagctgacagaaaaacatcatttgatgccccgtgttggacaccatatgtagtcggacattcctttgggacgccaactcaaataatgacatgcagacttattaattatgagagcctgaccttagcttaagcttgtcccactagctcttataccttaaattagcttgcttttactaatctatgtcttatcatgtggctatctacctttctttccattctgtatgtccaactccctcatgtcttgtcagcatctcatctatcccgatcatctcctacttcctctctctacctgaagcaccacctatagctcctgcctagctactggtgattcagattttattaaaccaatcacagtaatagatcttcactcagggtacaaacatcacacaacagatacggtggcacatgcctttaatatcaatactcaggacacagagcaggatatcactgactttgaaggcagcctggtctacatactgaaaccctgtctccaaaggggtgtgagaaggggatgacaactgactccatggagaccaggcagatacatgatgcacatatatacatgcaggcaaaatatggggctagagagatggcttagcggttaagcattggctgctcttccagagaacctgggttcaattctcagcacccacatggaggctcacaactgtctataactccagttccagaggatctgataccttcataccaatgtacataaaataaagttaaataaactttttttaaaaagggggggggacaaggcgggcaggggtggtgcatgcctttaatcctagcacttgggaggcagagacagacagatctctgtgagttcaagaccagtctggttgggctggagagatggctcagaggttaagagcactgactgcttttccagaggtcctgagttcaattcccagcaaccacatggtggctcacaaccatccgttatgagatctggtgccctcttctggtgtgcagatacacatggaagcagaatgttgtatgcatagtaaataaataaaatcttaaaaaaaaaaaaaagaaagaaaccagcctgatctacaagaggcagttccaggacaggctccaaagctacacagggaaaccctgtctcggaaaaccaaaaaaaagaaagaaagaaagaaagaaaaaaagaaagaaagaaagaaagaaagaaagcagggtgaactacacatggagagcaagccagtaagcaatattcctccatggtctctgcttcagtgcctgccctggcttccctcaataatgcactgtgacctgtgagttataagatgaaataaactctttcctccccaggttgcttttggtcagttttatcacagcaacaaaaaagtaactggtacacccagctttaaccatttttctttgtttgctttttactgctataatctgaggttgggtgatatatgaaagatagctggacctggtgatgaacacttgtggtcccagctactaagaatgccgagaagggagaagcatttgaactcttggattcaagaccagcctaagcaacatgataaagaactttttttaaaaaagtaagaggtgaaaatcatctcaatttgaggctgaaaagtcccaacagcataccaagttttttgagaacctcactgtgctagcagcacctgccagaggcatcacacaggaaagcagaagaggccaattttgctgttttgttttctaattatatgtaggtatgcgcctgcacatgggtatgtgcacgtggtacaggtgcccacagagactagacatggatcacccagactgcagttacacacaactgtgagactcctgatgtgagtgctgagaaccaaactcaggtcatctgaggagcaagagtttttccatgagccatctccatctccctaaccgttctcttactctcttatgatcacaaactctttcaggatccaactggcattccatgggaagtatttcattatttccaagacaacacctccaatgtcccagtctacactgataggctccattgttttcttcttggtttattttctttttcctttttctttgagatgggatctcactatgtatcactggctggctgatatattatagatcagggtgaaggaaaagaggtcggcccacctttctgactccacttccaaagtgctggtttacaggtatgtaccaccacacccagcttattccatgtctagtggctcacaattccctgtaccttcagtttcagaagatctgttgtcttagtcacttttctagtgctgtaatcagacaccattaccaaggagcttatatttaaagagtttatttggggcttacagtttcagagcattagagtcagtgaccatgatgacacacagcaggcaacaggtaagcaagcatgtggcactgaaaaagtggttgagagcttatatcttgatccacaagcacgaggatgacattgagtctttgaaacctcaaagcctgcccccaatgacacacctcctccaacaaggccacacctcctaatccttcccaaacagttccattagctggggaccaagtagtcaaatatagagcctctgaggacctgatatcctcttctggcctctgcaggcaactacatatatgtagcatacatacacaggcatagacacatacacagaaataaaaacagtgaaaataaatcctaaaaacaaatagcaaatacacacacacacacacacacacacacacacacacacacacctactctttggtcttcctaagccaaaaattcctgataagttctcttttcttttttttcctttcaagtcaagggttcatacagagcaggttggcctcaagtgtcaaactgcacactacactgatgtagtattatatttattgaaaaagcaggcaggttgtgatgcagcttagtggtaggacacttgcctagcatgtacaagtctttagtcaagccccagtaccaaaattaaaagaagaaattgtttaaaatagcatgggggggcaaaaagagtttctttttttgttttgttttgttgttgtttttggtttgttttttgagacaggctttttctatgtaacttccctggctgtcctagaactagttctgtagaccaggttggtcttaatctcacacagatctacctgcctctgcctcctaagtgctggaatcaaaggagnnnnnnnnnnnatttaatttaaaaaaaaaaagttatactgataaacagtagtggcacacacctttgatcccagaacttgggaggcagaggcagatggatctctgggagttcaaggccagcctggtctacagagcaagttccagggcagccagagctacagagaaaccctgtctcaaaaaaacaaacaaacaaacagttataaaagaccgaaaagcagtcgggtgttggtggcccacatgcctttaatcccaacactggggaggcagagacagggggatctctgtgagttcgaggccagcctggtctccagagcgactgccaggataagctccaaagctacacagggaaaccctgtctctaaaaaccaaaaaaaaaaaaaaaaagactgaaaagttcaaagttcattaaaacgagttttagcaccgggcaatgatggctcacacctctaatcccagcactcaggaagcaaaagtatctatgtgagttcgaggccagcctggtctacagagtgagtaccaggacaacctccaaagcaatgcaaagaaaccctgtctcaaagggaaaaaaaaaagttttagcaagatgtgggactacacagctagtcccagagcttaggaggcacagaaaaggacactgactaaagttcaggccagccaaagctatgtaatcaaaccctgtctcaaaatcaacaaggccagcaagatggctcagcaagcctgatgagcagagttcaaaccccaggatctacatggtagaagaaaagactcccataacttgtcctctcacctcaaacatatgtctgtcatgtaatgtcttaaaaatcaacacaaaagccaggtgttggtggtgcacacctttaatcccagaacttaggaggcagaggcagtcagatctctgtgagttcgaaggcagcctggtctacagagcaagttctaggacaggctccaaagctaaagaaaaaccctgtctcaaaaaaccaaataaaaaaaattaaaaaaaaaaaaatcaacacaaaaaagatcatgggctactcttaccaaaaggcataaactgataaaaaaaagtcataatacaagaggatggtcataagtcatacattaaaaaataagtgtgtggtggtgaattaagtgtgaatgtgtgtggttttacacctgtgatcccagcacctgcagaaggatcaggagttcaaggccagtctggactacaccaagaccctgtctcaaaagataaccagaataaagaaatcttactcaaccaggaagagaaagaatccaaagtaatgacaaaaaataaaaaatacaaacacaagttgccaacaaacacatgaaaacaaaaacaagctcaatgttaggaaataccaatttaaaaatcatacaacaggtaccattttaaatcccccagatgagaaaaaaagttaaagtttcacaatatcaagtgctgaagaggaaaatgaagcaaccaaaacacatactggtagcctcttgactcagtcatgacaagattttaccatgagccagtgcagtgactcaaatacgggaagtgtttaataagcaatgagcaaagatgctggcacaagcctctaatcccagaagctgaggcaggagaacagcttgaggacagcctggtctacatagagagttccaggacacctagggttgttacacagagaaaccctgtctcaaaacaaacaacaaacaaaaactagcacttaaacttcataggaagtgaaacatccctgtgactacctaagaggggcactcataattatcaatcacactgaacaaatttgaattcagattcagattcgccatttaaaactgtaatctggccaggtggtggcccatgcctctcattgcagcctggtctacagaggaagttctaggactgccagggctacacagagaaacactgtctcctggggggataagaaaagtaaaactattatatgttttaaataagcatttggaagatcgggtgttggtggtgcacacctttactcccagcactcgggaggcagagtgtgactttgagaccagcctggtctacagagatagttctagggcaagctccaaagcaatacagagaaaccctgtctcaaaaaacaaaacaaagcatttgatagagaaataaaaaacacatttcttaagaacaccagtgccctgagttaatggcagttaaaacattggctgcttttacaagggacccagtctcaattcccagcagtcatatggaggctaacaactgtctactccaaagatctgatgccttctcctgctttctacaggcaccaggcacacccagagtgcacagacctacctagatacaggaaaaacaccataaatataaaatcaaaataaatctttacaaagaaagactaccagatttcagctctaagagatccaacaactctagtttctgcaggtaactgcattcatgtgtacatacccacactcagacatacacacctacatataattaaaaaataaaaatgaaaattggaagaaaaacaaaaaagactatcatcattactaccaatggctcagcaagtgaaggcacttgctgccaagccaggcacaattccctaaaaacacatcatttgaaggaaggtgcaaactccttgcaaactgtccttacctccacagacatgcccagttcatactaaaacaaataaatgcagggaggaaaaaaaaaaaaaaggaaatgttatccaccttattaatgataaacaaattatttttttctgtttactgaagaaacaaaggttgttcttaaaaggaactgcacttaagacagggtctctcacagaaccaggagctcaaagatttggctacattatctgactaatgagtcccagatagcatcctgtctccacctccccagtgctaaactgtaaaggcacaccactagaatacccacctttttctttttgttacttgagacagggtttctctgtagcttggagcctatcctggaactcgctctgtagacgagtctggcctcaaactcacagagatctgactgcctctaactcctgagtgctgggattaaaggcatgtgccaccaccgcccagggaatacctaggcttttggcaatatccagccttttaacgtgtggatccaaactcaggtcttcaagattaagaagcaagcagttcacagactgagacttctctcaggctctccagttaatcttgatcaaaatcttaatactgggtgggtgtgtctgtgtgtgccctcctttgtgcaagaacaggcctttgatcccagcattaaggaggcagaggcaggcagatctatgagtttgaggccagcctgatctacagagttccaagacaaccagggctacacagaaaaaccctgtctcaaaccaaccaaccaaacaaaaaaccaatgtaaatacatccaacaatgtaacagaaaaaaagatagcagtgtctatactcagaaataatgatgtatttaaaatgctgaaaatattcacaagaacttatatcatcaattacatttcaggaaccctaagctttggaggctgtcctggaactagctcttgtagaccaggctggtctcgaactcacagagatccacctgcctctgcctccctagtgctgggatcaaaggcgtgcgccaccaaagcccggctagtaattttttttttttttttggatactgttttctcaaaatcaaaataaaaaaataaaagcagccaagtgtggtggtaaacacctttaatcctcaaactctctcagaaaacaagatgatctgagtccagtctggtttacagggttctaggtcaaccagggttacatactgagacatagtctcaaataaaaaagagaagggaaaaggtgtgttggagagagagcacagaggttaagagagagcactatctcctcttccaaggacccaaatcaagtcccagcacccacacagcagctttcaactatgtgaaactccagttccaggacaccctcttctatgcacagacatacatataggcaagatacctatacacatataaataaagaaaaataaaattaaaagaaacaaaaacagacacataaaatgtcatgatgaaacaaagtagaaattcacctgggtggtggagcacacctttaatcccagcactaaggaggcagaggcaggtgaatctctgtaaattccaagccagcctggtctacaaagtgagttccaggacaggctccaatgctacacagagaaaccctgtcttggaaaacaatgaactagaaacaaaaactagttccaggacagcctgggctacacacagaaaccctgtttcaggaaaaaaaaaaaaaaaagtaaaagaaaaaaaagttttaggttgggcttggaagaggaaaaaataaaagtttttagatttacttgtttcatgtgtatgagtgttttgccttcatgttgtatgtatatccacagattcctgccttgtaacagtggaaatcagaaaaaggcatcatatcccctggaactggagttatggatgactgtgtgccaccatgtggggacagagttgaactcaggtcccctgcaagagtaagtgctctaaattgctcagccctctatccagcccctaagaagagctgtttaccaatgaaaacgaaatgcttgttttaccatcaaatctgagaaacttcaacagagaagcatccaccatatttattcaaattcccaaatactaacaattagaacttgcaaactgtccttacctccacagacatgcccagttcatactaaagcaaacaaataaatgcagggagggaaaaaaaggaaatgttgtctactaacaattaaatactaacaattagaactgaggaaataaagcactaatagtgaaaattagagccgaatatagaatacaggacacattttggtttacaacactctatgatgtctaaaacgtatcaaaatcttactgcagttcaacacaaaaaatttttaagcaatcctatttctaagtctcaagtcagaaaacaattacatgaggcaacaacacaaaggtcggggatcgctggtaaagagcaaatgcttggcttcagaagaaagacttggggttgtttatgagacccaggtgggtagcccaggtaatttccacccagggaaaaacaaaatcaaaaaaaacaaacaaacaaacaaacaaaaaaaaaaaaaaacaggaaaatctagagaagatatagctacagaagaccaggcaatgccaaagatacccccaaaatcattcactcctggtctgatctctttttctccctcctctcatcgcccaaataactannnnnnnnnnnnnnnnnnnnnnnnnnnnnnnnnnnnnnnnnnnnnnnnnnnnnnnnnnnnnnnnnnnnnnnnnnnnnnnnnnnnnnnnnnnnnnnnnnnnnnnnnnnnnnnnnnnnnnnnnnnnnnnnnnnnnnnnnnnnnnnnnnnnnnnnnnnnnnnnnnnnnnnnnnnnnnnnnnnnnnnnnnnnnnnnnnnnnnnnnnnnnnnnnnnnnnnnnnnnnnnnnnnnnnnnnnnnnnnnnnnnnnnnnnnnnnnnnnnnnnnnnnnnnnnnnnnnnnnnnnnnnnnnnnnnnnnnnnnnnnnnnnnnnnnnnnnnnnnnnnnnnnnnnnnnnnnnnnnnnnnnnnnnnnnnnnnnnnnnnnnnnnnnnnnnnnnnnnnnnnnnnnnnnnnnnnnnnnnnnnnnnnnnnnnnnnnnnnnnnnnnnnnnnnnnnnnnnnnnnnnnnnnnnnnnnnnnnnnnnnnnnnnnnnnnnnnnnnnnnnnnnnnnnnnnnnnnnnnnnnnnnnnnnnnnnnnnnnnnnnnnnnncagtgacgtaactaaatccctcttctagagccgaaggatccctgaaacctggagctttaattctgaaatgaccaccctgctggcccagagaaaaagaagaaaggagaggtcactgagagggtaagactgagggttagagaccaaagcggccaaagcgagaaccctagagacttgaatcgcgagaacacacccaaaagcttagccttgaatcccctttggcaattagaaaacctctaagactctgggaccagttccatcctccttaggtctcgctttctgcatttattttggggttttgttgttttccagactgggtcctatgtactccagacccacgtttataaataaagtgcataaacaataactctaaatgtctcttcaattttaacttccagtacattcaaaccagaaatgcaatctcaagccttcactgctttccgtgtattagatatttgctggaaacaggcgcatggagaattcatgattgtattaagtggtttttttctaaaatttcatgatcaatggggaaatgatatcataaagagttaactagtcaaaatcagatgattgtgtgacaggtgcttagtaatcaaaccagagcatctttaggtggcatcaggtgctttgatcaagaattacacctcttggtacataaagcatgtgtacactaccatatctgcctttctagccacattttgaacttaagtagcagacaagatgatatttgaactttggagtttgaggaagctctaactctgggtgcagcattccagagagggaggtcagggtgagcaaagaacagcagcctgtaacctttgggttatttgtgtattcggcaggttgatttacactttgtatattaagttcaccattttctatatcaaggcaaggtctgtcattgaatctaggactcactgattcttgctagtctagttagccagctggcccaaaggatgtacttgactccactttctaagtgagtgtggcaattacaggtagatgtcttatctccctgactttcatggtttttatgtgggttctgggaatcctcaagtttatgcatttggggtttcacccactgagccaccttttcagtcccttgaaattatctttgtagagttatgatgacaggcatacagtgggacttagtcaatgttagatggctaaatgatagattatggagaaagtgggttggcctgtccttttaaacatttcagatgcctagtggatgaaagggacaaaataaagtataagctggtgtcccttgctctgcagtgctgctttaggcttaaacatgtacttctgtgtaggtaaactgggatgggaagacagggtgaagacagggatcctgcatgatctgttctggccctgtgtgagtcaccactgggattcacacccggaaactgacaaatatgaacaacttccaggaaggtgaagaggtatttgtttttctagggaaatgtctctggttccccctataccctacactaatggttctcagctctcctaatgctgaggtacttatgaaattcctcatgttgtgatgaccccaaccatagcattatttttgttgttatttcatacctgtaattttgctactgttatggattgtaatgtaaatatctgtgtttcccaatgttcttaggcaatccttgtgaaagggtcatttgaaagggttgaaaaccactgcctacacctttgttctgttttatagaaaccctacacagagctgggcggtggtggcccacgcctttaatcccagcactcgggaggcagaggcaggcagatctctgtgtgcttgaggccagcctggtctacagagtaagttccaggccaggttccaaagcaatacagagaaaacctgtctgaaaaaaaaaaaaaaaggacagaaaaaggcatgaagaaacataggaagagtaagttccaggccaggttccaaagcaatacagagaaaacctgtctgaaaaaaaaaaaagaaagaaagaaggaaggaagggagggagggagggagggaggaaggaaggaaggaaaccctacacaaacagggtttttctgtgtagtcttttttttttttttttggtttttcgagacagagtttctctctttagctttggagcctctcctggcactcactctggagaccaggctggcctcgaactgaactcacatagatccgcctgcctctgcctgccgagtgctgggattaaagacatgcgccaccaacgcaacgtggctctgtgtagtgttgtagcctttgctgccctgaaactctgcagaccaggttgtcctttaacaaatcctgagtgctggtattaaagtcgactgcccagcaactctgaatataaggcagaaagtcttagcaacaaaggaagggacccagcttctaaacgtttatattattattattggcatggtgagtgtgtcatagcctgaatgtggggatcagaggacagctttgtggaattgtctgtcaccttcctcccttacaagggttccatgaatcactagcattaaataaaacaggattggtggactggagaaatgccttggtggtttagaatacattctgcacttctagcactaatcaaaataaaagtaagaaacaaacaacaaacaaaacaaacagatttcgaggttacaccttaatctacatcaattaacccttaaaattaaccatcaaaggttagggatatggtgaagtgctggagcatctgtctcacatgttcagcaaggccctggctctgtactagggaaaaagacactgtctaatcatgacgtgggattcaaaagccagactttatgctgctaaaatgcccaatacacaaagtgaaaatataaactgaaggaagtgtggtctgttggtaagttggttatcttagtcctcaggaacccaagacaggaggtttgccagtagcttaaagccaacctgagctacacagtgggttttgaggtctgcctaagatatcatatgagacccaatctcaaaaacagaaaaagagctgggcagtggtggggcacacctttaactcaagcacatccatggcagaggcaggtggatctctgtgagctcaaggccagcctgctctacagattgagtttcagggcagtctccaaagctacagagaaacgctgtctcaaaacaaaacaaaacaaaaagaaaggaaaaaaggaaaaaagaaaggaagaaaggaaaaaagaaaggaagaaagaagagcttggcatctatggaggcaggtggaagcattttaggaagacatgggtgacaggagttcctgaaagccacctctccaagcccagaacatcagaagacctcaatgattatttcatttgtttctgaggcccattatctatgacaaggagatggccctcagaaatgtagaaaggttcctctggagggggaaaaatggcaaacggtgtttacagctttgctcctgtcagggttgagtgccagatgtttccctctggattccaagattgtgttattagctctaaaaggcttccttgcccaaagataaaggaatacacaacttgcccgaagatagtgcagatacatgggcaagttaatcctacattaggacagcaaagttccctttgctgctatctgagctcaaagtttggagttggcaatatagtcttatctttcctctctctccctctgtcttagggttttattgctgtgaagagacaccatgatcatggcaactcctttttttttcatcgtttttttcttacataccaatcacagtttccccttcctcctgtcctcccattcctgccctccacctctcttctaccctgctgccactcctcctctgtcgccactcagaaggggtaaggcctcctgagtgaattaacaaagcatggcatatcaagttgaagcaggaccaagctcctccccctgtatcaaggctgaacgagtcatcccacccatagggaatagattccaaagagccagctcatgcatcagggacaggcactggtcccactattaggggccccacaaaagaccaagctacacaactgtcacccaggtgcaaagggcctaggtcagtccctagctgtctgtccagagtccatgacccccacaagttcaggtcagctaactctgtggtttccctgtcatgataataacccccccacacacacttgctcatataatccctccatcctctcttcatttggactcctggagttcagcccagtgctcagcccagtacttgggtggaccatggcaactcttatgaaggaaaacatttaattggggctggcttacccttcagagatttatgatcatgacaggaagcatggtggcatgcaggcaaactggctcgggagatggagctgagacctctacatctgatcaacaggcagcaggaagagacagaaacgcactggacctggcttgagcttcttagatctcaaaggatgccccagtgatacacttcctccaacaaggccacacctactcctccaagagcataactcctaagagtgccacttcctggggggtcattttctttcaaaccattatgctctccctcccttcctttcctcccgctttgccttcttcctgcccttccttccttttatttcctccctatatccctgcctctgctctccctccctcccttccttctcttatttttttttaggatggcctgggcagggggtacatgcctatagtcccagcgagcaggaggcagaggcaggcagacctctgtgagttcgagaccaacctggtctacatatcaagtccaagacagccatggctacatattgagaatctctcaaaaaataataataataataacaaatgaaaaaaaaaaggcttcatagggcttggtggtacatgcctccaccttcaatcccagcactcagcagccaaacactagtgtgtttgtgagttcaaggccagcttggtctagatagtgatttccaggtcagcctgagctacatactgagatctggtctcaaaacgaacaaataagaaaccaaaccaaaaaaaaaaaaaaaatacacacacaccaaagcttagacagaatacatatactgagaaaactcacaaaaagtccatttcctaccaagaaataaccctaggagtctgatgaaaatggcactaacataaccaagaaactcagttgtagctgcccctgtattttcagaacagggctccttgataaaaatgaaagtggagagaccacaaaacaatagaaatagtgcccatggaagatgcaattaccataatgagctgtaaggctagactgttattgttttgtttaaaaagaagaaaagagaaattgctgagccagacatattgactataagtttattataaggcccgtcagaatggggagactaagaagaggaacagggtaatggctgaccgccatggccggttgccacagagagacagagcggggaaacagagagacaggagacagagagagagagacagggggagagagagcgtaaaggggcagggcctatcttttaaaggggtcctctgcacctgtgtgcagacttctttcccatggaaccttgggctgaccagggtattgcctgagtggattccaccaggtaacaggggcaggccagcataatgcctgaacctttcatagacccaatgtctctaagggtctcaaaaagaagctattcaacctagactctcaaaagatgatgaagatgttgagtcatgattcattgtccagttactgaccagaaccagtttcagatctggaacccaaatgccagaaagagatggcaagatactacatgataaatgtctacagtagtgaaaacctgtcattcctcaaagaggtcatctccttttgtttggggagccaaacaaaggagaaagggcagtgccacctaggcaattcagggactcttagatgtagagtcagagttggagttgtgtgtgtgtgtgtgtgtgtgtatgtgtatgtatgtgtgtgtgtatgtatgtatgtatgtagtatatcactagagtctgcaagatggagtggaggcaaatgcagaatcgtggcccaggtttagttcacagtgaatccactgtatggacagatatacccagtggcaatttccccagttcccatgcatttaaattaaattgttgggtctggagagatggctcagctgttatgagcactggctgctcttccagaggacccaggctcaattcccatcacccacatcacaactgtctgtaactctgattccagtgaatctgacaccctcacacagacagacatatagacagaaaaccagtatacataaataaaaataatttgatgagagatcaatccacagtccgtaacgctaaggttttctttattcagataacaccagccaagcgcaagccaaagcggaccaggggcagcagggcagcagggcagccaggccagagagaagggagaagggagaagagggtctctacgtgtgcacagtcccttaagaaccgttccgtccgtgtcaccttagacttccccctcaccacgcccctcaccgcacacctgtccaggctactaggaggcggggctacagtgtctccctacaataagtcattaaaaattagattgttacccggcagtggtggcacacacctttgattccagaacttgggaggcagagacaggtggatctctgtgagtttgaagccagcctggtctacagagtgagttccaggacaggctccaaagttacacagaagaaggaaggaaggaaggaaggaaggaaggaaggaaggaaggaaggaagggaggaaggaaggaaggaaaaggatagaaattaaaaaaaaataaattgttaggctcagtagttaacagaataactacactggtcacatgacttgtgacgcaagtgttaaggtggaagcttcaccccagcctctggcctccatatacccaaagagtctgggatgttatggtgaaagttccacacacccacccctaccccatccccatctccctccaaaccctgctgcatctcagaaagtctgccaaatgatgccctcccccagagatactcaagatcactcccacagggtatttagtgtcccccagagaacagactctttcctgggggacactttcctggtctctctttccctgtctcctctatggggggggggctggaaggccaccagggagctctgtatccattaatcatgggctttttctggcttggtttgatttggtctgatttggattgctacaacggcagagaggcttatttaggtgtagaactatgtcagctaatggaaaatgtcaaatagaaaccagccaagatagcaattaaaaacatggccgaggctgggcagtaatggcacatgcctttaatcccagcacccaggaagcagaggcaggttgatcactgaattcgaggccagcctgttctacagagtgagttccaggacagccagggctacacagagaaactctgtctggtgggtggttgggacgaggctgaggatgtagctcagtgcagggcactggcctattatgaggaaggccctgggcatcacacacaaaatcacatcttgtagataagggcagaaatcaatgataacctgaaggagttaaaagatgaaatgtggctgtgtgtggtggcacacacctttaatcccagcagaggcaggtgtatctctgaagtccattccaacctagtctatatagccaaatttcaggacagccagagggttccaaatacatggaacgaagtgctacatggcgagatcctgtctcaaaacccaaacaaagacatgcagagtggagtcagaaataaagctctatggttgagtgcatgcttacagcacacaaggccctgagttcattccccagccacaaaataaacatgaaaaagtaaatagaatttgccccatctttttatttatacagaatgtcattatgtagcctagaacttgatttgtaggctggccttgaactcataaaccagctccttgttttatttcgtaatcttatccgggggtgtgtgtgtgtgtgtgtgtgtgtgtgtgtgtgtgtgtgtgtgtgtgtgtgtgctcatgtgaaagttaaatgaaaaaataaaaataaaaaggaaagacttgactactcccagtatggtgaaggagaaagtttattgtaaataaaggaagaacatagccagagtcagagacagctggtagagtccaaagtgaacatgaccctgaaccatgtgaggagggggggagccaggtgcaacagccaagagagcaaagttacaaaaagggcagataaccaaaatggttggatcatatagggatcaagagcagtccaacgccctgggctggatattttagagtagggacaggatatacaagccaatagtgccctgtaacagataggggccaagggatgctgctggaagaacctggatgccagtttcatagtaatatgttaaataggcacctcagccatttgtcagaaggtttgagactcaacaaaagtcagaggacaacttacaggagttgagtcccttcttctaccaggtgggtcctgggaatcaaagttaggtcatcaagcttggcaacaagtgcctttaaccactgggcaatcttgcccttattttatgttcttttgttttgttttggtttttggtttttcaagacagtgtttctctgtggctttggaggctgtcctggaactggctcttatagaccaggctagtctcaaactcacagagatgattcatctctgtcaacttcctgcttcctggtcataaaactgtcttttggggaatgggttcaaggtcatccttatttctccaaagtgtcttctttcagttgatgaaggaagctccatcttgggttctttctgaacccgtgaaatctcatttgcctccagttcaaaataatccatatgccaaagagatatgctgaagcatcaccgctgtgatcagcttcacagataacagcacctgattctgactgttgaaaaaggggatccactggcaggacctggaggtgtccaaagtcttaatacacagctcagcctccaggttatggaaaatagaagtctgcatggtcactgtcttagggtttgtattgctgtggtaaaacaccataaccaaaagcaacttggaactgaaaagttttatttcattttacagtgtataagtccatcactgagggaagccaagacaggaacctggaagctggaactgactctgaggtaatggagaaatgctgcttactgccttgctcttcatggtttgctcaagtctgtttgcttgcttacttgctcgcctttttatttttttttggggggggagcaattcccagcacccacatggcaactcacaagtgtttgcaactctggttctagggaattcaacaacctcacatagacatacatgctggcaaagaaaagaaaagaaaaattcatattaataaaaaataaataagtcattaaaaaattaaattgctgccaggcatgggggtgtacacctttgatcctagtacttgaggggcagaggcaggtgaatctctgtgagtctgaggccagcctggtctacagtgcaagttctaggacaactagggctacatagagaaaccctgtcttgaaaacaaaacaaaattaaattgttatgcttggtagttaacagaataaccacactggtcacatgacctgatcaaattgcacacctttaatcccagtactcaggaggcagaggcagtcagctctctgtgagtctgaggccagcctggtctacagaacaagttccagaacaaccaggactgttacacagagaaaccctgtctcaaaaaaccaagagagagagagagagagagagagagagagggtccaaagtcagccaagataataattaaaaacaaggctgagtgtgtagctcagtgcaggacactcccctattacctcgaaggccctgggcagcacacacaaaatcacatcttgtgggtaagggcagaaatcaatgataccctgaaggagttaaaagatgaaatacactttccttttcaagatttatttactttcctttgtatgtattttgtcttcatataggtatataccatgtgcgtacaatgccagtgaaggccaggaaagggtatcagatcccatggaactggagttacagatggttgctagccacaatgtgggttctgggaacagaacgtgggtcctctggaagaacaaccagtgctcttaaccactgagccatccctccagtccctcagcctactttcttattgcatccaggaccaccggctcagtaatggcactgcctacagtgagctgtgcccttccacatcaagcatcagccaagaaaattcaccacaggcttgaccacagccaaagttccctgttcccaaatgattctggcttgtgtcaagttgtcataaacctaggcagcacagtgacacctataaccctgtaataccagcacttgagagatagaggtggcgtgaagatcacaagttcaagattatgcttggctatatgactcacagcaagtttgaagccagcttgggctacctgggacactgtctcagaaacaagaaacagagactggagagacagctcatcaattaacagtgcttgctgctcttccagaggacccatgttcaaactctccacccaatgttacacagttcactattgcctgtaaatctagctcgagtggatccaacaccctcttctgacctccatgtgtaccccacacacatagcctacactcacacagacacaaacacacatgaacaaaaacaaatctttacacacacacacacacacacacacacacacacacacacacacacacacacgggatacagcacacttggtagagtgttcatgaagccctgggttcagtccccagcaccataataaactcagcatagtgttgacaagcctgtaatctcagcactctagagatggaggcagaggatcaggaattcaaggtcatcctcgactacccagcaagtctgaagacaacctaagcgtcaagataccctgctgggaaagaaggaaggacaataaacggagtgtgctggtgcaccccactcccattcaatggataaaagcttttgccaggcaacctgaggacctgaattagctccctggatcacatggtggaaggaaagttgactctgaaagctgtcctctgaccttaacatgtgggttgttacctgcttgtgcccatatctatacaataatgataacttttttttttaaagggctggactgaaggtgcagctcaatgatatagtatagcacttgcctagcacatatgaggacgaggacatagattccatccgcagaactgccaagtaaagaaataaaataaaaagtagtcagcaatggtggcacttaatcctagcacttaagaggcagaggcaggcagatctctgccaattcgaagcgagcctggtctacatagagagttctgggccagccagagcagagtaagcccctgtctcaaaaaccaaaataaaatgtttgaaaataaaaaaaagaactctcagggctgacacttgggatgaatcaattgcagctatcactattttactctcaaaggattcagatcacagcagtcaagtatgtggctggcctaccttggcttgtaacacatagcccaggcagttgggcatttgttgtctgttttgatatcctgggtgagtggcagggcatcttcactgacacttccataattacagtgttcaaaaaggtacctgaatgtgctaacacatgcctggaatcccagtactagtgagtttgaggccacctgggatacatagataatgagttcataacaagcctgagccacatagatagtgaattcaaagatacactatgaggagggatggagcaatggctcagcagttaaaagcactggctgctcttccaaagtaaccaggtttggttcttagcatacacgtggcagctcacaactgcccttaactccagttccagaggatccacctcccattttttacctccgtgggcaccaggcacacatggtgtacgtacatacacataggcaaaacacttatacacatggaataaaaataatgcaaaaattacaaacatctatgtagtgaaaccctaaataaaaaaataaataaatcactttcataataatctagcgtatgtataataatacacagatcttttcatatgatcctcacaatggcctcgtatagtaggtattactatccctaagaaaagctcccagccactaggcagcatagacagtaaagagaagaagaaaaagggaaaacaaaaacaaacctctggggactggagcagtggctcagcagttaagagcactggctacttttccaaaggatctaggttcaattcctagcacaaacaaatgtctgtaacttcagttccaggggttcatcacccttttctgccctcctcaaacattacacacacatggtgcacagccatacaggcaaaacactcatactcacaaaataataaattaaaaaaatttaatccaggctggagagatggctcaggggttaagagcactgactgctctttcagaggacccgggttcaattcccagcatccacatggtatctaacaactgtctgtgactccaagatctgacaccctcacacacacacatacgtgccagaaaaacaccaatgcacatagaataaaacataaataaataaatcattaaaaaagttaatccccctactttgaaagccctcactagcgtcttttatatgttgggaaaaacaaatgtgtttgcatgtctgttgcacaacaatgaattgaacttcagccttgggcctactggtccaaatcaacttgtttcttgtactatacacataacatgtcacagaacatttctttctttctttctttctttcataatttttattttgttttttttaagattttatttatttattatgtatacgacattctgcttccatgtatatctgcacaccagaagagggcaccagatctcataacggatggttgtgagcctccatatggttgctgggaattgaactcaggacctctggaagagcagccggttgctcttaacctctgagccatctctccagccccacagaacatttctttaaggagatgaatgtgtatctcttccccactcattaattctccatgcatacaaatgggttttctttaaatgcaattcaattaggacattatctacatagtcagaatccagtctcagagatcaagagctcagtcccataaaactgctcatccccactacccaactctaccctcacctctgctttaaatctggctacccctaacttctggcccactggctagaattggtggctgccatcaccctctccttatgtttgatgagtttgctagagtggcttatagaactcagagaagcagtgtatttacatatatcagcttattatgaaggatattatgggtgtgaggttatggagatagctcagtcagcaaagtgtttatctcacaaccgtgaaaacctgatccatgtaaacatgcttggcatggtggcgtatgcctgtaatatttttgttttgttttgttttttgttttttttgagacagggtctctctatgtaacagttctagctgtactggaaccagctatgtagatcaggccggccttgaattcacagagatctgcctgcctctgcctcttgagtgctgggattaaaggtgtgtgccaacaccacccagctacctgtaattcttgtgctatagaaacagaaacgtgagggtcactggggttcactgaccagcaggtctagattggtgagttccaggtcacagaagaccctgtaaaaggaagagatgacaactcaaagttatacaggaacacacacacacacacacacacacacacacacacacacacgcacatgaacatatgtacacatacacaatgcacatatataatgcatacacacctacacaatgcacacatacacacacacatttttagaaaggatgtaaccaaggatatagaccaacaataaggagcaagggtgcataggcaagttctggaggggtcccagcacaggtagctctgcacacaactgtgttcaccagaatatacctttgcaattaggaggaggctgtatcatttaggtgtgagtgactgttaagtctatctccttgtcaccatggcttcatctctctggggtccagtgctcatccactaacagtcagctcattagaacaagtacccttcctacccaggataagccaggctaagaccatgctggccttgaactcacagagatctgcctgcctctgcatcttgaatgttgggattaaaggcatgtgccaccaccaccagacaaaatccaacagtcttaagtgttctggagctatgagatagtttagcagttaagagaacttacagagaatcagactggttcccagtaccagtggatgaactccaactgaggggattcgactccttcttctgacctgtctgggcacctacatacacagaagcacacatatacagaaataagaagaaaatataaaaaggaaaaaagttctgtgttacataatagcatatgcctggaatcctatcacttgagagatggaagcaggggaggatcactcatgagtccaaagacagcgtggtctacattgttccatgtcagccatgactacataataagaccttgtctcaaattaaataaataaataaataaataaataaataaataaaagaattcttcgtcaagaatggggccaaggccaatatcagtggctcctgactttcactggtatggctgacaatttttttggctctatggtggcataaaaacaacaccttgtgggctggagagatggctcagaggttaagagcactggctattcttccagaggtcccgagttcaattcccagcaaccacatggtggctcacaaccatccgttatgagatctgatgccctcttctggtatgcagttatacatgaaagcagaatgttgtatacataataaatgaataaaatcttaaaaaaaaaaaaaacacaacaccttgtttaccagaaaccacactcagagtggtgtggtggtatatttgctatcccagaacttgggagacttgggcaggagtatattgagttcaaggccagactgagatacatagcaaaaccctgactcaaaaaaactaccaaagagggcctgaagagatggctcagtggttaagaatagctgttgcaagccaggtgttgatgaaacagacctgtaatcccagtacttggcaagcagaggtagaggcagaagcaggcagatctctgcaagttctatgccagcctggtctacagagtgagttccaggacagccagggctacacagaaaaacttggaaataaaaaaaaagaaagaaagaaaagaaaagaatactgttgctcttgcaaaggacctgggttcaattcccagtgactacatggtggttcacaaaccttctatggttcacaaggtgtacatttatacaacatgaaataaatctaacctcttccccccaattttttttttgtaactatgaaaggaggaaaaaggaagcaaaggaagtagagatggataaaaaggaggaagagggagggaggaagggaaggagggagagagagataatgctttgaatttagaggttttgcggagctggggaccctgggtacaatcctgtgttatagttctgttcgtggaagggagctgcagctcccagccagtcatgtgatcaagggctaaacaactcacaccctgtgcattgaggctgagctaagatgttctgcagtttatgtgtattgatgcttttttggctttgttttgtttgtttgttttgttttttgagacagggttttctctgtgtagccctggttggctgtcctggaactcagagattccagctccctttgcctcccaagcgctaggattaaaggtgtgggtcaccactgccacccagctccctcccccttttttttaaacagggtcttactgtgcatcagtaggtgatctgaaaatggctgtgaagaccagggtgaccaggaactcacacagcctgcctgtcagccttgagtgttattatagctggaattaaaggcctgtgaccacggactggcttgttgtttaagaggagggtctcactaggtagctcaggctttcctcagactctagatccttctgcttctgcttcagcctcccaagtgctcagattactgtttgctgtgggtgtgggtgtgggtcagaagataaactgggagagtctgttttctttgtccatgctaagggttccagaggtcaaattcagttcagcagtcttgagaaaattgcttttccctgctgagtcaccctcccatgctggagcctggttttgacagtctcaggtagcagaggcctggcttcaaatttggtatataccagaggatgactagtaaccctctctttttaagggcctatttctacagttgcttttttgaagctatttttagactttttatttattttattattttgggttgtatgaatgtgaagcagtactttctcatcgggtccctctgctcacaaataacaacatggagacattattatttatgaaaacttgtccttagctcaggcttgttctcaactgcctctcataacttaaattaacccattaatattaatctgcatcctgccttgtggcattatctccttgctgcccagcctggtttccttcaagtctggctggtgattctacctccttcttcccagagttctctctctgtcaaaaagtccagcctatgcctgcctagctattggccattcagctttttattataccaagcacagcaatatatcttcaaatagtgtacaaatatgccacaacatgaatgttttgcctttatgtaatgtgtgttcaccatcacatgaattcctgatgcccaaggagataagaaggcattggatcccctgggactggggttacatatggttgtgaactgccttttgggtgctgggaatcgaactctagtacttttcaagagcaacaaatgcttttaactactgagtcatctctccagatctgtcccatcatcttcgagcctcctgctcctacttcccaagtgttaggattatagacatgagccatggtacctgaggccagtattgagattattaaatgaacttttggtttgtttgttttttgagaaagggtttctctgtgtaaccctgccagtcctagaactcactctgtagaccaggctggcctacaacttggagatccacctgcctcttcatacccattagaattaaaagtatgcccaccactgcctggtttaaatggacttttgattttatgttttcaacctatgatggatttttctggtggaacctcatcccaaatagaggagcaaatgtatatctatatgtatatctcttatttaataatctaattacataggatagactatgaactattctgcagtttctgaatctatagaaagaacttaggtttgcagagcatctatggtcccaagactccactggaagtaaatggtttcctgtgttctttgtttaatgaataattttttttgaaacagggtttctttgtgtagctttggctgtcctagaactcactctgtagaccatgctggccccaactcacagagatctgcctgcctctgccttcctagtgctgggattacaggtgtgcatcaatacagactcgatatgtccttattttgtcattgatcaggaaaaaaaagaaaaaagatggtgtgttaaacaaaacataatgttaacttttttgttgtttgtttgttttttgcctagtaagatatcacacctcaaacaccagatactgaggagactgagacaagaagattgtttgaacctaggagtttgagaccaccctgagcaacataaagaaaacctgtctattatactaaaaaaagacataactgagaattggtggcacatgactagtccagcactcaagaagcagaggttggatgatcagaaactcaaggccaagttgagctacatactatttcaaaacaaaaacaaaaaacttactgtgttcaagaaaaaaaattgttaaagcattcttgctatgtttttcaggtaagtctggaacacctgggtttaggggacccttccacctcaatctctgggattataggtgcattatctatctatctatctatcatataacttttataaatatatttattcatatataatatatacttagcacaaaagactgtataataaaatatatgagtacctgcttacataaatatttgttatataatgtttatattacattttttacttattattatctcttgtatgtggacatgtgtggacatgatcagaggaaaacttgtggcagtcacttctctcctttcactacataagttccagggattggattcaggtcggggctgactgcaagtgcccttgtccactgaaccatttcagcagccctagcaattctcttaataacctcatgaagtaggcaatattattatccataatttcaataacagaatcacgttgagagtgaagttactactcagcatcattgttttcgaggatgaccttgcactcctgaccctcctacctccacccgccaagtcctgggattacaggcatgtgccatcacacctggccaccattggttttctataccaagttgaactctaaaatcccatcaatgacactccactgtagtcatctggaattgtagggagccgtccctgcattctccattacaatgatggtgcctgcaggcactaaatgtaaattaatggtaattttccatttccttgatctctgcctattccgtggctcatatggcctgaggagctgaagccaatcatagggtgacacgtcccaggcggggctgccagcctttattaggggacgggattcttggctcggggtctccgctctggtaagcttatgctctcctctcaagatgcattaaagctttcctgcagaaggatccgagtgtcctgtgtggttattgctggcgagaccatagctcgggacatggaataccctttgttactgggacaaaaggataatcatcatcgaaagatgatgtccatgcctgttgcctataaattaaagtgttagatttacctatctctggaacgtctgtctctgtctctgtctctgtctctgatttctacatcaaaggcatggagttgagttctgtgttaaacagaagatcgacagcaggctgggaataaagttcagtagtagaaagcttgcccagcatgaatgaggactgaagttcaagcctcacctactgaactttgaaccccagccagctgtgagctttggactgagctgtgtgccttattcctgtatacagggcactctgtgtgcctggaggaaggggaggctgcacatctgccattgaaatggctggctggaatgaacagcaatatacatggagggaagttgataagaaagacagggcatctttccaaatacccttcttcctattcgtttgtcctcctctctagcttggtttccttcttcctcatattcttgagaaggcaagaaagagtagaggaaactgaaaggaaatttctgttcaagcacaaaagaaataaaacatgtgatgatttgtttttgttttgtttttgttttttcctgagacatggtttccctttgtagctttggaggctgtcctggaactagctcttgtagaccaggctggtctcgaactcacagagatccacctgcctctgcctcccgagtgctgggattaaaggcaagctccaccaccaccggcaacatgtgatgatttttttttaagattttatttatttattatgtatacagtcttctgcttgcgtgccagcagagggcaccagatctcattcaaggtggttgtgagccaccatgtggttgctgggaattgaactcaggacctctggaagaacagtcagtgctcttaaccgctgagccatctctccagccctcaacatgtgatgatttaagtcaacatttttatccttctgaacagccattagtctatcatcttctagaaataaaactgaaaactcagttttcctcaggacttttcattctagagaatacattttcattggatcagcacactgtaagcctaccagagctctgtcataatttttactttcacataacaaaaatattcccatgcccaccttaatgactcagccttgaactcaagtcaggtctgaggagaggagataaaagtgcaaaaagtctcctccagaggaaaacacctcagtcatcaaccacagtagcttccatctagatacaactcttgactattggttggttgctagccaaggatggctgatggcaaatggtcctctgatgagtgccaggccccagagtatcagggacaccacagcaggtggaaagtatttttgtctagaatctcatctcctcatcccagtccctgacaaaagtgaccccataattaggtggtgtgggatgaagaaaggaagacctgataggtaggtcgacatgtggttccctgcacagagcaggggcttgagcatcaaagcagagtacagatgctcttccaggtagttagagaaattaaacccacagcaattagatcctcagacagccatattgtaactgcagggaggagacaggaaggagctttgaaagaaagggagggacgagagagagagaaagaacacaacttgaatgtctaggtctgttttcttgggcaaagtactgcatcttgacattctttcctaggaatacaacggtatcccattgtcttctttcataattttctgagtttcatttttgtctcttcctgcagttccactctcttataagctggcccatatcaatattctctctctctctctctctctctctctctctctctctctctctcactgtctccccctctgtgtagtgtgtgtgtgtgtgtgtgtgtgtgtgtgtgacttcagtgcacttgagacagagacttgccgtgtagccctggctggcctggaattctgtaatcatcctgcctctgtttcctaagtgctggaattataggtgtttacaaccatgataaaatagaaattgtcttttattacttcaactgaaaatcgcagcacttgggaggcagaatcaggaagatctctgtgagttccaggccagccaggtctacagagcaagttccagtatagccaggactacacagagaaaccctgtcctgaaaaaccaaaaccaaccaaacaaaaatagccagctgtggtgatttatgcctttaatcccagcactcaggaggcaaaaaacagatggtctctaagttggaggctacacagagaaaccctgtcttgaaaaaaataaaaaacagctgttttcttttttttaattgggcatggcggtacacacttttagttcaggagacagagacaggcggatctctgtgagttcgaggccatcctagcctgcatagtaagttccagacaagttatagagaaactatatagagaagactccatctcaaacaaacaaaaaggtttttttttttttttttaaattaggcatggtttggaagctaggacagaaattttgtgagctttaggccaacatggattatatttagtgagttcaaagccaccttgagccatatattgagacactgtcttttttgttcttgttgttttgtggggttttgtttttatttttatttttatttttttgaggacagggtttctctgtgtagctctggctgttctggaacttgctctgtagactaggctggcctcaaactctgcctgcttctgccacctaagcagtgcagcaccactgcccagctggagatttcttttattaaaaataaaaatggggaggtgggctggagaggtggctcagcagtaaagagcactagatgcttttccagaggacccaggttcaactcccagcaaccacatggcagttctcaactgtaactccagttccaggggacaacacccacacacagacatacatgcagacaaaatagcaatgcatgtaaaataagaataaataaatcattaaaaagtatttctaaaaattttgaaaactaggccaggtgatacctaggacaacttcctgctttgtgatgcgccatttctagtattgatcccaccatgctactcatgctaaaactggccttttgttgttgccaagcaatgaggcaattgaaaaaattattgcctgaagcaggcaaggagtgcatgaagattatttctaaagcaattctgcccacaaaggaaagatgaagatttttccattggattctgtgcatattcatacagggaagtactttggaggtaggcacgttcttgacatgattaaagtgacatttttgtttttttaatactttatttttgtcttatgtacatcggtgttttgcctgcacgtgtgtttgtatgagggcatcagatcccctgaaacagagttacagacagttgtgagctgccacgtgggtgctgggaattaaacctgggtcctcttgaagagcagccagtgctctttaccactgagccaactctccagccctaatgtgacgtttaaaaaggaaaaatgggaggcacactttagggcatacttagctcaaactcattatttttcttttcaccatggcaaaattcctggcagaaacaacttacgggaagtttatttctgctcatggtttcagagggtctagtatatcatgtcacagaaggcatgttggcagcagacaggtgtgtccaaagcagtgagaggactccagtgactataagtttgtctttttaaggtgcttccaaaagtcctggggttgtataaagaaggaatacaactgctgggcaaggtcaaagacacaaaagtgaaattagttgggcaatgcctgagtcatccttggtatgcagtaatctgagggccccgagtcttagttccattctctattgtgataaaataccccgaaaaagcatcttcaggccaggaggtggtgcacacctttaatcccagcactcaagaggcagagacaggtagatctccatgaattccaggccagcctggtctacagaacaagttccaggacaaccagagctacacaaactctgtcttaaaaaaacaaacaaacaacaaaaaagcaacttcagagagaaaaggtttcttcagagagaaaagctcatagttcaagacgaagtccatcatggtggggcaatcaagctctaccaggagcaatgagggatgaatgcaagcaagtgcttttcttcactgtatatagcacaggatctgctgcccagagaatggtcctatgtgcaattacagtgactctttccacatcaatgaacacagtcaagataatcacccacagctaggcccaggggcccttttccaagatgattctagatcctgttgagttgacagttaacactaaccatcatgctacaaatcttgaaaatgcataggttgccccatgccactttcgttgttgttaagacagggtctcgtgtattccaggctgacctcaaactcactaagtaatcaaggatgaccttaaactcctgattctcctgcctctacctctagagtggtgttagacctacaggctgcactgcactactgcacacagttttgtgtagtgctagaacagaaggcagtactttgtgatactaggcaagcactctaccaactgaaccatatccctaggtcctcagttactcttatcttgatgtcgtggaggaggattagacattttagatgactacttcttttgtgtatctggtatgtttatgtttatgtatgtgtgtgaagtgtgtgtgtcagtgttcatacacctgtgtgtgcaaatgcatctggtatcctatgaatttctcaatcactctctgccctgcttttattatttgtttgtttgtttgtttgtttgtctggaggcagagtttctcattgaacctggagctcattgattcaactagacaagccctagggttcttcctgtctcttcctgcttggttctgagaataaaggtaagctaacataccttgctgcttttttttttttttttggttgtttgtttttcaagacaggtttctctgtgtagctttggaagttgtcctggaactcactttgtagaccagaatggcctcggacttatagagatccacctgcctctgcctcccaagggctgggattaaaagcgagcaccaccaacacctgactcacaccttgcttttaatgtggatgctggtgatcaaaggtcctcatgactgtgcagcaagcactttcccaacaaagtcacctccccagcccacctgaacacttcttttacaactattttcttgttgttgttgtttttgagacaggctggcttcaaacacatagagctctatctgccactgccttcttagtgctgggatgaaatatatgtgccactgtactggactacattttatttatttatttcctttgatacagggcgtctctaattatgcagctctgactgtcccggacctcattatgtagacaaagttggccctgaactgacaaagatccatctgcctctgccatgagagggctgggattaaagatatgtaccactaggccagactattttttaatttaaaaaactgtttatacaatatattttgatcatattctctccctcaactcttcccagatcatcccccagttcctacccattcagctttatgttctttctccctcttaaaaaagcaaaacataaaatacaaaacacaaaacaaaaacacgagccaagctggctagtggaggcagactggcagtttgcttatctttgtatgcacagagtggtccaattcagtggtttcactgcacactccagctccaggaacgtctgactcctctggtcacgaagggcacctgcactcatgtgcacacactgccacacagatgcaggcacatgtacataatttaaaacaataaaaatagctggatggtggcacatggcacatctttaatcccagcactcaggaggcagaggcaggtggatctctgtgagttggaggccagcctggtctacaaatggagttctaggacagtcagggctgttatacagagaaaccctgtctcaaatcccctcccccaacacacatacacacacacacacacacacacacacacacacacaaaaagaacccaaacaaaacccaataaaaataaatctagatgacagagatatatttatctcccctacccactgtgctgaagacaggcttgaaagcaccaactgttttgtgttccattttcagtgttgagagaaaaaaaagtcacaaactctaattacctgtatgtagatgggactttctttgaatcaccagttcccaaatactaacacggagatttattattaatactaaaagcttagctttagtttagccttgttcccaactagctcctaaaacttaaattaacccatttatattaatgtatgttttgccacgtggccagttatctctccttagtacagtacatcttaattcttccagggctcactggccctggaatctctgcctctcagattcttcccctgagttcctcgctctcttggaagtcccacctatcctctcctgcctagctattggtcattccgctcttcattaagccaaccagaaggtgccttaggcaggtgaggaaggacagagacatatttacacagtgtgatcaaatatcctacacccatactgataaatcctaccagtgtgtgttgttccaagccatacacaaacataatctgtacactcaaaagagttgaacgtttgtataaaatacttcaggttctgaataaagagaaaaacatgaggctactaaggaaatgctaaaataaaaaaaaataggtgttatttccaactttagtcccacccagatgttcaatgtgggacaccttacacttctggagatcatagttacagggttcaggttctggttcatttgctctctggctgtaacactgaactcaggttgtcaggcttggcagcaggtaccttcacctgtcaacccatttcaccggcttccattttttgttgtttctggttttgttttgctttgcttctgttatgtggcggtcagaactcagggttttcaggttatgggaaagcactgcgccactaagtcatatctcaagcccttttcatcgtatttatttagagacctggtccacagtgttatgtaccccaggctagcctccaatttaccatgtagccaaggatggccttgaatttataatcctctgccttcacctccagagttatggagatgcagacctttaccagtttgtctgttttggttactttaggacagactctcctagcctgatggtagtgatgtacacttttaatcccagcacttaggaggcagaggctggtggatctctgtgagttagaggccagcctggtctacagagcaagttccaggacagccagaactgttacacagagaaaccctttcttgaaataccaaaaaatagatagatagatagatagatagatagatagatagatagacagaagacagactctctttatatagccagcctggcttggaaccttgacctttgatgtggcatgcccctctgaatatattttattacaatgggttaataaagaagctgatttggccaatagataggctgaatatagctaggtgggaaatccaaatagagatacaagagaaggaaggtggagctaggaagatgccatccaactgcccaaggaacaacatttcagagccccaccagtaagctctgggttaatttaaatataagagctagatagtaataagcctgagccattggctaaacatttataattaatattaagccttagagtggtcatttgtgaactggcgggcaggagagaaacttccagctgcagtccttcctgcctcagcctccaaagtgctgggattacagaaatgtgtcactaaatccaactaccccagggtctcagaagtattcccaaggtgggtgaagtaattacattcccatgcctcaaagacctctaaagtctctgcatcatgtaagaaataacaaatgggtgtcttttctatcaaatactgtaaattgtaatgagtgttcctctgtaccaccagccagctcccagataagcacatggagacttattaattatgaaagctcggcctgtagcttaggcttgtcccactagctcttataacttaaattaacctatttctattaatctatctcttgctttgtggccttttacttctcttatgtcttgcacctcctgcttcctctctgtgtcctctagcatctgtcccactcctagattcatctcttcttctctctctgccctgaagtcccgcctaacctcttcctgcctagctactggccactcagctctttattaaaccaattagaaggcacttggcaaagacataccttcacaatgtacaaaaggattattccacaacaataaatcttgtggttagggcaaggagttaaaatgctttttacctccctcaccttgtaagacttttatacattttgttgttgttgttttgtttgtttgtttgtttgttttgagacagggtttctctgtagcttttggagcctgtcctggaactagctctgtagagcagactggcctcaaattcacagagatccacctacctctgtctcctgagtgctgggattaaaggcatacaccaccactttgtggcagaaaatcttattttttatacaaaccaagctggccagtgagactagcgctatcagcaagcttgattgagaccctgcctcactgaatagggtgctaagaatggaggattgatttctaacatcaaccttgggccttcgtatgcaggcacatccatgtgtgtctttttctgttgctgtgacaagacaccatgaccttggtagtggacttgctgacagtttcagagggtgggtcgctgatcatcatggcatgaagcaagacagcaagcaggcaggtatggcactgagtagtagttgagagtgagactggacctggcatgagcttttgaaacctcaaagcccccaacaagaccacatctcttaatccttcccaaaacagttccacccactagagaccaagcattcaaatgtatgagcccattcttatccaaaccacaacaggccacaaacacccatttgtccacattcatgcacacacatacacatataaaatacacatgtactatatacatacttaggtacatacatattgttggttgccaggcattgggtacatacttataatcatagttactttggatgcttaatgcttaagacaaaagggtggaaaatttaaggccagcttgggaaacaaaaacagtattttgtttttgtttttgttttttcaagacagggtttccaaaaacagtacttcttaaggaagaaaagccaagcatggtggttcatgtttgtaatccaagctctcaggaagctgaggtcagaggaatgccaggagctcaaggccaacctgccctacagtataagtccctctaaaaactaaacaaaaagagggaaatttagctcagttggtagagaggttgcctagcatacacaaggccctacatctgatcctcagcaccttataaagtgggttcggctgtgtttgtctgtgatcacagcaatagaaacacaaagaaaggaggatcagaagttcaagattagccatggctacatagggaatttgagtctaaactggggtagagaacagggaattggggaagaaaaaggaagtgtaaaagaagaaaaggcagaaggaaaatgaaagctttaaaataaaggggagtgtgggttataattcagtgaaagtgttttctatgcaagacaacttaggtttgaacagtagcactggaaaaaaaatattgtaaggctgagggaatagctccctggaaaagaacttgcttagcataagactagcaagagaaaggtgatggcacacacctgtaattccagcactctagaggaggcaggcagatctctgcaagttcgaggccagcctgacttacaaaatgagttccaggacagccagagctacacagatacacagagaaaccctgtcttggggggaaaaaaaagtttgagtttgagccccctgcactatcagcaattatgaactttcttctgagtgagtgggcctttgctcatttccacagagacgatgtcctgtgatgtggatctgatactaatcctggaatgtcaatgcgcaggatgcccttacagaatgaacctgcaccagggcccagtatgccctaacaaggactgaagccatcaagatcccagccccactcagtatgagcctagagagagatcctcaaaggattccagattcttgagtggactcctgggtcatccaaagcattgtgaggcacaagacagaaccagaacaacagacttgaaaaaaaaggaagctgccacagtcctgcccattcacaatgtgtttatctctgaggggacaggactaattagacagatgggactgcctttcccaaggtggtattaggggttggctgcagtgctgatttgggatggtggtacatcatttcaatctggaaaacaaataaaatcttcttgtaggcagaactgcagatgggccaacacagttccctggaggtgtgaggcctgaagtctgaagggaccagcaggtaactgggcaccacagcctcagacaagtcattctcagcaagagcatcctgcttcctccaagggtttctttgcctgaggaaagtggaagctggcactcacattccttcaggatcttcagaaaatggaggcaagggtgatcctgaagccctatccgctttgtctggtgaccagtgccagtccaaactatactgacaagcccaaaatgaccactctcttttctgtggttcaggatttcactccttaatggagacagagcctgggctccaagagaagcaagcaatgacattaattattgggcctattttctgaagcacaaggacagtgtaactgtgacagcagatcttggagacctaaaagggggtgatgttgaatggaaagtgacttgccagtcttggtagaacatacctttcactcttgcactgtggaggcagaagcaggaggatctctttgtatgaggccagtctgatctaaataatatagtgagttccaggccagccaagactacatattgaaactctgtcccaaacaaaaaacaaaaaaacgggggaaaagtgacttgaggttccatcaggagtcaggatggagaggaggctagggagtaaggaagaaggaagaaacagataatggaatctgagaactccccccatgtgtgggtgacctatgccaggtacttggccaagtgcttggatgtgggaaagtctgctgctgctatggctttctaccctgaatccatcttgaagcaagatgaaatagggttctctgcctccctcaaggtgtccaatcatgtgtgcccaatgatagtttgtgagagatttgaaaaaatgtgcaggagtataaactgttatcagagctgtaagagtcagaacctgagccttggcagccttaactaactagttgggtcactcatcctcaacaggtcaattaaaaagacaaaagttgaagtgaaaaaaagaaatattataattggaaagcacaatgacgtctggtggcattctctactccaagtccatttccagggttctgttaagtggtatagtttaagcttacatagaagacaaaaggcatacacaactaagcagtcctttgtcaaggtgtggtcgtttcatttccagtttctctggtaaggtagtctgacaagttttcggaactgtgaaatatccttcctggagtcaagttcctctgttggctggcatctgtgacagagtcttttccttctccttgaataagacccccagggaaattgcaatctctggagagtccagtgttttaatagtctgattgcaaacgggcatccatcagggtttttagaatatctttaatcaagccaggatggttagaggtttaagattggaagagattcctacccgcggcgaggcagctcattcttgcttccgcatgccagaggatgagctggctgaggtcggaaatgccccgccagaaggctgggttcctttggccacagcttgaccacagctaaaccaccattggtaaaagggaagccgaagttctccgacaacaccaattctccttgcagccctgaagtcccacccctctgatctaggcggcgtctccgtggcgacgtgctgcgatgtgcggctgcgcaggagtcagggagccaggggatcaggnnnnnnnnnnnnnnnnnnnnnnnnnnnnnnnnnnnnnnnnnnnnnnnnnnnnnnnnnnnnnnnnnnnnnnnnnnnnnnnnnnnnnnnnnnnnnnnnnnnnnnnnnnnnnnnnnnnnnnnnnnnnnnnnnnnnnnnnnnnnnnnnnnnnnnnnnnnnnnnnnnnnnnnnnnnnnnnnnnnnnnnnnnnnnnnnnnnnnnnnnnnnnnnnnnnnnnnnnnnnnnnnnnnnnnnnnnnnnnnnnnnnnnnnnnnnnnnnnnnnnnnnnnnnnnnnnnnnnnnnnnnnnnnnnnnnnnnnnnnnnnnnnnnnnnnnnnnnnnnnnnnnnnnnnnnnnnnnnnnnnnnnnnnnnnnnnnnnnnnnnnnnnnnnnnnnnnnnnnnnngaaatgtgaagagccaaaaggaaactccaaaatgacgccttccgctgaaagtctgcagctagggatagagctggaggagaagccaggacctcctggtcccgcgggaaactgagttcaaggggagtctgggaaggagaccgaagtcaggcttccagtggcacaccgtgaatgtggcccgattgtctcttagcaaggaaacaatctcctaaactggaggctggtccttttagacacctagaagaaacaccaggtgtcatctctactgccccctttggagaggagggcccgtcggactcgggattccgacgctggttactcttttcaccccgttggtatttgatttttcgaattctaaaactgcccgcagcgcaagtcgcgcggtgtcagatgagcggccactgactacatccctagaagatccgggatcccactctggctcattgaataccctttatgctctacggggagcacaagcggagagggagaaggggactgggtagaaatgcagcccaggtgggttcggtaatctgggcctcatttccttccctgccaaggacaccgagtatatagggtttctaagtcctccactttcctcagtggtctagtaaacctttcatcctgtttacccattttccaagtaggcatcactgcgagaaccttatttcagtgcgagacgaattaagatgtactttctgggttgtgagtcttccgttacatttttgattgtgtaaatcctgagggacgaactcttggttgttgttctctaatacagtgggatttcttgtcatcgagggaagtggccaaacatctgatttctgatgttgatttccacagtttggctgggatcactcgctgcacaagcggaaaagactacccccagtgaaaagatccttggtgtactacctgaagaaccgggaggtcaggctgcagagtgaaaccaactactctcgggtgttacatggttacgcagcacaacaacttcccagtctcctgaaggagagagaatttcaccttgggacccttaataaagtgtttgcttctcagtggttgaatcataggcaagtggtgtgtggcacaaaatgcaatacggtaagtggcaggaagacgctctctctcttaggtctgacatgcatggcttcacctgctctagagcctttcttatctgtgcatcgcccaaatttgtttacattttcttttgtgtaagcagatttggaatttattaagagattttcagtagaagcgttaggacagagaggtgctcaaggaaagaacaaacccagttgtgggtctggggctcttcaggaagaagtgcccccatcagtttctttactctccattccttctagttaatggccttgtcccctctttttctgctctttttctcacttctgcatcttttgatggtgtcaaatgaacgcatgtctttagtccctggctctgtatatgcttctgcttctggtgttttagcctcatcttttaagcaagagacctcaaagcaaggacagaaattgatgctcagaatcgccattcaggatacatgatagtggcaacttaattgctgtgtgtcagccattgacatatgtagaagtgtttggaatttggctgaaagtaaaaataaggcaaataactttttttccgtgtaatagaatccaaacatagcacttggatggctagggagtagaattgcttaagttccaggcaggactgtatactgagaacctgtctcagaagaaacaaaaaggaaaaatgagtagtttcctataagaaagacaagccgggtggtggtgaacacctttaatcccaccgcttgagaggcagaggcggatctcagtgagttgaaagccaacttggtctacaaatcaagttccaggacagccaagactgtcctgttacatagaaaaaccctgtctcaaaaaaaaaaaaaaaaaaagaagaagaagaaaaagaaagaaaagaaaaagaagaactggctgtggtggggcacacctttaatcttagcacttgggaagcagagacaaaagtggatctctttgagttcaaagctagcctgatctatagagttccaggacagccacggcttcatgaagaaacccagacccagtcttgaaaaacaagatagaaaagaaaaaggaaaaaaaaaaaaaaagataagaaatgggtacctggtggtgtattttagggtatgagcgtttgtgaagaagaggacatgagagtagggaacagttttaaagagagtaacagttataaataattggaagggaaatgttatcagtaagctatatagccaatatggttacaggcaggaataaaaatcaaaagggtggatgtggtgcttgtttaacaattgtgtatactaaaattgggatgctgcagagaaggttagcatgtcccctggacaaggttttcacactaatctctggtgtttggggtgattgggatagaaggatacaagtggcaaaacattacagaaatggtagatgctagaagagacaggacccctccctccatttttaactcaccttgtgtgagtagacagggaatgttatatggtgactctggaccaaaacatacttggggttacttaaaagaaacattactctacatcaagaaaatcttgggccagtgacattgtttaatagaaagagcttgccacccaagcctggcaacctgaatttgattcccagaacccacataaagggtggaagaagagaactgattccttaaagttggtttttctgactgccacatgcctgccatggcacactttctgagagacacaccacactcagcaacacaaacactaataataaattttaaagagagagaaaaaaaaaaagttgggtgctcagtgggcaaaagctaccaagcctgccaaactgagtttgaccctcaaaacccatgtgatgaggctggagagatgtctcaggggttaagaacactgactgctcttccagaagatctggattcaattcccagcacctacatggcagttcacacctgtctgtcactccaatttcaggggaccaacacccatggcaaaaacaccaatgcacataaaaataggaacctgtgttatggaaagagaacaaactaccataggctgaattgcacatgcttgctgtggcatgagaacccactgccaaatataaataatttttttaaaaaagacaaaaactatttaagtaccttaagtgtctttataaagaccataggcaaaactttaattttgaggaaggaaataatactatggtggttggaaccaaattttcacttctgttaatggctgtttattttacacacaacactttcaaaactatgttctggtagcaaggctgcacaaaacttcctttttttgattacagttgtgtcccagtgatttaggaaactgccattgttgacacttctttgacctagtcacaatattttgaaggtaagcacacataggtttgattcccatccccacatgtggctttgtaactctagatccaggagacctgatgtccttttctggccaatgagggcaccaagcacatgtgtgttgtttagacatacttgcagacaaaacgcccatacataagttttgttttgttttaaatttactcttaatatctacttctgttttcctaatttaaaaatctattttagccaggcagtgatggctcaggcctttaatcccagctctcaggaggcatagcaggcagatctctgtgagttccaggacagccagaattacacaaagaaaccctgtctcttaaaaaaccaaaaccaggggctggagagatggctccgaggttgagagcactgactgctgtttcagaggtccccagttcaattcccagcaaccacatggtggctcacaactataatgaaatctggtgccctcttccggcctgcaggtatacatgcaggcagaacatgtaaaaacaaaaacaaaaacaaaaacaaaaaaacttaaaaaaaataacttactttcatttttaaaaatttcatgtgagagccgggcatttgtggcatatgcctttaatcccagcacttgggaggcagagacaggaggatctctgtgagtttgaggccagcctggtctacagagtgagttccagcacagcctccaaaacaatacagagaaaccctgtttttggggggaaatttttatgtgtgttagtgggtctacattttccacaatgagcatgtggaggtcagttcataggtcatggttctcttctaccacatgggctccagggatggaactcaggtcctcagcctactgagctcagtactaacttcatctgtcctttgctggttctcttgacttcatctatttgtccttgctgtcctggaactcagtgtagaccaggctacccttgacctcacagacatctgtctgcttctgcctccccaatcctgggatcacagttctgggcccctaacttagacataatacctatttctgtcttcccatatcttcatgacttaaaatgcttgggaatagtgtaggctgtcttcttttgttgttgtgttttgagacagggtctcatgtaggccaggttggcatcttctattttactatatagccaaggatgtctttgaaaatcccaatcctgtctgataattgctgggatgatagacaggtactaccacacttggctgtcttctttatttttttcccctttttatgtgtatgggtactttgcctgtatgtatgtatatatgtgtgccttgtgtgcagagtgtccgaggaggccagaagtgggtattggattccctgaaactgtagttacagatgtttgttagccatctcgtgggtgctgggaatcaaaccctgggtcctgtggaagagcagccagtgctccagaaccagctggtttttctttttgttgttgttggtattttttttggggggggtggaggacagggtttctctgtagcactgggtgtcctgaaactttgtagaccaggctggcctcgaactcagagagatctgcctgtctctgcctcctgaatgctggcattaaagatgtataccaccatgtcaggctctcttttctttttataggttatttttctctctactcagcttctagaaccaaagcagggcaccaagaacagtttttcccccttggctttgtgacattgacaaatacttctatttcctttggtgtttagttctgttgggggtagggtgggttgcaacctggtcttaggtagccaaatcctgccttgagctcctgaacttcttgcctctacctcccagctgcccttggctttgtttttgtaaatagtaatagcattgtctggtctgctagtcctctggaaacaggctggctgagaccctagcacttgaggctgaggcacatgggtctcctgaggagttcattatctgatgtgccagttcaaggttgcaaactatctgggaggctgaggcaggtggatctcttgagttccaggccagccagagctacatagtgaaaccctgtttcaaagaaaataaaaagaaaactatgatctgtgagggagattttgattccagaatgaccaggcttcaggtgtctaaagagagttggaatgtgctagactggaagcctgaccatctaagattttactttacagggtttgtgagacatggggacgaaataattagggtactgctccagggagagaaaagtccaggaggaattgctatggattttactannnnnnnnnngaaaaaatccagatgatggagggagacggtaaagagagaagtgtaagacattaacctgagataatgttgtgcttttatcaatcagttgatatttgggagaaggtaagtctgtattgggagttactaatttacaagattattgaaatttctatattatatggaataaaagacacctttggcttcagtcccataacccttacttaaaatttcaaaatttattttgtatgtgtattttctgggcaagatgttcttcgtttttctgtgaatttttttcaaagatgagcactattgagacaaaatggttaaaaatctttgatctttaaaagaggaattacatgcctacccttggagggaaaacctgtatttacaaggccagaactaatacagagcagactgggagcctggtggaaaacagagtacagacaacagtcaggtgttgcaatagaagggtctgacgtgcagtagaggtgttttgtttatttagaaaggcttttgttgttgggctttttgtttggagttttgtttgtgataggacctcatatggtctaggatggccttgaactactcctggtgttagggttggcccctggctctagctctcaagtactgcaattattggcacaaatcaccccatgtgaagctagttagtttttgagatggggtttcctttccaatgtagcccctgctgcactgtagatgaggttgtaaactaactctaagtagttttccctgcccctgctttctgagtaagacaccatgcctggcagagagatttaagttacagcggaattcatttctcataatgccctctagccaaaaactaccagggagccatgtagtggaacaagtgagataacatcttttggtctaggtagagataacctctgtgtgggagggagggggcctcccctctaagagggtatcagacagaacttggaaaggatttgtgccaggtgcttttggggggaaatcttaaggaaataactctgctctggatgggatactgttgtgaagtgaaaggtgagttcctcctaaatcctttctagaatgaaggtaaagctatagctggtaatgatgaagcagccgctcttatccatcaggttaaggacatgtttaatctgctgtggctctgacagtagtcacgcttgatctttatttgagatgagtagagaacggcctgttctgatgctgatgaacaccaaagccagatatcaggctagctctcaggctgctttttctttctctatgtctcctaaagtcatggtcatagatacgttgctgaggtcacagatggactttgtagtcatgaagtatagaatttaattgctgcagctggttgtcgaatagaagggagaggttttaggcaacccagttttggaggtaggatggttaagcatcagcactgagaaagtggctgtaatattaatgatttctgagattatctgctcagagtaaccaaaatcataaaggcataacatggcagtcactgtgacacatgaaacaaatagctcacttagttttccctggccagatattattcagttcccctgatacatacttttttccttttatgagtgagtgtgtgtgtgtgtgtgtgtgtgtgtgtgtgtgtgtgtgtaagtacactcacacatggcatgcatatgttatatctttgagactggatttcattgtgtagccatgggtagcttggaacttgggtagatgaggctggtcttgaactcagaaatctgcctgtctctgcctcttgagtgctgagattgaaggcatgtgcaatagtgggatacagtcttttagaggagggtttattggtcagatgtggctgtgctggcttataatctcaattacttcagagactgactaactgagggaagaagagcaaaagtttttgatcagcagggctagagatggctcagtggttaagaacacctgcctgcttttgtgaaaagttgagggctatatcgcctgccttcctatcagcgggaagcactggacttgattcccagcactttttttttttttttttaactttttgtttgtttgtttttgttttatgagacagtttctctgtagctttggagcctgtcctggaactcgctctgtagatcaggctggcctccgcctcctgagcacttaaaactatatatggtgttgcacatttataatcccagtattaggtagagagagataggaacatctggaatttaaggcagtccttggatacatagcaaatctgaggacaatttagatgacgtaagaccctatcattaaaaataaattaaaaatagggcctggagagatggctcaggggttaagaacactgactgctctcccagagaatctggattaaattcccaacacccacatggcagctcacacctgtctgtaactccaagatctgacacccacagagatacatgcaggtaaaccaccaatgcacataaaataaaaataaattattaagaaattaataagcactcgagaggttgaggcaggagaatctctgtgagttcgaggccagcctggtctccagagagagtgccaggataggctccaatgctacacagagaaaccctgtctcaaaaaaccaaaaaatagaaaataattagtagaattcctaggggtagccttatcctctctgaggaatagatggaaggtggtggggggtagtgggagaagagaaggaactgtgattgaaataaaaaattaatgaaaacaaaacaaaaagaaaataataataataaaaataaggccaggcgatggtggcacacgcttttaatcctagcatttgggaggcagaggcaggtggatctctgtgagtttgaggccagcctgcctgccgaatgagtttcaggacagccaatgctacacagagaaaccctgtcttgaaaaaggaaacaacaacaacaacaacaaaaaaaaaacaaataaaagataaaagttcaatgttagcctgagctatagaatgagtttaagcaagcccaggccagttagtgagaccctgtctcaagataaaatgtaagggcaattgaggtcactaaggggtaaaatacatattgtgcaagtggaaacaaggtagaagatgagctaacttattaatgttgtgcagccatggcatgtgtgtgccattaccctcacactctctcacacacacacaccatactaaacgggagctggagctatagctgggtagtagaatgcaaagcctgaggttcagtctcccagtattagagagggggtccaggtgcagattgagcaattaagtgcaagaccactcagaggggctctggaggggcaggggggttatggtaatagctcaagagataaagtgcttgcctagtgcagtgccctggtttagacccttaatatccacccacccaccccccaaaaaaggtggcacatctgtaatcccagctatttaggaggtgaggaaagaggttctccaagagaaagcctgagtgatgtagactacatatctccaaacatttaaacaataattgtattggacttcgccaccaggcatatgtatctttattctccccctcccccctcccacaggctaacaggtcttctatcagatgaacatannnnnnnnnnctatcagatgaacatattttatagttagtggagaaaccaaattatcctcctcctctccctctacgattacagaattagtgctttccttatttttaggactaattttggttttgttttggtgacagggtagtggagtctcagtaagtggtcttggatagccttgaacttgatatataaaacaggctagcttagaactcacagagtattcctacttctgcctccctagggttgggattaaagatgtggctaccacttccagccagacaatttgatattggttgttttgtttttgttttttgagacagggtttccctgtgtaaccttgtctgtcctggaattcacagagatccacctgcctctgcttcccaagtgctggaattagcaggcagtttgatttttattgggaggatatttaggtatagggttgccaggttgctaagttatttctcttggtgtgtgtgaatgtttctagttggaaatgtttctgtgtccctattttatattcactaagtttctgtgcaaacttgatccatgtgtaaggctttaggaagatcaggagttaatgagtttatgccccttatgtgcaatgatagtagacttgtttgttactgccttttgtcttttggaaagcatctcttggatgagatttgggcatgtttagtgtagccctttgctctttttaggctatccttgttatgtaaggaaactaatgatattcctatattccccagcttgtgctgggcatgtaccttagaaatgctctgcctagcatgacgagggcctggtttcatccccagcactgcagaaaataaggtaggatctgagcatggggagtaggaggaagggcagctttcctcctttaggatattgatggtttctttgttctccaggagatgatagaccttggctctgctctgtggggccacaaatcacgttctttctctacatctccagttataatccttagatgcatgtaaacccatagatacactaccatgcatttacaaacactggtacttccagttgataaatgacatttgtataatttgatctgatctgagccctttatttcaggagtagttcatttgcggtttcagctgctgggtactgaacagagaaggaagatgttgccccttttgctgctcatagccttaatccaagctgtatctttggtatgcattatagtcagtactggaattacaggggtgtgccaccgagccgctggacatttttctgttaaatcccagtatggttgatgagaggttgcgatggggtgctgctcagtggccaaacatggacttactatgcctaataccagcaaggaaaatgaaaagagtgggtgggagcttagacaaataagagtttgtcctgatccgggcattggtggcgcatgcctttaatcccagcactcgggaggcagagacgggcggatctctgtgagttggagaccagcctggtctccagagagagtgccaggacaggctccaaagctacacagagaaaccctgtctcgaaaaaaaaagagtttgtcctggtgacatccataagtattacttcccttcctgagcctgaagcacaggactgctttttcctgttcttgagaaacacaatctggattgtcaggtttctttacattaaaccatacttctcagaccttttactgaaatacccctagactgacagtactgggccagtatgaaatagccttggagttctaagataatcttaaaaatatcataagtgttggtgcctttattcagtgctcagggagtcagaggcaggccactctctgtgttcaaggccagcctagtccacagagctcgttccaggacagccagggatacacagtgaaaccctgtctcgtatatttttctttattaaatacatatatatttaataaagaaaaattgtattaatttaaaattaattgtattgtattaatataaaaataccttgtttgtgggaatgtgtctcaggaaagttcatgaggctcagggtttggtcctcaacacacatacacacaccctgaatactgtatggagtgtggaaacgtctgtctactcatcaaatgagtactcccagatgaggtactggtttcttgcagaaaccaaagcaccacatacatatacatggtacatttatattataagaaatttggacacagcataaatgttgaagaacagggaatttattcattaaatgctagcttatgtggtgaagtactctatagccatgaaaaactagaaagctgggaatagtggcatgcacctattatttctggcacttgggaggtagaatcaggagttcaagatcatctgctgaatggcaatggaggctaagaggctacatgagaccttgttctaaaaaagagacaaacagtaagtggtgtgaccagcatctgttggtacaggcttataatcccagcactcaggagctagagggagacagctgtctatgagttcgagaccagcctagtttacatactgagctctggatagccagggctatttggtgagactttttttcaagacagggtttttctgtgtagccctggtcctgggaatgaactcagcactgggcagggtgttaaagaactcacagagatccacctgcctctgcctcccaagtgctgggattannnnnnnnnnnnnnnnnnnnnnnnnnnnnnnnnnnnnnnnnnnnnnnnnnnnnnnnnnnnnnnnnnnnnnnnnnnnnnnnnnnnnnnnnnnnnnnnnnnnnnnnnnnnnnnnnnnnnnnnnnnnnnnnnnnnnnnnnnnnnnnnnnnnnnnnnnnnnnnnnnnnnnnnnnnnnnnnnnnnnnnnnnnnnnnnnnnnnnnnnnnnnnnnnnnnnnnnnnnnnnnnnnnnnnnnnnnnnnnnnnnnnnnnnnnnnnnnnnnnnnnnnnnnnnnnnnnnnnnnnnnnnnnnnnnnnnnnnnnnnnnnnnnnnnnnnnnnnnnnnnnnnnnnnnnnnnnnnnnnnnnnnnnnnnnnnnnnnnnnnnnnnnnnnnnnnnnnnnnnnnnnnnnnnnnnnnnnnnnnnnnnnnnnnnnnnnnnnnnnnnnnnnnnnnnnnnnnnnnnnnnnnnnnnnnnnnnnnnnnnnnnnnnnnnnnnnnnnnnnnnnnnnnnnnnnnnnnnnnnnnnnnnnnnnnnnnnnnnnnnnnnnnnnnnnnnnnnnnnnnnnnnnnnnnnnnnnnnnnnnnnnnnnnnnnnnnnnnnnnnnnnnnnnnnnnnnnnnnnnngtttgtgtgtgtgtgcaccctgtgtacccagtgctcttggagattagaagacggcatcagatctcctggaacttgagttgtgattttttttgagccatctagtgggtgctgggaattgaacccacgtcccctgcatgagcaacaagtgctcttaacttttaagtcacctttccagctcctgtagttttaaaaatatatgcttctttatttcctattgtcacaaatctgtttagtgtactacatatcattgtagtaaatgtttgtattttttcttcagcctcgtgatatcctttgtggggcggctgatgaagttctggctgtcctgaagaatgaaaagcttcgagataaggagagaagaagggagattgacttgctgcttggtcagacagatgataccagataccatgtgctagtgaatctgggcaagaagatcacagactatggtggagacaaggagatccagaataaaggtcattgtgacctttgtgtcctcatcatattttgtaatggttttcggctttcttagtgagcactcagcatcattattaaaataatagcattgtttccataacctatcctatgttggttgaagagaatagccaatataccaaatctgttggtacaggcttataatcccagcactcaggagctagagggagacagctgtctatgagttcgagaccagcctagtttacatactgagctctggatagccagggctatttggtgagactttttttcaagacagggtttttctgtgtagccctggtcctgggaatgaactcagcactgggcagggtgttaaagaactcacagagatccacctgcctctgcctcccaagtgctgggattaaaggattaaaggcatggaccactaccacctggctgaggctctgtcttcaaaataaaaaaatagacaaaacaaaatcaaacttactgggctatacagtaagttcaagactagctctggacagtgtaattgtctgaggacactccacctctccccaaaatgtgtagaaataccatgaagccctggttcagatctgagcagacatacacaaatgaactgtggtgtgccagcatgatggttcagcaggtaaaggcatttggcatcaagtttgaactgagtttaacacctgggactcactgaaagaaggaaagagctaactcatgcaggatgtcatgtgaccgccataggtatacataccatgttacttgtgtgtatatgcccaaacgcgcacactcgaaacatgagcacaaataaatatgtgatccattactgagaggtattatctaggttaggttaattgaggtggaaagacctaacttaattgtgagcagcaccactccatggggtagaacagaataaaaagaaggtgagcactagcatcgtctctgcctcctgaccatgggtgtaaggtgaccagctgccacaagttctggctgccatgactttgccatcaccaaaagacaggaccttgatcagggagccagagagcccctcccttcagctgctcttgttgggggtttcttgctgcagtgagacaggtgactcacagcatgttttccttcttggcacactgactgtgttgtttcttggccttagctttgttctttgttgtttttgtttgatacaaagactgaattctgtcttcctacctgataatttatcttttttttttttaatgtcagtatcaagatttctgtatttatttacattggtgggtgtggagttctgaggaaaacatttgtgagaattgattctccttccaccttgtgggcattgggatcagacttggtgtctgacttggcagtaggagccttcacccactgagccatcttgctgacccagtgtagtgtctgggaaactggtacacatttgctcttctttctatattggattccattctagaaatggaaccctgtgtttctagtaacttttgaaaaccattgtcctgtgggtgtgtttatgtgtcttcacaccccccacctgcatacattgcttattaatcttacgtctttctcaataacaatctttgcctgctcttccccctgtcctagtagggaaaactcggggagccagagcctgaaacttctctccatgtgctgccagttcctggcactggtcgcagtaggttagtgtggactcgccccactctgggtatgtaagagggatttgcattgaagcttctgcccgtgtcattgtggaaagcaattctgtgccaggtcacccacatacctgggcttccctgtgaagaggcagggtggtgaggcgaagatgtagataagattttgattttctgaattccaagttacctcagttttgtttttgtttttttttttttttgacacaggattgatttactgggattgttttgtgaaaatcttaatacatagttaagagtgaataaatattttttatgagttttttgctgtttcttttattttttatatatttgaattacaaacaagattgaattacatggtgatcccagttcccttctccctcccttcctcctctaccacgcccccaactaaaatcctacctatcctatgacctttcttctaatctacacctgactcaacctttctgctccctcatgacctctgcatccttccttttcttcccttctcactctcgtagcttcctcccccctcttcccatgctctcaatttgctcaggggatggtgaccctttccccttctccaggggacaaagtttgtcacttttagggtcttccttgattactagtatctctggcagtgtggattgtaggctggtaatcccttactctatgtctaaaatccacatatgagtgagtacataccatgtttatctttttgtgactgggttacctcgctcagaatggtttcttcgagttccatccattttcctgcaaatttcaagattccattgtttttttctgctgagtagtactccattgtgtaaatgtaccacattttctctatccattcttcggttgaggggcatctaggctgcttccagtttctggctattacaaataatgctgctatgaacatggttgaacagatgtccttgttgtatgagacctcagtttttcatgggtttttaagcctttcttaataccctgtaaaagtaataaaataattgtatactattttaaaatttcttttacttagttgtgtgtgtgtgtttataaatgtgtgcatgttaatgaagaggcctatataggccagaggaattatttcccctagagctggagctataggtgtttgtgagccactttacatggtggtgggaaccaaactcgggtcctttgcaagagcagtgcctgttgttaaccactgggacccctctagccccttgttctttgtttctgtgacaggctctcaatgtagcccaggctgtcttcagaattctgttcctcctgcttctgctttgcaaagtgctaggattctaagtttgtgtcaagtgtttgtagtgccaataagaaagactgaggggccagcaagaaggctgggtgggtaaaggtgtgtgtttctcagggtgaagacagacctgtgaagacagacctgttcaatccgcccagaatggatggttggttgtttgctttgggcttttgcggggaggttggttcnnnnnnnnnnnnnnnnnnnnnnnnnnnnnnnnnnnnnntgggaacctgctctgtagatcaggctggcctacagagatcaacttgcctctgcatcatgaatgctggaattaaagatgtggaccagtagcactgggctgaaccccccagagtaggagagaattaatcccatgttaagcttgaacaaaatttaattctttttctttctttcttccttccttccttccttccttccttccttccttccttccttccttccttccttcctttctttttaagtctacagcacctggtattactaaggtggtctcccatccaagtactaaccagtcctaccctgcttagtttatgagatcagagcagattgggcaaattcatagtggtttgaccacagacagaatctgtttctaatctgttggaataaaatgttaagctttaatcttaagtcattttaagttacttcatgttcctttgactaatggccttagccatgccattaataattccaagagtcctgctgggtttggcagtgcacacctttaatctcagcagaggtgaatccatgtgagcctcagggccagattggtctcagtgagttccaggccactaagggctacactgtgaaaccttttccccaaaataaatgaatgctagacatagtggtatatgtacttgggaagcagaggaagacagatctctgttaattggaggccaacctgttccaggctcaccaaagtgagaccttgtttcaaaacagaaaacaacaatgaaaattcccagggtctgctatatagtagactaattaaacgttccacagataattgaacaaatgggtgtttgtactcattgttgaccacattaagtagcaacaatgttttgtgttgtctttctcttgcagctctttgtagtggatgtccagacaggccagatcaccaagattcccattctgaaagaccgcgaacctggaggtgtgtctcagcagggttgtggtatccatgcaatagagctgaatccttctagaacactcctagccactggaggagacaacccaaacagcctcgccatctatcggctgcctacattagatcctgtgtgtgtgggtgatgtaagtttttccattggtctttgtgagaactaaccttgttttaaaacatggatgctctcctaacctagaaaggggtggttttctctagatttcttctcacatgagggtgaggagtagaagagagagcagagtggagattgggatgccataggtaagaaccagagacttgtgtttgatagaagggacagatggcacatctctgtggctaatagtgggctgtttttcagttcacagggtccatgtatctcctattgccctgtcagaaaataaacttatcaattcatctatagtcaggcattgtttttggctccaggagcatggcaatgaataaaattaataagcccttgcctttaatatagtgctgagtgtgacctatgagccaattatgtgtatcatacaagtcagtagcatgtcagtgtgacgtacaccatagaggagtagcaagcaggctaaaggggatggagagtaaagggaaagatgctgtttcagggggagtcaggaagcttcatttagaagacatgtgagcaaggagacttaaaggaaacatgggcatcgctatgggaatgaactttcctttctgggcagaagagaaggtagaaatctggaagctgtgtcctctggtcattttgttgtcgttgttgctttgaggtttttatttgtttgtttttgggttttgttttttttttgcgacaggatttctatgtagtcctggctatcctggagctccttttgtataccaggctggcctctaactcactggaatcctcctgccactacttccccagtgttagcattaaaagtgtgtacccctttttggaattcttattgtctgcaggagtgccagttttattctacctttgattctcccagatgtattagatcttaccctacaggttaagatcatcagagaccacgcttttgtatgcttgttgttattttacatttacttgtatgtgtgtatgggtacatatgttggtgtacatgtagagtcagaggacactgaaaaattatgcagtactctccttcctttgtgtgggttttttggggatcaaacttaggtcatcagacttggcagccagcccctttacttgctgagcttaggtcatcagacttggcagcccctttatttgctgagctattttgctggccctgttttgttttgtggcagagtgtccatatgtagctcatgctgtcctggaatttgggatcctctgtctgaacctcctaaattgtaagcatgtgtaaccatttaacctttcatacttaatttttttacaagatgttttcagtcagacctctatgcttttcagaaatcattatgatccttattttactaatctttttttgttgtttttgtgttttcctctctgtacatgtcacttacccctctaaggatggacacaaggactggatcttttccattgcatggatcaacgatactatggcagtgtctggtaaggttgctctcctttcagaagatttggtgtggcaaagaggaagtttaaaaattacagtagtgtgtctgggtggtggtgtcgcacacctttaatcccagcactggggaggcagaagcaggaggatctctgtgagttcgaggccagcctgatctatagagtgagttccaggacaggctgcaaagctacaaagaggaaaccctgtctcgaaaacaaaaaaaaacaaacaaaaactatagtagtgtgatagaaaataactgaccaactctatcaggggccagggtgccttatcttttcttacttgtatttattcatttgttcaggtggtactaggttgaaattaaggccttgggtatactgattgagtacccttaccactcagctatatttctcagactcccctacaacaccccctcaccaccacttttttttgagggatatggagtctctggtatagaagtcgtatgtgaactagacatgtcttgagcttgcagcagtccctcgcctaagcctcttctctggtgatactataggtataacctactataaccagattaagggattttgtgttttcctcaatcattccaccttaattttttaaattaattaattgagattaattaattgtgtgggtgggtactctcacaccttggcaactctgaggacaactctcaggtgttagttctctccttcttcccaacactttagaggtgaaatcaggaagttcgggagttcatgggccagcttgtgctatgctgaaatcctgtctcaaaaaattaaaacatgggggggtgctggagagatggctcagaggttaagagcaccgactgctcttccagaggnnnnnnnnnnnnnnnnnnnnnnnnnnnnnnnnnnnnnnnnnnnnnnnnnnnnnnnnnnnnnnnnnnnnnnnaaagcagggaataaaaagtttgttacaaaaaaaaaaaaagaaataaaaaaaatctttaaaaaaaaaaaaaaaaaacataggaagagagggctagagagatggctcagtggttaagagcacagactactcttccagaagacctgagttcagttcacaaccatctgtaatgggatccagtaccctcttctggcctccaggcatacatgtagatagaggactcttatataaaatacataaaatgaaataaatcttaaaaaaacaggaagagataggagagtgggtgaacagaaacctaagtaaataagtatgggtttcaatgttatgaattgtttctaatgttctgttttgtcatagatgacatcattttattttgttgaacaatcagggataagttcaaagaaaagttttctttgggtgtgtgaggcccagtgctgaagtcagcactgggcaggggaataaagagaagaaaacatcttgttcattattgtttgctaaggagaaaaattaatgggttttgggttttatttggcatatggcatttaaaatcaaatttaggaggcaagcatgatggggtacaccttgaatcccagcactcctggtgcagaggcagacagatcacatgtttaaagctagcttattctatacagagaggcccacgaggaggagggggtcatagtgagacccttcctttatttaaaataaataatatacataaataagtatagatagacagatgaacagacctcaaggtccttgtgctcaggcaactgttttacttctgagttacattcccagcacaaaaaacagccatctcggggctggagagatgggtcagcaaattaaaaacactgactgtcttccagaggtcctgagttcaattcccagcagctacatagcagctcacaccaatctgtaacttctgacaccctcacacagacattcatgctggtaaaacaccaatgatcataaaatttaaaaacaaaacaaaacaaaaaaacgacaaaagaattgagccatcttttttccttttcttctttttttaaatacctgagatggtctcctacagtcagtccatgcttacctcatactcactgtgtagattaaggatgaccttgaacacctgatccaactgtctccacctcctgagggcttagatcataggtatatgccctcatacctatcagggtttctatattctggggattgagtccaggacttccatgcatgctagacaagtgttctctcaagttatatctccagcactaagaattcattcttggccagatgtggtggtgcacacctttaattccagcactcagggaggcagaggcaggcagatctctttaaattgggtcatggacctccctaaaattgaatataaaaagatgtttctaaaaaaaaaaaaaaaaaaaaaaaaaattttttaaaaaaaaaaaaaaaaaaaaaaaagatgtttctagagaaagaagtctagatgaagaaatctgaactgagtactgagtatgatggcccagggttgtaaccctggcactcaaggagctgaggaaagagtaaagctacaagtttgaggccagcctaggctacagagtgagatctgtcttaacgtataccagccaggtgatgatggtagcacacacttttaatctgagcatttgggaggcagaggcagaggcaggtgtatctctgtgagatcgaggccatcctggtctacaaagtgagttccaggacagccagggctacacagagaaaccttgtcttgaaaaacaaaaagcaaaaaaagaaagcatactaatatatgtggtggaccatggagcccagcttcagtgccaggcagtgtgttgaaaagtaaagcctgtgtaatcttctgtggcgttttctcatagagggttaagaatatttgacacctgtgaatctcctacgctgcaggctcacgggatggttctatgggactctgggaggtgacagatgatgtattgaccaaaagtgatgcaaggcataatgtgtcaccagtccccgtgtacgctcatatcactcacaaggccttaaaggatatccccaaggaagatacaaacccagacaactgcaaggtgcgggcgttagccttcaacaacaaaaacaaggtatggctttatttcgggggatcctctctcctccaaggcactgccagctgtgtgatgtggctttaaactcacagggcaccctctttagaggccgtgaatgctggtgagaaattataatgggctgtgaagctcgggcttaggctctgctgtgtttgtttggatagaccatgtttgtggctggttcagtttccctgagagcactctaatctgacagtgcctcacttgcttgtgcctttttaggtgctctgctttggatttgattttcacgcctctaaaagccaatcacttgtttgtaagcccctcattttttcaccgcttcctttgtctcacacttgccactagtgtcgcttaaatcactgtgccaggtcttctgacagtgaggttgtaacaggacctaagactagacccagagcccagaaaggagacaggcttctgcaaaatctgaaaaaggtcccaatttgattcatttttaaaaatatttatgtgttgtgagtgttttgtctgcatatgtgcatgggtgtgtataccacatgcacaaggccctgatttgaaaggtggttccactagaagaaattcagaacaaggcaacccaatcacaaaaagacaaacatgatatgtactcactcatannnnnnnnnnnnnnggattaccagcctaccatccacactgccagagaagctagtaaacaaggaggaccctaaaagaggcaaacattgtcccctggagaaggggaaagggtcaagatcccctgagcaaattgagagcactggaagaggggggagggagctaggagaatgagaaggggagaagaggaaggatgcagaggtcatgagggagcagaaaggttgagtcaggtgaagaatagaagaaagggtatgggataggcagggttttagttggggggtggtaggggaggaagggagagagaagggaactgatattgtcatgtaaatcaatcttatttctaattcaaataaaaaaagatttaaaagaaagaaagaaagaaagaaagaaagaaagaaagaaagaaagaaagacaaaatcctctctgcacccacagctcccacattgggaatgagaaaaacagcctttcactttgaactctgctctgacagctttaaggatgtcggggtaatcagtgacatagaaaggacattttcccccacagatgtgtgttcatgtgattgttagaggctacacttgctttgtggaattgaatatactacctgctgcagtctgtggggtgaggtgaaagcatccttgataactgtgggttttttgtttttatttttttgaagcagggtttctctgtgtaacaactttgactgtcctggaactagctctgtagaccacactggccctgaactcaaagatcttcctgcctctgcctcccaagtgctgggattaaaggcgtgcgtcaccactgcctggcttcccctgtgtgttctggtgctttagtttgctgcacatcatattataacttctttttcattgctcttgtaggagttgggagccgtatcactggatggctactttcatctctggaaggctgaaaatacattgtctaaggtgtgaacatgacttcgtagttgtatatgataatttaccataggtttataatactatcattctcccagagtcctgttggatttgttcaaaacatcatttctcccaaggtctggaaatagaattgcatagtacatgaagctgtgggtctggcatgtttctcttgaggaaaaatctggctatcttttaaatttatttttgagacatgatctgtctatgtagcccggtctagtcttaaaattgtgatcttcccacttgtaaaatacctctcaaagactggaaatactgaatgctaccaacatgcttaagcaagaaaaggcctttgtttattatgtctcaagacagggtttctctatgtagccctctctggctatcctggaactcactctgtagaccaggctggcctggaactcagagatctgcctgcttctgcctcccaagtactggaattaaaggcttgtgacatcacaacccagcatctaaatatgtttgtttgttttgtttttctttcttaaaaggttagctcactaggtagccctggcttgtctaggacttgggatcttctctcagcctcagtgatagagtcacaggaaagtcttttaaaaagagctgagattgcaataacacaatttaggagaaaacagatttatcaataatatctgctagcagcttttttatacaataaagtgtatatgtgggtcatgagttcatgtcttgtctgcgctacttataatatctgtgacaagcgttttctaaagagaaagcaaagctctgggagtggatagttccattgggtcatagcaggtttgcactccactggccctacatagcgtcttacatacagcaggcggacactgtttgctacttcacagggtcaaagatgcaggctgactcagattaactaggatagagtcagtcctggggggtacactgtctctagtgtacagttctcttttctttgggaaattggctgagggtggttagaaattagtccctttatctgaagagaacaaggagtagtggtcatgtcgcagaatgaacaaggtgagacttaggctttagtgccctgggcttgttcctggagataactatagttcttgcctttcctggcattctaattatttaattccagccttctgtttttcctaatccagaacttacttcatttactttgtcttgtcactagcttaggtaggtaattcatgtgcaaaggaagcccacagaggtaggagcacaagaatgcccattttatgctggttatgaatgtatctctttgcagctcttttccaccaaattgccatattgtcgagagaatgtatgtctggcttatggtagtgaatggtcagtgtatgcagtgggctctcaagcgcatgtctcattcttggatccacggcagccatcgtccaacgtcaagtctgtctgctccagggagagaggcagtggtaagtccctgtgtgttccttcaggcttactgctacattgcaaatgggttttcaccttttgtttcttctttgacttccaaataagaacagtatgtagcatgtagaagtatttggtgacagacgagagaaacttaattacatacatgaggcaacagaatgtccaggctgtagaaacctctggtagaaccactgtgaggagataagcagttagttagcactactcccctgggatctttttgttgggtccctgcctgagctaaaattcttatatactgaacagcactaggggaggaattagaagagtatgaggtcacttttggatgtgatgataaatatgtagtgtaagggacagctacacctcaagaagatgaagaaagtacttgttttagttctgatcagtggttgtaaggtctcagtacctaacactggattgttgctgggaaccaaacccagggctctgtgcttgcttgaactgctctgcttctgagctacaccaatagaccccagcttctattcatatagcatattctaagagccatcactcactttctttagtggaagagacttgtgctggcactacattaagggttcagaatactgttttcaaagaactctttccttcccaccaagaattctgtggaaagcagattagattaagactactttctgtccttccagggaacctgagttcaggttccagcactcacatgaaatggctcacaccttcctgtaacttcaacaccaagggatctgtcaccctcttctggcttccatggccaacagcactcctatgcacatacttttacacacacacacacacacacacacacactttttaaaaacttaaaagccaaagaggtacacacctttttttttcccttaatgtgcattgatttttttttttttctttgcctgcatgtgtgtctgtgtaagtcacagatcctctggaactggagttataaacagttttgagcaatcgtgtgggtgctgggaattgaacctggttccactgggagggtagccagtgctcttaaccactgagccatttctccagcccctggtgcacacctttaatcccagcatttaggaggcaaaaatcaagcaaaactccttgagcactaggccagcctggtctacagagtgagttccaggacagccagggctgcatagagaaactctgtcttgaaaaacaaataacaagcaaagatagtgttatttctgtgtagatattacaaaagcagcttttgtgtttttgtttttctgtttattgctggggaaggtgggtgccgtgatgctaattggaagtcacagaacagtttgagggagttggttctctccttccatggcagttcccaggaatcaaacttaggtggtcagccttgacagcaagcgtcctgactgctgagccatctcaccaaccctaggatttatttgtaagtagttaagatgtatatttagactagagaacagtggatataatgaaagctggagaaggagtaagatttcgctgggatggtgtgcaatgaaaggttttatttattgtcatcatcattgttataattgctttctttttgagacaaggtcttactaagcacccttggctagcctggagtttgctgtgtgtggactaggctggccttgaattcacaagagatctgtttccctcctcccctgtactggaattaaaggcatacaccaccatgcccagtttttaaagggttcagttactaataatggaggtagcttgcataaagaaatactggttcacagtaactacgcctttaatcccagcactcgggaggcagaggcaggcagatctctgtgagtttgaggccagcctggtctccacagctagtgccaagataggctccaaagctacacagagaaaccctgtctcgaaaaaccaaaaaaaaaaaaaaaatattggtttacaaaggtccctggctccacatagatgccaagagaaaccagtatcccatgtacttatgtaatccacaggtgcagcaaatgtattttccctttaatccaaagtagttggtaacttgacataaataacatagtaccaaatacttcctgtagggccatgctggtaatacaaagataatagtgagctgcaatgtaataacgtgtgatggagaataactaatagctatgaacaatgactccagtgctaatcaagcgtatgacacacagagaatttcagaaaacaacgtggatattcccagtaatctggctggttatcagagagtcctgttagtcaccataaattctgttgcgccattggcatagttctatctgataatctgggttgtactatccctatgactgctctgtgcttttctttttcagggatccgatcagtgagcttctatgaacacattatcactgtgggcacagggcagggctccctgctcttctatgatatccgagcacagagatttctggaagagagactctcagcttgttatgggtctaagcccaggctcacaggggagaatctgaaactaactactggcaagggctggctggtaagtaagctccaacctgaggttgcttaacagggaggggaaactgtcttccctctgcttacccctcctcactaactctcttgctgctgacattccttagagcagagaaaagcactctcctctcactttgcctttgtgtctgcatattggctgtgggggaaaagaggttggcagtggtgataaatgcttgtaatctcagtattctataaactgaaggaggattgtaacaccaaaatgaaagacacagtaaaatatgctggtgccttgagaatttttccaagtggcaacagcaggaagggaaaggaacttcctgttgttgctgccagtgagttgtcgttaacaagtttgattccgaaaagctgaaggtgaaaacttgctttcagtgaaataattctttatcctgtttagttgggaaaatgaggtcacttttcatgagaaccaataatcatgtgaaatcaggtggtaggcatggaaccctttcctcaggcagagaccggaaggcattcctccccttcctgctctttcctagtggcgctaacggtctccttctctcccatagaatcatgatgaaacctggaggaattacttttcggacattgatttcttccccaatgctgtttacacccactgctacgactcgtccggaacgaagctctttgtggcaggaggtcccctcccttctgggctccatggaaactatgctggactgtggagttaatgacaactaactttctcccaaaatgcagatttacactaacttccaccctcggtttccttgtttggtcttttgattcccccactgtggaagctttcctgtatagtgcagacagcagtttgccgtggctggggcagttactaggaggaagctatgcagaaatccaaaaggtggggcttttctttggttggttagtggtttgttgctttgggtttttcattggtttgtttggtagatgtttttgttgtttgtttgccctttcagtaatcagaattttacacacacacacacacacccgctttctcaaccagacattgttacaaatccccccccccccattttttttttttccttaagtgatatacatctcccttctctggcttctttacactgaaacgacaaggtcatcctcacccttccttcacttgagaggtagggccccttataattgtgtggtagctgtcagactttctgtgaaagtttgggagccttgtgcgtgtgcgtgtgaacttgtgtgcctgatggtactgtgtcactgatactactcagcgtgaggattatctgtattaaagtatttataaaagaaacaattttactcagaggctttgggactagcctgtatctttttaaaaggctgacattgtaggaagtgaaagcgtagagaaacaaatcccaccaggaaaaccttgagttagagtagcaggcttggagcaggagggtaggctccatgccaggattctaaagtgatccacccctgcctgtccttcctacctgtgtatccccaagtaagaatgcctgtgtatgtgttgtcccttcctacctgtgtatccccaagtaagaatgcctgtgtatgtgcgtgtgacttcctacctgtgtatccccacgtaagaatgtctgtgtgtgtgtgtgacttccacttcctaacctcttgtctgcttagcccaggtgcctctttggggactgcagaaggcttcctggtgtaggtaaagagtatcctcttccagtctccttctgcctctgctccgggtctcatctggcctagagcagggtgtctcaagctagacgtggctgccattcatagtctcctaggacttctaggaggaactattccattcttggggttctgctggtattttctaattgggttctgtctaggaaggtatgatttgtagcgagtactttatatgtgggatatgttttctcaatacagtggagcttagcattggaagtcaccctcctgctctgttggttcatacctggggtagcgacagggtggctgtgatagcgtcactgcatgtgacagcaaaggtgtgattcgtacttcgcttgttcatctcttgaactttgtttagtctgaggctttttaacttacaggcaactgagcatcgtgccagctgttccctttcacacatcatgtcgaaaggaacctttccctaccccaccttctctgaaacacgcagtgctattctagcagtgcccggtcctgagaaatggagtcatagtcctacatccagtttctcagttgctccccgttcttcccgttttctccttgtgtcaaaatagtgtcctcatcatggcaggggttgctggggagggaagcagcagcaagcccacttgatagtgtaagtacacagcatatgccacaggttttagaataatcatcccataatctagataaataggtgctatgaacaggaaattaagaaaaatgctggatgctatgaatcttttgtctcaatttttttctattattaaactacaagctgtagatttcttagttctcacagaacttgtcgttttaaaactgacttgtatatttacaaaacaaaaatcttgagtaggatgctttgtgccgtggccagaccgtctcctgtgatgcgtttgtttgagattttctgttttaaaaatgtagcatttgactttttgccaaggaaaaataaatactgtcctagtgcagtgctgtttgagtgaatatatatggcaaggaagctgcagggaagagaccccaaaggattggttgagggcatgctgggatttgtccaggttagaataccttcctagagtgacttgctcctgctcccaagctctggggcaatactggtgtctctggggtacagatgagggtggctgtgcccaggggaagtagtgtagtgcctgaaagaaacaaaacactgactagctctaggataagtcaggatcaatgatgggtcctatctgccccaagaatgatgggaagtggcttcatagtggcctttttttgtaattggagccatggatcttcaatgttctttataaggtaggacacagtggctatagtaaaagatggtcttcccaaagctgggggtgggggtgggggagaagactgctaagtcataccagcttcatgtagctaactgtgggagacccaggagcactagagcactgagcctaaaaagtaatgcctaatcctctgccacatggtgtttaactaactgctttcgagggggaaaaaagctacagttgatgttcacatttgcactataggctaattcagaccaaactcatgttgggacctcaatggtcaaagattgcaagatggaaaaggatatgaggattagttgaagcaagttgagaatattcctagaaaagaatgacatttggacagggcctggaaccagcctctcctaaaatgaattggagtacaagatcctgaacaacgttggtgtttgtataatattctattgtgtggaggaaatgaagaataaaacaaacatctgggttggatagatggctctatagttaagagcatttgttgctcttgcagaggacctaaatttggttcccatagtgtttcacaaccatctgtaactccagttccaggggatctgaaaccctcttctgacctctgaggacagcaggcattcacatgtcacatacacacatatatatgcaggtaaaacactcatgcacataaaaaaaacttaatttctttttaaaaattaccttttagaaatgatcactgatgggctggtgagattgcttagctattaagagcactggctgctctcagaggaccagggttaattcccagcacccacatgacagctcacaattgccttatcccctgtcccaggacaatctaatgtccttttctggcctctgctgtgtattgcatatacgtagtgtacagacatacatgcacaagcaggcaaaatacacataaaaataagtgttaaaaagatttacaaaaaaaaaatgatcactgggggactgaagagatggcttactggtttacaaaactggcggctcttccggaggacctgagttcaaatcccagcacccacatggcagctcacaactgtctgtaactttagttccaggggttccaacaccctcacacagacatacatgctggcaaaacaccaatgtacataaagattaataagtcttttgaaaagagcactgtttttatgagatggccttggcactgatctcactatctagccaagaatgaccttgaagtctgattttcctggctccttttttttttttttttttttttttttttttttttttttnnnnnnnnnnnnnnnnnnnnnnnnnnnnnnnnnnnnnnnnnnnnnnnnnnnnnnnnnnnnnnatgtccccctgcctctgcctcccgagtgctgggattaaaggcgtgtgccactaccacctggctctgactctgcttcttaagttctgggattaccatatgcaccatacccagctgtcacattactcttgaatttttaggatgtcgctgtaggattcagttctatggaacatgctcagagaaaggtaaacagtggacttccctgaccctctggcctccatggactcttgctcctacttccattttcctgtcagattttgttgccaagtacatagcccagaaggactttgtggacttcctggtgctccttcctgccagcaacccctcctgccatggaagaacctccttgttcatttcaagccacgtgctgcctgcctcattccagatgagatactggctcctcccaccatcccttggtcctttacagaagagcacagactgacttcgaagtaatcttcaatgctgggtttacaggagtgaatgaccgaccatgtctaaccagttaagagttttagagggtaataggactactattatctgagatgagcagtttactggctgcttatctagatctgtaactaacatcctagtactgtgggcaggaagaaaaccaactgtcagctactgccttctataaactccactcgtctctttttaaatctttttaaagatttatttattaattatgtatacagtattctgcttgcatgcatgcctgcaggccagaaaagggcaccagatttcattacagatggttgtgagccaccatgtggctgctgggaattgaactcaggacctctggaaaagcagtcagtcagtgctcttaaccgctgagccatgtctccagccctccccacacttaatgagtgacagcccagtcctctgactggaaataatgaagtggctgttctctgagtgttaagatttagctcctaagtgtcccccagtgttggtcctttgctgataggctattaacatgtggtagagtcttctaggaggtggaagaaaactaaattacagggctgtgtacttgaagatataggagcctatcttttttttttttctttctactctcaaatttcatatctcctgtttttctctgccacacaacctcagctatgatgctcagctttgccacaggcctaaaacagtggatccagctacctatggaataacttcaagaaaaaaaggatgcccaaaagcctcaaggaagaaaatgaaattaagttaaacaagccaggtttggtgtaactgtagtatttgagagatgggagcagaaggatcaggaattcaagggaagtctcagctacatagttcaaagccagcctaagctacaagataccttgtgtcccaacacaacaaataatgatgccagaaggctgaacatgggagcataccactaatctcaggataagcagtagatggatctcttgagttggaggccagccagcactacacagtgagactccatctaaaacaacaaaacaaaagctgtcaggcccataaatcctgtatctctagtattctgtgctgagggcatttgccaatagcatagatgactacaaaattattactgtaatgatcacacttagagttctatcatagattttttgtttgtttgttttgtttttgttttttttttttcgagacagggtttctctgtgtagctttggagcctgtcctggcactcgctctggagaccaggctggcctcgaactcacagagatccccctgcctctgcctcccaagtgctgggattaaaggtgttagccaccacagcccggcaataatagttttgtttttttgttaattttgctttttgagataaggtctcacatagcatggctagccttcaactaactcctcctgcctccaaaatccaagtactgagattgtgtgtgtgtgcctggcttgggccttttactttaaagatgtggagtgtattttaaggtagtaacagattcctgagaaaggaacccaccccgaggtgcaatctgccaacagtgagtatggattgagagagaaggggttgttctagctgtacagctggttagggcaaaagaatggatgacagctttttttcttgagtggtgcaggtgtgtgtgtgtgtgtgtgtgtgtgtgtgtgtgtgtgtgtgtgtgtgtgtgtggggggggccagaggctcatgtagttcaggctgaccttgaactcccagtttctctactgcctcagcctttccaggtgctaggattacagacatgtactacccttcttggcttcagagtctcttaactttttattgtgtgtgcatgtatctatatagtggtctgtaggtggatatcagaggacagcttgtgggagtctgttctgctccactgtgggttctgactacaggaaactgaccttggcttttgtagctagtgcttttacccactgagccatcttgagggccccagagtcttgttcttctctcatacattacatcccaactacagattcccctccctccactcctcccagttgagtgttttttttcttttttctttcttttttttccttttttatggttttgtgagacctggtttctctgtgtaatagtcctggctgtcctggagctagctctgtaaaccaggctggcctggaactcagagatcggcctgcctctacctgaatcttcttttttttttttttttttttttttttttttttttttttttgtttgtttgtttgtttgtttgtttatttatttggttttttgagacagggtttctcagtggctttggagcctatcctggaactcacttagtagaccaggctggcctcgaactcagagatctgcctgcctctgcctctgcctcccgagtgctgggacttaaggtgtgagccaatcttcttttcttaatggttgcggttaacactttagaagtggtagtggagagagaaagggggaggagtaggcgtgtttattcaaaccaccacaattggattcaaccctcagtacaaaaacaacaaaattgggtatggtagcacacacttacaatcccagcacttgggcactggggaaggtgaagcagaataatgacccgaagccagtctgggttacatgagaccctgcctaaaaaagagaaagatgctagaggatcactgactgtaagtttctaaactactcctctaattactgtggaatgttgtttacttttagtgagctagtgagggttgctcacataagcaatggtgaggggttggtagttagggtttttattaataccttctagcctatcaaaaatgtagaaaactttgtctccatcaacccatatgttttatttctggaaatgagcagatactcgaggtaggcaggcatgccagcacagatagttaaggttagttgtctagtacagacagcaacactgtacaggtcatgtctataaagaaggaagtgcttagaccagcagccaggtatggtggtgcacacctgtaaacccagcacggaggtcgaggcaggatgggtagttagttacctgtgagtagctatatagttcagagacagattgggtaacaggagatagcctcaaaaaattcgctgggtatggtaacatatacctgtaatcccagcactgaggaaacaggcaagaggatctcacaaatttgagattggtttggtcttcatggtgagtgctgagtcatatagcaataccttgtttcacagagtcacacaaacaaacaaacaaacaaacaaaaacaaaaacaaaaacaaaacgggctagggatatagcccaattgtaaagcactttttaaaaaaaagatatttatttagtatgtatactgtgttctgcctgcatgcatgtatgcctgcaggccagtacagagcacaaggtcttattataaatggttgtgatccaccatgtggttgcggggaattgagtttatgacctctggaagagcagtcaggttaagataacctcgagccatctttccaacccctgtaaagcacttttgtttagcatgcacaagggcctaggtttaatccccagcacaaacaaacaaaacagtaaacaattccccaaaataagtcaggactatggcacaaacttgtaatcctaccactggggaaactgaggcagggagctgtaagttgggttcaatccctagtacagcatactgggtgctacggtggtggcacctgcttgtatcgaaccacacaaaggcagaaggatcagaaattcaaggtccactcgggaggcagaggccagcctggtctacagatagagttccaggacagccagggttactacacagagaaaatctgtctggaaaaacaaaaaggtcaaggtcatctttgttgcatcaggccaccctgaagtgccactgagtacaataaaagcattatccttctctttgtccctcctacttccctctctgcactctctgtagaatcatacatatctgccgggcggggtggtgcaagcctttaatcccagcactcaggaggcagaggcaggtggatctctgtgagttccagaccagcctagtctacagagctagatccaggacagagaaaccctgtctcgaaaaacaacaaaaaacaaaagagtcatacatataacagaaatttaaaatatcacaaggtttgccaatagttggtctctgggcagcagagacacttttgccaacctctagttgggtgcagtggcacctgtagtgcctgtaatcccatttggaagacacaggaaaatagtcatacacttaaggtcagtgtagattacatagctagaggttcagaccaactagagctacatacaaagaccctgttaattgtatcacaaaaggaggaggacataggagaaggaaagaaaaatccgtgaaagagttttctgtgcttcaaatgtctccttgtgaggtcaaggaatctatcctattcccagtagggggagccagaacttaaccaaactcggaggcacctcctgaatcaacacctaatagagtgctgaaaacaaaacaaacaaaaaaacagctgccccagagatatgcattataaaactctttgtttcagggaaacagctgccccagagatatgcattataaaactctttgtttcagggtgcaccgactcaggtctccaaccctgaactacttccccaatcctgtaaaacccattcataggactgaggggaagggcaaggcaggcagctattgaggaagtttttgtactataatgaagttttcagggcagtaatcccccaaactaatcttccctgtgatttctgtatagattgagatacaaaggcatgtgtatgcacacagcttctcaaaagtgtgtatcatttaaagccacatgggaagcccggtatgatgacatgtgcttgtaatccaatcacataggaacctgaaacagggtcatcaagaatttgaagtcagcctgtgctatatgattagacactgtctgaaaacaaacatacaaaatgtgggccagcaagatggttcagagggtaaaaacctatcccagccagaacctatttagtaaaggctgtcctgtggcttccacacgtgcaccatgccaccacacacacacacacacacacacacacacacacacacacacaatgccagatgggtactagggatgtagcagctccaggatagtgtacttccctagtgccctgcattgtaaaatagcattaacaaaaattagaaagtaaagccagatgaatcttattgtataagaaataggctattaaccacttccaatgaatgggattctataggagttaggttggtagcattttggagaaatagcactgcatcagaaaggctgattcttctagtagttgggttttgggtgatggtcttctattgtttgatttggattcttttttttgtttgttggtgggttttttttgttttgttttttttgttttttggggttttttttgtaagtatgagtttgcaatttgcttatttaactatattattagggggagcattctgggcacacatgtggaggttagaggacaacctgtaggtgtcaggtcagtcccttccactgtgtagatcccagggaacaaactcaggtgcccccacccctttctaagaagggtctgtttggcctgaacttaaatgtgggccagcctggctttgaactcacagagttcctcctgcctctgctgggattaaaggcatgtgccattatgcccagctttgatttatcttttctgaaatagggttgtatttcaaactgtccttgaaggtgcaattctcctgcctcagtctcccaagtctctctgcctggctcttggcagctgtttgactgtaagcacttcattagatctctctgaacgaatgtgaccttctttgatcagggaatgaagttgcttccataaggcattcttcaggctttgaacaaactgagtcatttattgagattttagagtgggttttacagtcctggagaaatggcagttcttcattttaactcagccagaataactatgagcagcaaggaacagaaggattgattacagaaactttaacacacagcttcaagccctcaaggctcctgccaggcctttatccaacctctgacctggagcctcataattccttctggttgtagtctaccctgtataaccacagttaggtaagaggccagccactgaaggaaaatatgtggcttttccataggactcagggcacctgagcaacctggtgggagaaaatgaaaactgggttccctgaggagctgaggttccagtaggaacagtgcactatgaagcagatctgggactcacaggaggcatcagctaccactgtacagaacaaggcagaggcaatgtgtcagttttgcctttgggaaccactgggctaaagatccagttgagctccagcctgtttgtagatatgggtgctaatttgtatgttccttgtggtatctcttccctgtgcctccgtagccagttatggctaaggttgaaaggagtttacagtagggctcttctctagcaggcaggtgcaggcctgcggaaactggtttaacttgcttttgagagtcttgactccacctcagactccttaagcctcagggaagggaagtggaggggttctggttcaagacccgaaatagccaaagagatctatctgttcttaagaaatctgttgtgccaggtggtggtggtgcatgcctttaatcccagtactcagaggcagacacaagtggatttctgtgagttcaaggccagcctggtctacagagagcgttctgagacaggctccaaagctacagtgaaaccctgtcttgaaaaaagaaaaggaaaagaaagaaaaaaagaaatctgttgttaactaggaagtctctggagaagtgttttcaaagtcaggtctcaggtcatatctgtttctggttcccactgctattctttcttttctttttctttttctttttttttttgggggggaggggggcagtggggtggagtggggtttccagactgggtttagccctggctgtcctagaactatctctgttttgaccaggctggcttagaactccaaaacctgcctgcctctgcctcctgaattcagggattaaaggcatgagatactacctcccaactagattttgttttttgttgtttttccagacagggtttatctgtagctttggagcctgtcctggaactcacagagatctgcctgtctctgcctctctagtgctgggattaaaggcgtgcgccatcaacaccgggctttaaatttagattttttgaaggccgaaatgttattgggccatagagtaagcagtgtctctcaaaaagccactcttgtcaacctactgttttctttttgaaagctgctccctgtgtagcccttactagttcataactgacagcaattcttggcctcagcctctccagtgcctcaactacaggatctaccatcatgcttatcttagttctgattttgttacatgaaggcttggctccctaccctgcaaccttctaaagttttttctgttatcttatttcccagaagtttactgtgttacatacttcaaggccaaattaaggttgtaaacagcaatgattgaaattcagcaaatggtgggaggacaagcctggaaagccaccacttgggaggtaaaggagtcaggaccaggtgcaggagtaaggagggatagaaaaggatctgtggttatttatcttcattgtatatcccacctccctatcaagaggcccttcccatttgatctttgctccctctctgttgtcccctctgacccaatagtgatctagtctcttccctggaaaatggccctgaggtactggaccagatttataaccttctctttctcaaacataacatcagttatccatcagtgtttagatgcattctgattggtaggatgcatatggtcccagagatctgtcagctagactttggcaagttaccaacttctctgtgcttttgtttctcatatgtaaatatccccaggaaaagagggtgctgtaaggtcatctttggttctaagatggtaacaaggtgatttaactcttatggaattcaatcaggaagatttgggcatcatgttgcatgcctgtaatcccagaattctggatgcagaagctagaagatggcaacaaatccaagacctagctgatgaggtacatagtgagttcaaagctagccaggacttcccaataaggtactgtcaaaaaacaaaccaagccatgcattgtggcacataccagtaatccctgcacttgggagacaaagatatgagatcaggagtttttagttgcatatggttgaaaagcagcccgagttacatgagatcttgtttcaaaaacaaaaaataagcaactcaacaagaacacgggcctgagtagaaaactatgatggaacatttgggtttgggggaagaagtgtgcatttcaaagtatctcagtgttaagaactaatgtgtgtgtgtgggggggtgggatttagctcagtggtggtgagattgcttagcaagcctaaggcagttggcacagtcctcagctagggtgagtgggtggatgggggagaaatacaaaggaaaataaaccaggtgtggtagtacaaacctttccccccaacactctgaaggcagaggcaggcagatctctgttctgaatgtgagggaaacctagtctacgtaacagagttctgggacagccagggctatgtatagagagaccgtgtctcaaaacaaacaaaagttagtgggctgggtgttaggataaaatttgaagggggaccttgggtaggggactttggcggattccatggttggcaagggtgacccaggaggagggacaaactcgccaggcagacagagtttaagtgagaaattttattagattggggagggagggagaaggaaagagaaaagaggtaaagagacacagagagaggacagaagagaagagggagacaggaaaagtcctgtctgcccccgggaacagcggggagagaactggaaaaagaacagaaagagagcagagtcaaaaagagaggataagtgggcggaggtatttcttttaaaggggtcctttgcacctgcgtgcagattagtactcatggagccctgggctgaccagagtacttactgcctgagtgcattctgccaggtgacaggcaggcataatgcctgaatccttacactggggactatacctcagttgttagaatttacctggcagaaatcctgggttccttagaaaaccagacatagttgaggatgtctgtaatcccagcatttgggagatagaatcagggggatcagaaattccaggtctacggggtggtggtagcacaagcctttaatcccagcacttgggaggcagccgcagcaggatctctgtgagtttgaggccagcctggtctacagagcgagttccaggacaggctccaaaacttacagctacacagagaaaccctgtctcgaaaaaccaaaaagaaaataccaggctaggccttgctacatgagacaatgtctcagaaaaagagttggtagaggaaaggtaacaaataattctctttgtgctacaatgtatattcatttcagacatagtcgtttctaagaaactctctagctataaaaaatatgctttaaactatttttagtaaacttattataaattatgatatttgggggctgagatgtgcaatggcagaagtctgagacagtttggaggaatcctcttcctactacatgattccatggatggaactcaggtcttctgacttggcagtagtgcctttacctttttttttcccctttgttttctgagatagggtttttatgtagttctgtgccaaaactcactctgtagaccagaatggactcaaactcacaaagatccgcttgcctctaccaccctagtgctgggattaaaggtgtgtgccatcaccacctggttgcttttaccttcttgcctgaaccaccttctaggcctgaaactagcttttattttttatccagctgtgttagcatttctctctttctgttacacaattgtcaagaagcttcttttttttttttctattgatttctatgaatcatgcctctacctctctgtaattctactttctttatccattaaaactaagcaaagtaaaggaaagataaaggtatccctctcctggggtgccccattaataccagagataagtaaatccctgaacacaccatctggcttgcttctaaactaagtagccagaattgaccagcacctggcactgtcactctaaggaaaagaatcccacccagaaagttttggccccagagaagttttcccacactgaatgaggccaagactgacaattggttaactttgctctttggactgagtccactttggacacaatccacctggctgtctcctgagccacccaggtgtcatatacctgtgatttccgggaagaaatggtacttacagaggtagactacaaattttttttgggggggggcgggcggttcgagacagggtttctctgtggctttggaggctgttctggaactagctcatgtagaccaagctggtcttgaactcactgcctctgcctcctgagtgctgggactaaaggtgtgtgccaccaccgccaggctagacaacagtgttttaactggagctacagatgaccctaagattgcttacaataaacccctttgttacataaaataaaaagcagaagagagaagtgtcttggtcacatggcaagttagtagccaacctaataatagttaaaagaccctgggtcaagctcttggtttgtaccattagtgagaatagttccttcagccacagcagttgctatttcctgaaaggacattttccccttctgatgcctcttgctgactactttatacttttaaatgtaatgtgttgtgagaataaatctagctgtataataaaggggaaaaaaatctctccacatagccctggctgtcctggcactatgcggacaaggctggccttgaactcatagaggtctgcctgcctctgcgtcactagtgctaggattaaaggtgtgtgccatcgtgcctccaggtttatgggtgttttgcttgcatgtgtatctgtgagttgcttgggcattgaatcccttaaaactgaagttatagacagatgtgaactaccatatgggtgctgggaatcaacctggccccctggaagcacagccattgctcttaacttctggaccatctacctctccagcccttgaggtggagggtcatattctgtagttcaggctattctggaactcactagatagcccaggctttccttgagtgaacagccatcttcctcccttagtctcacctggtttcacaaaaaataaatgaataatacacacaaacatgtatgtgtataactcaaagacagtgattgattcattgtctccgtgtctcatttatttggcaaacagtttcttgtccaaggggctggcaaaatggcaggaatagcagctgcctctcctggnnnnnnnnnnnnnnnnnnnnnnnnnnnnnnnnnnnnnnnnnnnnnnnnnnnnnnnnnnnnnnnnnnnnnnnnnnnnnnnnnnnnnnnnnnnnnnnnnnnnnnnnnnnnnnnnnnnnnnnnaggtagatctctgtgagttccagaccaacctggtctacaagagctagttccaggacagcctccaaagccacagagaaacctgtctcgaaaaacaaaaacaaacaaaaaaaacaaaaaaaagaaaaacaaaacaaaaagaagccctgggtttgatcccaaagccacacaaaatcaactgtagcagtacacactcataatctcagcacttgagatgtagcagtagggagatcagaggttcaagttaatccttggttacatactgaagtttcaggatgggatacatgaaaccttatttcaaaaggtagtttatggttcacacatgaatttcagcattttcgaggccaaggctagaggattgctgacagttccacaccaggttggcctgcttagcaagaccctgtctctaaacaatacaaagctggacctggtggcacagactttttattccagaactaggcatcagaggcaggaggatttctgttaatttaacaccagcagggtcaccagtggtggcgtatgcctttaatccaagaactgggttgggggggtggagcaggtggatctctgcgtgttcaagtcaagcctagtctgcaaaactagttccagaacagctagggctgttacacaaagaaaccctgactacaaaaaaacaaaaacaaaaaaagagaccaggatggtctccatagtgagttctggactcctagggctgcatattgagaccccgtcacaaaaacaagacaaaatcaagaaatacacttacaaataaaaaataaattaaaaataaaaattaaaaaaggacattgtttccttcttactaggaagcaggagatgagctcagagctcatgtccctcatgtccctcatggacgacctatttcacagtttccttcagagtaagagcccattgtcatcaaagatgagagcattgtggtttgttcttaactaaaagacatttggtcttgctttaggaagaagacaggtgtacccactttattctttggttcggaactggtcccaagctgctgggagactagcatttgtctggaggaatgtcaagggcagactgaacaggttgctgaccctctctccctcttagtatataattgtgctggatatggctcatcctgatcaaagcagctttcttctggcagtaacattagggaatcttagaaacctaatagaaaaattttgcagtttaaacaaaattgacaagtagtcaaggaaaatatattttctttagtgatcacagctggcccatcctcaagctggcagaaccagtgccatgtaagcagcagagggtctaagggggtgacttcctcatctaaaataccaccaccgccacctgtcactctaccattagagcttaatccccagtgtctctaaagagctattttttttttctgcttctagagacccctactgacattaaaattcttatggaaaaagcagggattagtaacgaggaaataaattcttcaacctgacatgcaaaacatggcacagataccaccaaccccaatggattaacttgcactacactgactcccagagcattgtccctttagacaaactgaatttaattttctgcctggggcatacacaatttcccctgctaggaatatctgctaacccatcaactcccagtcttgctttttttttttcatttagcacataaaacattgtatcctgatgtcaaggctcttaaaatagtttaacatagccagaaatggtggcatactcctttaatcccagcactcgggaggcagaaccaggcagaactcttgaggaggccagcctggtctacagagagttctaggatagttagggctatacagagccccttcgtttttttgtttttgtttttttttttgttgtttttgtttttttgttttttgagacagagtttcctgtggaggctgttctggaactagctcttgtagaccaggctggtctcaaactcacagagatccgcctgcctctgcctctgcctcctgagtgctgggattaaaggcatgtgccaccactgccaggcaaagcctttgatttttcttttttttttttttctttttggtttgttgagacaggtttttctatggctttggaagctgtcctgcaagtcactctgtagaccaggctggccttgaactcacagagatccacctgcctccgcctcccaagtgttgggactaaaggcatgcgccaccactgcccggcaagtctttgattttcaataatggatattatttaattcttttaattttttttaaagattttatttattatatatacaacattctgcttccatgtatatctacacaccagaagagggcaccagatctcataacagatggttgtgagccaccatgtggttgctgggaattgaactcaggacctctggaagagcagttagtgttcttaacctctgagccatctctccagcccctacttaattcttttaatctttgactctcaaatctctctctttctttccctttctttcttggtttagcgagacagggtttctctttagctttggagtttgttctggaactcaatctgtagcccaggctggccttgaactcacaaagattcacctgtttctacccctcaagtgttgggacaaaaggcatgcgccaccaccaccctgcctgtttcttttctttcttgttttataaaaatatttgggacagaactgaccagataaaaatgttaggtcaccagccaagagagataagatacatccacacaagaataattaggataataagttcttgttaagggtacagcctgagcattctttgattaattcaggcagaaaaacaaaggtttcctttgaactgggcaagacagtctaaaatttcaattgttttatacaagtaattcaaatagaacaagtctattagtaactagcaagttactaattagcattataccccccatcggtataagctaattttctttctgtcttgtttaaaccagttgcaccttatgggtacaaataggatataaacataattctatttgttgagggcttgttgtgtgccaagaggatagtttgcataatctcttttttggggggggggcagggtttatttgtgtattcctgggtgtcctggaactgaatctgtagaccaggctagccttgaactctgagactgcctcttgggtgctgggatcaaaggcttgtaacagcatgccctgcttgtaatgattcaggcattatgctttcctgcccctgtcatctagcagaatgcactcaggcagtactctgatcagtccaggtgcaaaggaacccaagaaagaactctgttcacttatgctctttactgctgttcctctggagcagacaggacttttcctggcttcctcttctcttctgtcctctgactctttacctctgttctctttccttcccccctcactcccctttctaataaaacttctcacttaagctcttctgcttggcatgtttgtccttccatctccgaatccaccaaggttcccctggcagtttatcagaacacacacagctacctaactcaattttcagtctacgaaaactcaaatggaggtaatgtttgctggattccaaagttgtggatatatttaacctaattaactacacaaaagaagtttcattgtattatatttaaatgtatacattttggtgctaggcattgcaaccctggcttttttgcttgctaagcatgcacactaccactgaagtatattctcagccctggcatcagtagcccaataaacgagaaagtacttagcagggctggagaaatggctcagctgtttagtgcactagatcttacagagaaagttggaataatcctcagcactcagagatggattacaaccatctctaattccagtttcagtgggttcaataccatcttctgaccaggcacgtacatggtgcatatacgaatttatacatattaaacatggaatttgggggggggggaagtttgagacagggtttctctgtggctttggaggctgtcctggaactagctcttgtagaccaggctggtctcgaactaagagatccaccagcctctgcctgctgggattaaaggcgtgtgccaccaccgcccccgcccgcccggctcatattaaacatgtttttaaaaattatttaaagtttattttattaaccaggtatggtgggtggctcttgcttgtagtctcagcacttgggagaccaaggcagtttgttgtaagaggccaccatggtctgcatgatgagactaggttagcctgggctggagtgaaactgttttcaattttttttttttttttttaagatcatgctacaattataaatcattatttgagccgagtggtggtggtggtggcgcatgcctttaatctcagcgttcccagggcagaggcaggcggatctctgagttccaggccagcatggtctacagagggagtgccagtatagtaaggactacaaaaaccaaccaatcaaacacccctcccccgaaaaaaacaaagtttctttgtgcttaatccctcgaggttaacctctttattaagagctggctcaggtacctaccaaagacacaaaatgcgattcgggtcttttacgggaggaagtagctttccctttccttatcgcaaaaccgggtcaatcctagcctcttgggctagaacacgacgttataaacctctgacatcggtaggcgttcaaaaatatgttagtcgttttctgaagaagagtgctgggaacccagaaagcaatccgcatttgactacactgaggtctcgaggcccatcagccggaggacgttctcggtatctcgactaagcggctggccgttggcgatttcccgcgcagagagcagggcggagcgccagtcccgcaacgtggtagctggacccactctccgccagaactacacctcccagcaggaaccacgctggttcgcttggcaggtggtacccacgggtactagcccggaagctagccctacaatacttatagtagccagagtctggagttgcatctacgggaaaaggcggccttacgcagaggttttgccgcgcagcacgctgggagttgtagtccactcccgcgatgtctagaggctannnnnnnnnnnnnnnnnnnnnnnnnnnnnnnnnnnnnnnnnnnnnnnnnnnnnnnnnnnnnnnnnnnnnnnnnnnnnnnnnnnnnnnnnnnnnnnnnnnnnnnnnnnnnnnnnnnnnnnnnnnnnnnnnnnnnnnnnnnnnnnnnnnnnnnnnnnnnnnnnnnnnnnnnnnnnnnnnnnnnnnnnnnnnnnnnnnnnnnnnnnnnnnnnnnnnnnnnnnnnnnnnnnnnnnnnnnnnnnnnnnnnnnnnnnnnnnnnnnnnnnnnnnnnnnnnnnnnnnnnnnnnnnnnnnnnnnnnnnnnnnnnnnnnnnnntggccaggcctgggcaccctccttcctctcttgcttaggttgccctgggcttcctgctcccccccatcctagttggccgggccccacccagccccagggggcgccttcccttcccccccctccgggtttctgtcctggagggtgtggtttttctctcccacctcggtccctgtgtgtaggctggagctcccccgccacgctgtcgccctcattctgaccacctttccgctttgccgtctggctccggtcctgggactggtcgtaaagcccaacttctgcgctccagtctttctctacgtaacctgaagacatagttcaattttacttcttttcaatccggagggctttggcgttagttgaaacccaagtttccttcctcatgccctgttcttgtagtttggttgtgccacagtttattcttttctttaacgtaagttgaaagtgctttgtaaactgtaaagcgtgctgttagaattcaaatcataattctttagcctggtgcattccaactccgttttctttagcaccggatcactgtgctattctgttctcttactttcctcctgaattgtaagtttcgttgcccaggcatgtcaattgtcatcactcaggactgttttctcttggagttggtctttcctgctgtttcctgctttaacataaccctgtagtttactaccacctctacacctttctactttattttcagggtgcacatttgcctacattttgactttccccagcacttgtgtcaaggtctctccattaggtacccagagatcatcttttatttgaagagcatggcctttttgggtctttttggagtagagcgttgcactatttagccaaggctggcttccatctcaagatccccttgcctcagtttttctatggtgggatctcaagatgcttggattacaggcaatcactactgtgcctgtttattttatttttggttttcgagacaaggtttctctgtgtagctttggagcctagactggaactctatagactaggctgacctcaaattcagagatccgcctgcctctacctcttgagtgctggaattaaaagtcctgtaaccatctccccgacatccggcgaactttttttttcctttaagtgaattgtctttttacatgtctctctctctctctctctctctttttttttttttttttttttttttttnnnnnnnnnnnnnnnnnnnnnnnnnnnnnnnnnnnnnnnnnnnnnnnnnnnnnnnnnnnnnnnnnnnnnnnnnnnnnnnnnnnnnnnnnnnnnnnnnnnnnnnnnnnnnnnnnnnnnnnnnnnnnnnnnnnnnnnnnnnnnnnnnnnnnnnnnnnnnnnnnnnnnnnnncaggacttctctgtgaaactgtcctggaactcagtctgtagatcaggctggcctggaactcaacagagatccacctgcctctgccttctttaatggctgggattaaactgccacctcccggcttggtacagcactccctctgagttaactatttgtaaattcgtcctttgttttgagacagggttactctgtagccttggctgtcccacatctcgctctgtagatcagggtggccttggactcacagagatctacctgcctctgcctccagagtgctctgattataggtgtgtgccacagcttcctggtgcctgttcttttttttttttttttttttttttttttttttggtttttcgagacagggtttctctgtgtagctttggagcctatcctggcactcgctctggaaaggctggcctcgaactcacagagatctgcctacctctgcctcccgagtgctgggattaaaggcttacgcccaacacctaaattctgtagtgtagtttagacattggactagttctttggtatggtctccacctattttaggaaagaataaataaatccactctttggagatgatccattgtatcttgcttgccttcagggcctcttggctaggcctgtttttcagttgctatgaagatttggcttacagaacaaaggtgtttagtttcccattccaatcttctgcttgctgacttcatgtcttgctcagttttcctactttgggctcattcatgttctgtaagagacctctcccctcacccctagggcctgacctgtatttttctcacactgctgacccacaccctcccttgcttccttgctgcctctgaccttcaaaaactaaacatttcacagaaagggagattgttttgtttgacatagggtggaagtagtagcgtggaagagaatgaggccatgagaaaggattgtggtaattgcttctccggcctgtttcctgctgctctggtttcctctggtctctctttaaatgtgtattgggctagccatagtcatatgaagtgctcttcaggggtctctcttactactttgaagtataggagctttattattttgggagaaatggtggaagaacatggttacaagaatgagtttattttaattaatgaactttttattaatttattttttgagatgaagtttgggcagccaagctggcctcaaacccaaagtcgatctgccccagtctcttgagggctgggattacaggcacatgcctggttttaggttttgtttttttgttttttgtttgtttttcgagacagggtttctctgtgtagctttggagcctatcctggcactcactctggagaccaggctggtctcgaactcacagagatccgcctgcctctgcctcccgagtgctgggactaaaggtgagcgccaccaatacctggcttggttttaggttttgatgtttaccctttaagaatataaaatgcatttagaaagtataatcctgtcttgcaatgtagacatggtctaaagtgattttactttgaaatgttagccttgacattgtttttgtttgtttgaggtggcctcactacatagctcctactggcctgaaattcagagatagtcacctggaatgcagccttgatgtgttcatgtttgtttgagactctagccaggctggtttccaacccagggtgtagcctcaagttgttgcagtccttttctccagactcccaagtgctgggattccaggtctttgcttccatgctctgcttctgatagttttgcagctgttttgttgctgtttgcaaaatggagatgaacttggaggaagtcaaaggaagattttgtttaggaaatgccaccaaaagcctgtggtagagttttgcaagttttgactgagaaatccatctttcatctttctctttacaaagtcaaaccaaatttatcagttccgagttcccacaataagaatgtgtaaggcctatgtttgtgttgtttttttgcctttttcaaaaataagttttgtcttctttggcattgttttcttccaaagttaacctttttttgggggagtgatgggggtgcttggtgattgaacccagggttgaggatatactctgcaaatgagctataccttcaactccctgtacttcttaatgaaaggaaatttgttgaaaaatttgtctttttaaattcagggcctacaagtaggccaggttagctttgaatttgatgggtagccaagaataagcttgaactgctttctctgcctccacctttacctcttacaggtgtgctccacagggatgcttgagaaattctttgatatggggcattggagaccaggttttatgaatttttggctgtgggacacagttgcttgtggactgacttgagtttaagttggtacccagttaagtatttggaattaaggcctggaacagggctgtgttgagcagtgaagtcccttggttaagactaggcaatattctcgttttaaaagttgttagggggctgggtgtgatggcgcatggttttaatcccagcacacttgtaggcagaggcaggccatctctgtgaggtcaggtcatctctgagatcaggccagcctagtctacatagtcccaggataaccactgatttaaaaaaaaaaaaaaaaaagtgttaagagggctggagaggtagcttaggttaaaagctcttccaagtctgatgcgttgagtttgatccctggaatcccatgggagaatgacactgggttcctgtttattcatgcacacacacatgaataaaataattatgtttcttttaaaacgtcgttaggaatgtggaggtgtgggtgtggttgagtatggagagcttcttgctcaagcatcaaggcccagtcttcagtactgagagaaaaagtgttttttttttttttccccctccaatttggacattaaaacttactagaacataccttattgttctttttttatttttttattttatgtgcatttgtgtttttgcctgcatgtgtgtctgtgtgagggtgtgggatctcttggtactagatttacagttttaagatgccatgtgggtgctgggaattgaacttaggtcctctggaagagcagtcagtgctcttaatctctgaaccatctctccaactctacattattctttctctctctctttctttctttttaaaatactttatttaactttattttatgtgcattggtgtaaggataccagatctcctggatctggagttacagacaggtgtgagctgccattcgggtgctgggaatagaacctgggtcctctggaagagcagctactgctcttaaccactgagccatctccagccttcttttttttttgtttgtttttgtttttcgtgagagggtttctctgtggctttggaggctgtcctggaacttgctttgtagaccatggtggccttgaactcagagatggactacctgcctctgcctctcgagtggtgggattctggcctacattattgtttctaaggctaaaaaattaatttttttcttttaaagtttttttttgttttgttttatgtgtatgaatgttttgcctgaatgtacaacaggtgtgtgcctggtgcccatggaggccagaagagtcattggatccagtggaattggagttggttatgtatgagtcaccatgtatgtactgagaattggatgttaggtgctctgcaaaagcagttagtcctcttaatgctgcaaatctttccagcctcaagaatattttaaaaaattatttgtagaggagaaaatttctgtttttcttttttctttttttgagtctgggttttgctgtatggctctggctgacatggaacttacgtcatagctgaggctggttttaggctcatagtgatcctcctgtctcagcctccttaatgcggctgagtttaaaggcaagtgccaccacacctgtcttaaaggttccattttaaaggtgtccttgctgggtctgacacacacctgtaatcccagtttgtgattgcagcaggaggatcatcacagatttgctgatgccccccctacattttgagttccaagcctgctttgactctatagtgaggctttgtttcaaaaaagcaaaccaaaaaacagaagcctacttattttcttgtttaataactgaacattgccaaaacttttacaatgaaaatgctaccccttagattgcacatgatggactcgtataatctaggcatctaagcatactgcttctgtctgtgagattgaaagatatattgggttttagtatggttaacttaaaggagcagtatgttacgataattacaatatcagcacctttcacaatgatactggggccaacaatattctcagattaggttcagactatttggagtgtttttgtataggaggtaaagaaataaaagggtgtgtgtacaaagaaagtggaattagagagaaaggaccttcaagcaattctgaaccatcaaatttttttccctatatgttccccccttctgatttttcagatatctctgtgtagcctaggctgcccaggaactcagtagatcaggctgaactgctctagttcaggacaagaggtgaaggcaggaggttcaggtgtgtcacttgtggcattcctcctacctgtatctctcaagttcagggacacaggagtgctccaaatcctctgaaaagtggatttcatttggttctcaacccctgagtcagaggactcttgtggatgttgaaggactctttcacaggggatgcctaagaacatcaggaaacacagatttacattatgattcataacaacagcaaaattacagttaggaaatcgcaatgaaaattatggttgggggtaaccacaacatgaggaactgtatgaaagggtggaggcattaggaaggttgagaaccgtttctctttgtttgttgctgaaaccttgtttctttctttcttttggggggaggggaggttttcgagacagggtttctctgtggctttggaggctgtcctggaactagctcttgtagaccaggctggtctggagctcacagagggtctgcctgcctctgcctcccaaatgccttggggaaaccttgtttctttttggtgttatttgttaacttgtatttactagaacctttctatattaaatttctattgtgtatacacatttcagtaatatctaaattaaattccacattttgttttgtttttttgagagagggctaacttggaactcactctgtagataaggctggcttggaactcacagagatctacctgcctctgcctcctgagtgctgggatcaatcaaaggtgtggaccacaaccatctggctgtttccacattttaagaacttttaatgtatgtttgcttatataagtgtattctgtgtgtgcatttggaccatgtacaggttacctcttgttcatttttgtccttccttaggccagctggagttacaggcagttgtgagctgcctgacaagtgtgctggaaactgcagctcatactcttaactgctgagctgtgtttctagtgtgcctcccccctcccagaaaatctacttatgtcccccattgctggcctgtaactctccttgtatacaccagactggccttgaacttactgtgctcagataaaaggcatgccccaccatacctactttataagtttggtttattttatttatttatttttttaatgtgtgtcaatctcattttgagaggcagtaaaggcatataacaaggatggaggtgctgcaacccagtgataagagtgcttgcctagaccttagattcagttctttgtactgttcccctcttcaaaacagtgattgggaaatatctgcacacttataggagaagccagatattgcacatcaaaagccttagttaagtggcggttcactattttactcccacaaaagatggtaatgtgatagagttggcacaatgagatgtacccaaactaaggtaggtactcttggtctggctgggagtgggaaggaagtggcaggttttatttgctggctagattgtgataattacaaagcttagaaaatacactaaaagtcatttaattacatatttaaagtggactttatgttttgaccatcccccactaaaattttggggatactgtgaggtgagcaaattgaacagataaacaaaaatttcaagcagcatatattaacctacaatttttaccagttatgataaccaagcattagaagtccattatcttttttaggttccccacaggcgtaggaaacagtatttgatcaaggtttcctaatctcaaaattagtagatttcaagtctgacttctggactagtgctcttaatcatgctactttactactttgcttgtctgaaatactgctatctgggagtacagccaggtgctagctgataaaccaaagtaagcaagcaaaggaaaggaaatctaacacctttgtagtgttgaaggctgtgtctcgatactagataaggactaggaatgggatgcagaggtggggtctttgaaccgtgtagagttccatcagacttcacacatctattttgctatcttatttattctatgtggaagcatttgagttgaacttttccttaagtttttccattctgatttttggtagcttttgagatccgtgtggtgaactgatatctaagccctgtgccagtttatatgtatcctatgaagtggtcgggcacatacattgaggatcactgtgttttctcaaaggagctatatccccaggcttcttcctttcttttcccttccttccttccttccttcctttttctttctttttaaaaagatttattatgaatacaacattctgcctgcatgtatgtctgcacaccagatgagggcaccagatctcatagatggatgtgagccaccagtgggtgctgggaatttaacctgggtcctctggaagagcaaccagtgcgcttaaccactgagccatctctccagccctctttacatcctgttgctctaacccgccaaagccgtattcatgccccagcacttgctttaccctaagctaccttactttcccaggtaattactgatgctagtagagcacacaatttgtgtcaaggggacacactcaagtcttgaattttatatttcaggaataagaaaacgaaatagtgttgagtatttaaggacaaatgcaggagagcaaaagggaagactgcaaacaggaatcgtaacctgggggtagcatttcttttgttggagtgataaagtgatggaaaccagactgaaggttaagcagctggctagagaagaatggagacaatgactgtattccttagggaaagagctgaagtagtcattgtttgcaacagagcattcagtttccagtagtgaatgggaggaactatttttttgaactttcattcttgaggttaatgtgcacctagataacagtttaacaggtctttctacattaccatctgggaaatagatcaggaatactttttatgaatagtgtggtgagagatttccttatttaagggattttgtgtttttggtgttttagtaaaagctgacattggtaggtacttaagtagcaggtgtgttgatattttttaaatggatcacattgcttgattggcacattctttttgttttgttttgttttgagacagggtttctctgtggctttggaggttgtcctggaactagctgttgtaaaccaggctggtctggaactcacagagaaccacctgcctctgcctccgagtgctgggactaaaggtgtgcaccaccacggccttgcatgattggcacattctttaggtaacttgacatttaataaaattggttttgggacagtgaaacagtaataaggatgctaatagaataaaagcatttttcttttaaaaaattatacatttttggggaggcagaggcaggtggatttctgagttttaggccagcctgacctacagagtgggttccaggatagtcaggtctgcatagagaaatcctgtcttgaagaaccaaaagaaaaaagaaaaggaaagaaaaaatcctaactttgtagtactatctagagataatatacttttatcttgaaattgctccccactagctggacattgtgtagcaccctttaatcctaacactcaggaggcaaaggcaggcagatctctgtctagtctacaagagctagttccaggacagcctccaaagctacatggaaaaaccctgtctcaaagaaagaaagaaaagaaaagaaaaggtgtggaccaccactgccgggcgggaagatagcttaattatccaaatcagcaaggaattcgttctgtaacttagtgaaaatcaaaggagttttgagtgtttgaagacttgaaggctctataatgatacggttaaaaatacccttcctactttaaaaaaggtctgtgaatcagtgatttaaaacagtaaagatgtttaagaaatgcatgacaggaaaactatttgaagaattgcattgtccttgggtttggaattttggttttggaaagtagccatcttgtgctgccccgaagttaagtagacataagtactgctactttgagaagtcacccgaggataagaaagcaagatgtgatgatgaatttacgttaggaaagcagttcttaggtctgccttcaaataaacttggaattatttcctttctcaatcatcagttaaaataactgatgagtcagaaaaattactgttggtttgggtttttttgagacagggtttctctgtgtagccctggctgtcctggaactcattctgtgtaccaggctggccttgaactcagatccatttgcctctgcctctcaaatgctaggattaaaggggtgtgccaccactagtaggcttaaaattagtgtttgtaatactctgttgccaaggaagtaaaaaactgcatttatttattttacatctatctatctatctatctatctatctatctatctatctatctatctatttatctatctgtctaatctatctgagacagggtctctatatagtcctggctatcctgcaacttactctatagaccaggctggtgttaactcatggaggcattctgcatcttccttgataatgctgggattgaaggcagcatgtatcagcatgcttgccaacactgcttttttgcaggggatgggagagtgggggttcaagacagggtttctctgtgactttggaggccatcctggaactagctcttgcagaccaggctggtctcgaactcacagagatctgccaacctctgcttcccaagtgctgggatcaaaggcatgtgccaccgccaccaccacctggccgccaccactgcttttagaaagaatttgtattgtaaaagggtggaaccaaacaatttgggcctagcatggtggcacaagcctttctgtaatggccgtacttggaaatggtggcaggtggatcctgtgagttaaaggttgacctggtttacattgggaattcaagccagccaaggctatgtaactagacaagagttgtttttttcttttttcttttcttttttcatctgggtctttgtaataaacatgtaaatacatatttacagtggagatgctttctaatagaaagtaaatacacaaaagaaattttggtcttcaccagaatccatcattatatatccatttctgaagatgatgtgaaacaattacatcaagttcatttatatttaagattcctatacacataattcaaacagagtaacacacagttttcttatataattaatgcttcattttgcatttcagttttcctttaagaagactccattatccaacagtagggagctctatgagtttttgtacaactgtctgcaaccttcatcctgatctgacattataaacactgtcactcagcctgcactgttcatgccatctggacacgtctcacattatgtagagagttgttttttcttttctttctttttgtttttttgagacagggtttctctgtagctttggaggctgtcttggaactctctcagtagaccaggctggtcttgactgaactgaagttgtcaggtttggtggcagtggtctttacttgttgatccatcttgctggcctggctttttatttcttgagataggtctaactgtgtacagcacaggtgagcctggagcttaccatctcctacttcagtttcttttgtttttttttcttcttcgagacagggtttctctgtattgttttggaggctgtcctggaactagctcttgtagaccaggctggtctcgaactcagagatccgcctctgcctcccagtgctgggattaaaggcatgtgccaccaccgcccggctctacttcagtttcttgaatgctaggattcctttgaagtttgctttagtatccataataatactaatacttagctgaactgagtaagtgaagtgctatacattttaaggtttattttagttatgagatgtgtctgtgtgttgctgtctgcagaggtcagaagagggtatcagatcctttaaagcaggattgtctattagctgtgtcttaatgtgctgggaattgagtgtcgtctagaagagagtagtaagtgcttctaagcactgagccatctctctagccccaaggcgctataattgtaatgctactttgctttcatattttacttttattttttattttattttctcaagacaggatttctctgtaggtagtcctggctgtcctggaattcattttgtagatcaggctggccttgaattcatagagatccatctgtctctccttcccaagtgctgggactaaaggtgttctccaccactgcctggcttatattttagtttatttatggatagccatcactatggtgcagaaagagccttggagaagtacatttcactcagctgtttatttgttctgagacaggatctctctttgtagccttgattggcctacaacatatatccgactgttctcaaatttgtggtgatcctacagtttgtctcaagacttactggaaggagttaccacacatgaatcactatggctttttgtttgtttatttattttttaaggtagggtctcaagcccaggctggaacttaatatgtagctcaggctaacctcatattcttgggactcatcctatttcatcttttcaagggaggatgtaatttcaggcacagaccagtgtgcccagcatagtataatatcctaatgataatactgtctggatattatttgagaagtgcttgttagagtgaatataaagttttgtgtgtgggtgtgtgtaggtatgtgtatgctatgatttgaatccaggcctcatggtccttcatgcatgctgtaggaatattctttaactttgtcttagacctttgtcaaagaaacagaaggatcaccacaagtttgaggacagtgtgatatatgtagtaggccaatcagggctacaaagagagaccctgtctcagaacaaataaacagctgagtgaatacacttccaaggctctttctacatcataggtcctgtgaaacactgtatgtatatgggctttttgtttgtttgttttgtagacaagtctgttagaacttagggttaaagattagtttgagtaatgagtgacttttcaagggcaaaagaggatttaaaggctgggtatgtagctcagtggtagatggttgcctaagcatgtatgaagtcctggatttgatccctagcactatgaaagatttgagcaataaaataataaaaaagatgaggctttagagctgagaaagctggataggaatgggacacaagtatggaaaaagccacaggcaatgaaatacttttccttttttgactgtgggtagctggatacaatttgtctgtaccaaataagatttgatgtcctctaatgttcaagagttcaccagcactcatttttttcacaagcaggttataagcacagccccactgacaacactgggtgggtgtaggagttcatccttgtccaccagctgctagaggcctgaccctgccctctgcagctgtggagaataaaagtatcagcttggtcagctcctggcatgtgaacactagcagttgagctgcatggaattagggctcataattgaatgtttggcaccctcgttgccatattctctcccagattggcagtgctgatttcttcttgttgcctgtcctggaccagtagagattttttactaagttaatttcccaggcagaaaaaggttatgaataatggattctgatagaaaaaggaaaaatgcatattggatattaaatgaaggtaataaactagaactggtcacaagagttcaataatgttaacgacacagagggagtaattgttgggtatttgaaaggctgtggatcttgttggaattctggcccagactagatattttggattagggatgaggcattcaggtgatgtcaacagttgctgcctcataggaggaggccaggttgggggatgagtgtacacttgggatcatcttttccaaagaaagagactcagaactgagtaatactctctctgaaagcattcgtccttttttgtgggtgaatgtgtatagaggccagaagttgattctggatgttttccttagttctctacctcatttttgtatgagtctttctctgaacccagtttgacagttcagctagattagctgaccacgtgtcccggagatacttaggtccacctcatcagccctagaaattacaggtgtgcaccaccatgcttggcttttatgtgagtcctggggcttgaactcacattgtcatgtttgtgggacaaggaagcatattcccggcctttctttgagcatttttggtggcgtcttgcttgtttttttgagaggtctccctgtatactcctctctggcctggaactcacaagtggagtggaacttgtggcagtcctcatttgacctccttaatgttggaagtagatcactgactgttcttccaggggtttgattcccacatggtggctcacaactatttctaattccagttacaaggggtctgctgtcctcttctggccaggcatgtacagataaaatatacaaacaaatgtaccatatacataattttgtttttatttttaaatgagcgcaaatgcacatgtgcttgcctaaggagtccagagatgttggatcccctggagctgtagtaataggcagctcagctgccagatgtagatgtagggattgaatttggatcctctgaaagaacagtacatcatcttaactgcctagcaatctttctagttccatgtgtgttaacttttaaagattatatgttttatgtgtttgtgtgtgtgtacctgagtggacatatgtgcactatatgtatgcaggttctcaaggaggcagatagcttataacaattctcagttcattctaaactgagaagtcatatctcccttcttcctcctccctgccccccagcagcagggattgaacccaggacctcttaaatgctagggaagcaatctgtcactgagctggatcatctgctctgctgggatctcttggaaacagttgtttgtctgaagtaccttacttgcaaaggaaaataattatcagtttaaactttttctaggatcattaagatggctcagtgggtaaaatcacttgtttcaaaacctgatgacctgagtttgacccctagaaacctaactccctaaagtagacctgacttccatatatgtacactctccttatgtcacaactgtagaccatttatttgtactttaggtaatggaggaaatttctgattttcttttaaagaagttaaaaatgtatcaacaattctaagttaaaatctatcactatcacgtttttagtttactttgaataaggtgaggtaaaaagaatagaaatttcatttggtgtttgattttctgtctttcatttgtgttttgaaatttcactgggcatattggagtaacctcatgctttctgtagctcaagaacctgagatatggaacagttcctgacagattatttttagaagtcttgctcttgtctgtttctattctaagaattctcttggaacttgttccagagtagtagagctgatggaaaacagtgtaaatgcagttcctatgcctggcagttgggtgtgtgctgcagacacagctctatttactacataaggttctgtttccaaaggaagacagaatttctccatgtattttggtgtgctagttgaaggtgtttctttttaatctggtttccattccttccattttcaatttataggcagtttaaaannnnnnnnnnnnnnnnagtggaatgttcagagatgggacttggtagaagtgatgagaccatgagggctccaacctaagcaaggggttctccactgatgataagtggtggaaactaaatgccagggcttggttggaggaactgggcttctgtggtgagtgtttttactcccgctggagctgtttcaccctccacctctatttaaaaacaaaacaaaacaaaacaacatttatttatttattatgtatacagtgttctgcccgcatatatgcctgcaggccagaagaggacaccaaatctcactatagatgattgtgagccaccatgtggttgctgggaattgaactcaggacctctggaagagcagtgagtgctcttaacagctgagccatctctccagcctcttccacctctatttttgtttgctaaatttcataaaattgtaggtgcatgtgtgcctgttttcttttgtagtagggatagtacccaggacttcacatatgccagaaaagtgttctgccactgagctgtgtaatttatctaattatttgtatgtatgcatgcatgcatgtatgtgtatgcctgtggaaaacagaaaaaaaaaggacatgtcatttttcaaataatacttaaacataatggaagcaatgtaaagctaagagtcctggtatataccaataatcctagcacttgggaggctgagacaggaggattgtttgtgttctgggccagcctaggcaagtgcctatctcaaaaataaaataaaataaaaaaaaaataataaaaaaaataaaaacccgggctggagggccacctcagtagttaagagcacttactgctcttgcagagtagttcccagcatccttgtaacagttcacaaccattcttcagttccaggaaatctgatgacttttcattcctcctggggtacgaggcacacaagtgaatacacatacatgcaggtaaagtgctcacgcataaaaatatatctttaacttaaaaaccagctggtgctggtggcacacacccacaatcccagtactagggaggaagagacagatcaagtattcaaggttattataaactacataaagagtttggggctggacctgaggtttgtaagactatctccgataaataaataaggggaaagaaatccaaaaacaaactataagctataaattgagtggttctttacaaagcaactattttgtctgggtttggttgatcatgcctttgatcctattatttaaggcagaagtaggctctctgaattcaaggccagccttgtagtcattatagctccaggacagtcaggactgtcaggcaacgattcctcaaaacagaacatactattttgctccttgaactggggccattttttttttctttttaaatcaaataatcacatcttcattaaggatgctttacttgctgattaagtggagataaaaaatttaaatgtttaagccaggcagtggtggtgcacacctttgtttcaagcacgtgggaggcagaggcaggtggatctgggtgagttcaaggccagctggtctatgaagtgagttccagaacagctggggttgttacacagagaaacaacctgtctccaaaaacaaacaaacaaacaaaatttaactgtttatactcagtgaattagtgagattgtttatttttttattttttatttttttggttttttgagacagggtttccctgtggctttggaggctgtcctggtactagctcttgtagaccaggctggcctcgaactcacagagatccacctgcctctgcctcccaagtgctgggattaaaggcgtgcaccaccaatgcccggggagattgtttatttttaaacattttgtgtatatagatgtttttcctgtaggcatgtctgtgcacctggtgcctgcaatgcccagggaagccagaagagggtgtcataccctttgggactgaagttacagatagctacagactgccacatgtgtgttggaaattgaatctgggtcctctggaagatcagccaacacttttaacttctgtgccatttttacagtccttaaataataatgatgatgatgatgttttttttttttgagacagggtttccctgtggctttgaagtctgtcctggaactagctctatagaccaagctggtcttcaactcacagaaatctgcctgcctctgccttccaagtgctgggatcaaaggcgtgcgccaacactacggggcctgaaattatttttaatgaaggagtcttttgttttttgtaatagggtctcattatatagtcctttttggtttgcaattcactgtgtagactaggcaggtgttgaactcatccatctgcctctgcaggacctaactcaaaaaagatattcattcattcgtttatttatttaatgtgtggctttgtgagtgtgagtaccaagtgccgtagagaccagaggcattggatgtaattggagttaagggagttgtaagtagcttggaactgaacttgggtcctatgcaggagcagtctgtggtcttcatctctgagctatctttccagccctgaattaatttttaaaattatgcagttaatgtttgtgtgcttatggggcacagggccatgatgcaaacatggaggttaaaaaacaaattgtggtagttggttttctccttctacttataggttctagggattgaacccaggtttttaggcttggcagcaagtgtctttttagccatattgctggcccctaatttttattttagttttgttccttttttttttttttttttttttttttttttgagacattgtttctctgtgtagtcctggctgtcccggaactcaatttggagactaggctggttttgaagttagctatccacctatctctgcttctcaagtgctgggattaaaggccagcgcaactaccaacactaattctctttaatttaaaattttattattgtgggccagtgctcacatgtggagaccagaggacatttttaggcaattggttctctccttccactcttattaaacttaggttgtcaggtgttctcagcaatcactcttacctactaagctatcttgtgtagctagcttttttgtcagactgtcttgactgctagccaaaaaataacaagacagacttcttaattatgaaagcttagatttgtccccaacgagctcatttgtttcctttgttttttgagacagaatttctctgtagttggagcctgtcctagaactcaaaataatatttttctcaaaatgcaaaaatttgggggccagcaaaatgactcagtaattaaagatacttgctactaaacctcacaaccgaagttaagtcaccaggacccatttaatgcaaggcgataactgactcctgcaagttttcctatgacaattccaacatggcacacataaaataaatgaatgttttatttttctgaagagtattttttaaaagttggggctggggataatatagcacagtaggtagtatcctgagccagcatgcatgaaaccctgaatgattccctagcactacataaagcagggtatactgaagcacaactgttgttctacattcaggtagagatagaaaaccacaaatgcaaatccatccttacctacaaagtaagtttgagaccagcctggaatacaggggatcctattcctcctaaaaagagcaagattgttgtagaatatttatttacactgtagagatgcgtctctacttaaggcaccttctcgttgatttaatacaaagctaaatggccaatagctaggctagagagaataggcaggacttctggtcagagagaggaagtcagagggacgaatcaaggcaggagagagacgtggatcgagtctgtattgtgttgaggaaaggtaaaaggcacatggcagaatgtagattaataaaagcaggttaatctgagttgagggccaggtggtggttcatgcctttaatcccagcacttgggaggcagaggcaggtgtatttctgttgcgttcgagttccaggacagccagggctacacagagaaaccctgtctcaaaaaactgggggaaaaaaaaaaaaaaaaaaaaaaaggaaagtcagagctgtaggtcaaaagtagagtgcctattttgtatttgtgaggccttaggttcaatccccagtcctgccagtctctctcttttctctctctccctccctctccccattcccctctcttgggttttgtgtagctctgagaaatcctcttgcctctacctcctaagtactgggaatacctgacttcctactgagatctttaaagcagaacaggatgcctcagtgggtaaaaagatttgctacacaaattgagacctgagttcagtttcctggatcctactgtagaaggaacactgactctctgacctccacacaaaaaccatagtaaaataaaaatttaaagtaatacaattatggtaaaacaaacttattctgtataatggaaacaaccaaatttacaatctgaaagttgtcaagcacaagataggataaggagtgtgattcatagtgctgagagacagttggaagtaaggtaaaatgtttaaactagctgttggggtatttggcatgttctagttaattggttatctgctgttataatgtaaaaagcagtgtagtaacatacccagttagtacaggacctcttgtgaaagtaaatatcagggtgtctgtttaagaaaatgtgtggccttttctaactgacacatttcatttgtagtgtctgaagtagtgtaatgagttttggttaatgtcttagtcactcttctattgctgtgaaaagaccatcagcaaggtaactcttagaaaagaaagtattaatttttgcttacagtttcagtggtggttcattgtcaccatggtggggagcattgcagtaggcaccaagcatggttctggaaaagtagctgagatatcacacatctgttccatgagttctaggcagagatactgggccttcaaagcccacccccagtgatacaccttttcttttcttttttggttttttgagacagggtttctctgtgtagctttggagcctaacctggcacttgctcttgagaccaggctggcctcgaactcacagagatccacctgcctctgcctctcgagtgctgggattaaaggcatgtgccaccaacgcccggcttgtgatacaccttttctaacaaggctgcactacatctcttaatccttccccaaagttccactaactgggaatcaagtattcaaacatagactcaatgagaaccattttcattcaaagcatcacagtttcttgtagtttatgtagtaaaggataacctgggagtatttgttgcaatggtgtctctatagcctgaaccatgtaaattaagattatagggacactgatccttgtagtctctgagctttccatgcttggtaagcagcattcaggatgttgtcttctggaagaataagtgctctgatcacggagctaccttcccagtctctcagggtctcctttatcctagactggcctggttctctcattataactgaggatgaccttgaatttctgatgtcttttcctccccaggcctagaattacatatgtatgtcactatatccagttttatagggagctggggattgaacccaggttgtgtgctagatgagctgtctaccaactgagctgcatccccatccctgtggtctcataaacacttaagattatgaagacaagtctggaaacagaatagctaaaataagatctgagttgattgtagattctgtagaatccaaaggaaagcagtccataaaaggaaggccaggagagtgtggtcagttataccaggggctaaagcaacacagtaggttttgtggttagtatgggcagcataatggaaccacacatcaaagataagagaacagaggaagggggggggcaagggagagggaaagctgctagggaaataatctaaacagttcttgcatactattttagatattttctttcttttttttttaagatttatttattatgcatacgacgacgatctgtctgcatgtgtccctgcaggctagaagagggcaccagatctcattatggatggttgtgagccatcatgtggttgctgggaattgaactcaggacctctggaagagcagtcagtgctcttaacctctgagccatctctccagcccagctattttcttttttcaattaaatttattttatgaatatgagtgtatctgcacgtacaacttcatgccagaagagggcaccagatcttattatggatggttgtgagccaccatgtggtttctgggaatttaactcaggacctctggaagagcagccagtgcttaaacactgagccatctctcttgtctgtctgtctgtctttcccccgaccgccccccccccaccaccactcctttgtttctttgagacagaatctctctgtagccatgactggcctggaatttgctatgtgtagaccaggctggcgtcaacttagatctcccagtctcagccttctgtgtgctggaattaaaggcgtgcattaccatacttagctctatttgaaaaaatattctgaatgttttattttgtgtgtcacccccattagatgtttgtttttgccatgatttggaagttttgcttacaatgccttctttgttgcagattttgtattttgtacatacattattttgtatattctgtatatgatgacttcggtgagcaatgatcgttgccgaggtgctcgggaaaaaccacagatgccaacaacacatgcaggacagccacagaaacaagtgatacaggtaagtcttgggttagactaaaagagtgagggagaaggaatgtgttaatagctcctttctagggaactcaggatttagcattgtgtttacaaactaaataagtagtatacgaaagggatgatgtgacgatggtacaatcgaacggtgttccaggagaagcatgtgtttaagcctgaatttcagttgttatctctgctacagcagttcccttccttccttctttgtctcatgttccagtttataccactaggaattaaacccagggcccctgtgttctagaccagcactctactactgaactacacgcccagctcatctgttattctttcaagtgaagtgagacatgttagtacagcacggaacatgtctgtactataatgatccagttgacaagcttcttaacagaaacagtatctttcccccttcatatgttcattattatccttacatttactaaccgtgtgtgtgcaagcttgtgcatgcacacgtgcacatagatcattgtgctttttgaagtcaaaggacagctagagagagcgagttctctccttgtaccatttgaattcaggatggaactcgggagtcagggttggccataaagacccttactcactgagccatctgcttagagatgttgctctgcttcagcttcccaggtgctggggtgtcagacttggactaccatggttcacttttatgatactttgttttatttctgatattgggttgggacatagggttttgcatatgaggcaagtattatatcaaccagttatgtcccttattcttttcaggagcttcatgtaatttcatactgaagtgttctattatgtttggtacagagtagaatttttttttttttttaagattttatttatttattacatatacagcagagggcaccagatctcattcaaggtggttgtgagccaccatatggttgccgggaattgaactcaggacctctggaagagcagtcagtgctgttaaccgctgagccatctctccagcccctagaatttttttttttttttaacaaaatttttgtgttaaattgaatagaaaaatagcttttttttttttttttttttttttttttttggctgctattaacagataaatatctcctatgttagtgcttacccctaagttctttaactctgatcagtattcttcacaaagaaagactgctgtgctgagtgttgtaacacagtcctttaatctcagcacccaagacagaggcaggcagatctctgagtttgaggccagcctggtctgtatagcaagttcaggctagccagaatcgaacaacataggagaccctgttgttagagaactgttgcggctaggctatccttttaagtttagttaatgaattgtcttgaattaatgaagaaatataggtcagaataaccaaaggtgaagggatgatgatgatgatgatgataaagttagtctttaaaaagaaattgtatcattaaaaacaaaaaagtaccaggcgttggtgccgcacgcctttaatcccagcactccctttaatcccagcactcaggaggcagaggcccgtggatctctgtgagttcgagaccagcctggtctaaaagagctagttccaggacagcctccaaagccacagagaaaccctgtctcgaaaaacaaacaaacaaaaaaagtatgtataacaggctttcttttgtgcctctagccagctcccaaatcgtgacaagaagacttgttaattagttatgaatgcttggccttgtgcttattccactagctcttataatttaaagtaacctgcttctctgtatctacattttgccttatggctttgtacttttcttttattctgtatgtcttaatttttcctgtttcttccatgtctggctgtctggcggctgcctgactggctggcccctggcatctccccctcgccctcgttttcttttctcttctccctcctctctcctgagcctagattccttctacttattctctctgcccaccaaccccgcctatccctcttctgcttagctattggccattcatctttttattagactttaggcaggcaaggtgaaacagcaacacatctttacataattaaacaaatgcagcataaacaatgtcacacatttttatattgttagacaaaagcagcataaacaaaagtaatactcttttacttgataagtaatattccataacaagtatgagcttttgaaggaaggccaaataaatgtgaatgatgcaaatggtaccctgtataccttgctagcagacttggatggattgtcagccagtttgcagactagaacagggaattagttttgttttgtttttccttctaaaagggttttatttttattgtgtttcattttcagtagtttgagacagggtcttgctatgtagcccaggatggcccagagctttcgggtatccagtactggtctcaaaactttaaatttccattcctcagcctccctggaatttggactacattaaaagattttcactaatagcctttctgtggagcctttgagggatgacttagattgcctaaaggaaaaagctgctgactgatcaatgaggatgagttcgagatcctcctgcttctttttttgggctttttgtttatttgctttgctttttaaggtatttattcaaaagtaatattacatatatgtgcattttcctgtatttctgtctgctcactgtgtgtgcctgcctgtgacggccaaaagagggtgtctgttggatcccctggaactggagttacagatggtgagccaccatgtgggtgctgaaaattgaacctaggtcctctggaagagcagccagtgctcttaatggctgagccatctccaatgctttttttgtttgtttgtttttttgttttaagacagaatgtcatagctcaggtcggtccagcttgctatatcatccaggctgctgtctaattgaatgcatacttggtttatagatgtataccatcgtgtggcttttcttttttatattttatttatgtgtatgggtattttgcatgcataaatatctgtaccacatacacagttaatagacagttgtaagctaccatgtgtgtttggaaatccaacctgggtccttgggaggagcaatcagtgatcttaaccaccaagccatctctagccctgtttcctgtttttttttgttcttttgttttgttttgttttgttttttaagattttattttatatattatgtatacaacattctgcttccatgtatatctgcacaccagaagagggcaccagatctcataatggatggttctgagccaccatgtagttgctgggaattgaactcaggacctctggaagagcaggctgtgcttaacctcttaacctctgagccatctatccagccctttgttttgttttctttaaagatttattttatctataagataaatatacataataaatatatgctctgtctgcatgtacacctgcatctcataagaggacatgagaggctgggcgttgctggcacacacctttaatcccagcactcaggaggcagaggcaggtggatctctgtaagttcgaggccagcctggtctccagagcgagtgccaggataggctccaaagctacacagagaaaccctgtctcgaaaaacaaaacaaaacaaaacaaaacaaaacaaacaaaaaaaaaaggacatgcgatcccattacatatggctatgagccactatgtggttgtggtattgtaggatggtgagattgctgagtggttaaagctcacaccatataagcctcgagttctgagtttgacaagcccaggaagacacaaaaagctgttttcttttacatgcatgccatggcatgtacaagcctgtactcacatatgttaataataataatagtaaaaagggctttaaaaaatggaatcttatgaagttgccccaagatggtctcaaaaaaattgtcttcaagccatcttcttgtcatagcctgacatgtagctgaaataattaaattttctttttgttcatttttgagatagagtctgttgagtatctctggctgttctggaacttgctatgaagaccaggctggcctgaaactcacagaaatccacctgcctctgcctcctgagtactgggattaaagtaatgcaccactatgcacttgctgataattattttcagatactgctttttataaaattatttggaggatactactaggacatttttatgttagactgaggtgtttcttgcttggtggtaaaacatttgactaacatacatcaagtgccagtttcaagacccagcacaatatacacatgaatacacacttggggatgtaacctagttatagtgaagtacttgcctaacatgcccgaatccctgggttccgtcttcagcaccatgaaaactggccatggtggaacaagcctgtactcatctcagcactcaggaaatggaggcaggagcatcagaagttcagggttatctttggctatagtgtgtttgaagccagcctacgctgcgagagaccccagagagaagagaaaatgattgttaaattatatgttaattacaatataaaaatatttcctgtaagttaccttaaagagtattggttaggatagtaattgttcactaaatggccagttgcagaccttttctgtccaagttaagtgctgaaagagctgttttgagtttgtgtaaacctgagtttgggtcttgggcctacatcattttttaaatttatttatttatttgtttatttgacagggtttctctgtggctttggaaccttttctgaaattagctctcttatagaccaggctgatcttgaactcacagagatcctcttgcctctgcctcccaagtgctgggattaaagccgtgggccaccaccaccaggcctgggtctacatctttattaattaggcaagatagaatttctggagtgcttttgttcatggcaatataacgtctgtcctttttagttaagtatatgtaggcatcagttctctccagtcagtgtctctctttgtcctcctcttccccatgccaactcagtttatgctcagcacaggctgttcctctcagcctccctcacttctgcctcctgaatagctggaatttcaagtttgccattagtaggataggcttgttcttcagtttcttgtcattgacatattaaagagtataggatagttatattctacattatctttgaatttgagtttatatgatactttatgattagaattaattatatacttttggtataagtaaatgtgatctattatttccccccccttttcagtagtaggcatcaaactcaaaagcttgcatatattaggcaaatgttctttctgcttctgaactgtagcctcaactggatgtgatttgtattttacataccatattatgatataataggttctaagtttgttctgttttaccagaacaaagtagttagtattcctctagtgtctcagagaggccaactggttttaaaatacaaaacagttttaattctttgcagaatgattataaggaattagaaattatatacaattgttatcagaaagtggtaattttttgtatatttattccacataaattataaaattattatttgaaatttgaggtggacatggtggttcatgcctgtaatcccagcagtaggcaggcttagaggattacaaattagaagtcagggtcggtgaaaaggctctgccagtaaaggtccttgctaccaagactgacaacctgagtttgaccttgggtctcacaagattaaagaagtgttccagcgagtgttggtggctcaggactttaatcccagcactcaggaggcagaggcaggtggatctctgtgagttcaaggccagcctggtctccagagcgagtgccagcataggctccaaagctacacagagaaaccctgtcttgaaaatccaaaaaaccctccacatgggtactctgcgaggatatgcatacccacatacatacaataaataaattaattttaaaaagcaagatggcaggatgtggtaattgcatacctttaatctcagcacacaggcagaggcaggcaaatttctgcacgttagaggttagcctcgtctgcatatacatagcaagttctaggatttccacagctacatagagataccccatctcagaaaacaatataagcaagtagaaaataaaattatatcaaatattatagaaaacaggtggtttcagggctggagaggtggctcagaggttaggaacactgactgctcttccagaggtcctgagttcaattcccagtaaccacatggtggctcaaaagccatctataatgagatctggtgccctcttctggtgtgcagatatacatggaagcagaatgttgtatacataataaataaataaatcttaaaaaaaaagaaatgaaaacaatgtggtttctgtttaagaaaatatgtatttatgcaacacaaataataataattaggcaaaataatatgcctacagattttttttgttactgttttgttttgagacagtgtcaactatttagagaagattgctcttaaatgtattactaatatccttttgcctttacccccttagttctggtattacagtcatggcttcccatgcccatctataaggatggtttaaaaaataaaatcggggctcagtggataaaggtatttgctgcccagcttaatgacctgagttgggtttttagggcctacatgatggatagagagactctgtctgtctgtcctctcacttctgtgtatatacatgtgtatgaatgggcacatacacagacacaaagaataaaatattacacatacacagacacaaaaatttaaatagtcaaaaataggtcaactgaatattttattgtttaattctcggatgacatgcaaagattgctgtgagttcctggctagtctagtttacatattgagtttctggctaacccatatcaacctctgccccagataaaataaaaattgtaaaccaaggagatattcctacttcaataagttatccaaagatttctggaagaccatccagtgaaagaaatgggttcattagagaatctttcagcatagttttcttattaattaaaaattatatatgtatatggttgttttacctgcatatatatctgtgtatcacttgtgtgcctggtgcccttggcggccagaagagggcagcagagttccctggaactggaattacaaactgttggggagggagcataaaccttgttttaagttggaattattagttgaccctgctttttcctcttttttccctaagctgtacagacctcttgacacttcttgagctcagcctggtaacttccctattatactcttatgtttggttctttgtttattgaataattaaactgtttgttgaataaagtatcttaaggtttgtagagtattttataaaggtaacacaatttaacattttgactgagactattactgttgtaatactgcgcttattaacagctgctaagtgaatcagctgtgctttcagaagttgtctagtctgtactctgtttagaattaaagcaatgatttcacagacaaatgtaaagaatgtttgtaaagttataatacttaaactaaaaaggcctagttttcaatagatcagtagttaatacatgtgagtaagacaaggaatagtgtctttctggttagaaatgtacaaatgaaactttcaaagtgaaaatatagagacacatctagggaataaaatggtgcttgaggccattggtaattattttactgaaaatctttgtccatgcttgttgatgcagatgcctttttaaaattatatattttttataaagattgatttattatgtatacagtgttctgcttacatgtatatatgcctgcacactggaagaaggcaccatttctcattacagatggttgtgagccaccatatggttgctggggattaaactcaggacctctggaagagcagccagtgctcttaacctctgagccatctctccaacccaaaattaatgtttttttttttttaaaagatttattatgtgtacaacattctgcttccatgtatatctgcacaccagaagagggcaccaggtctcattacagatggttgtgagccaccatgtggttgctgggaattgaactcaggacctctggaagagcagtcagtgttcttaacctctgagccatctctccagccccaaaattaatattttatatgatatttttataaggtcaagcaataaaatgtttcttaaagttgtctataattacagataatgaacatttcttaaggaatttttaggcttaaatgttgctgccttgctcttggaggcctagccagtggtggggtatttgcccagcccttagttcattgcctggcaccacaaaacaaaataacattctctataaagccagcagtgttgctcttgtttgttcagactccattagtttttcataccccttttcagaaagataacccccacatttcctggctttgttattctttgtattgttggactctatgagattaaaaacaaagcaaaatatttatttttatcattttaaaacatggggtatgtgtgaatatctgtgggcatgtgcacatttagtgttggcggcaggcaaccttggaggatgggcaggggtggatgtccagtcctctggtgttgcagtaacaggtggttgtaagctgtctgatgtggttgctgggagctgaactctggtcctctgaaagaataaatagcaagtgctcttaactgctgagacatctccagcccctttgcacaatgttattttgacattacgccatgaaatattttctctggaaactctcaaaccaatgcattccatatatatatatataaagtgtcatatacacacacacacacacatatatatatatatatatatttttttttttttttttttgagacagggtttctccatatagttttggctggcttgacctcacagatccatctccctttgccttccaagtggtggaatgttaagtttttttttttctcctctccctttttcaaatgtattttatttgaacattaatattttgcctgtatgtatgtcagtgtactatgttcatgcttagtacctgcagaagtcagaagagggttccagatcccctgggactggagttattgttttatgaaatgcctgtggaggccagaagagggatctgatcccctagaactggagttacagttgtgaggcattatgtaagttctgggaattgaacctgggtccttttaataagagcaacaagtgtttttaaccattgagccatctctcctgtccccacaaatttgattattttgagacagtgtctttttcttctttttttttggggggggggcatgtttgagtcagggtttcactgagtagccctggctgttcttgagcttgctctgtataccaggctggcctacttttacctgccaagttctgggattaatgatgtgagccaccacacccagcctgagacagtgtcttattcaccctaggttggtcttgaattctctgtagcagaggccagccttaatctcttgattccattcatgtacctcctgagtgctggtattataggcatgtacttccactctcatttctggttttgtgtggtgctggggatcaaatgcaaagcttcacgcatgatagataaagtggtctagtgagctagctacatttccacttcatatttgctctttgtgatggtatgtcaatatataacataactatagctctttgtcctccttcctggcaccaactgtgtgtgtgtgtgtgtgtgtatacatacatacacatattacacaagcacatttattttaaagatttgtttatttattatatatagagagttctgcctgtaggccagaagagggcaccagatctcattacatgtggttgctgagaattgaacccaggatctctgcaagtactcttaacctctgagccatctctccaggccccaccatgtgtatttttgtaataattctcatcttgttgccatcgaggagctacatgtgatctattattttacccagttaaaattgtttcctcttttgtttccctttttcttctcggtgagacattgactgtagctcagccagggctcatctcttttagcacttataatacctgtttgtccttttttgtttgtttgttttcttcagagatatttccatatactaaactcccacctctagctccctctccctcataaaaaatggataagttagcttggcagtggtggtgcatacctttaatcccaggactacggaagcagaggccagtagatctctgattttgaggccagcctggtctacaaagtattgtttcaggacannnnnnnnnncacacccacacacacacacacacacacacacacacacacacacacacacacggtaagtgctgggatttgaactcaggtcttcatagttgtgcaataatcactttaatgatccatccatctgtctaacaatctttctcccagtcaggctcttaactccaactatcacttctgtctctgtttttcttttcacttcattatctttgcacttgtagagtccctttactcagtcttcaagtattaaatagccgaagtatttcatatttcatatttcaggtcagtgagatggcttatcatgtagagacacttgatatcaagcctgaggacctgaattttattgtcataacctgaatagtgaaagtagagagaattgaatcccacaagtcctcccgtgtgctgttggattctgacttccagacagacagatatatacacacaaaatcaactagtaagttaaagaaaaacgaaactctgtataccttgcttccttattaaggctacttctgtaatagtccaggttcctgttgcctcattgttggatgtttaaaaagcttactcagtgcctagcagggacatcgtgataaatgtgttttctgctgtatatattcagttttgagtcattaacacagttgggtctggcatgatagcacagacttgagttacaggatcctatctatcagtgaaatagaagttctgtttttggttttgtaattactaaagataagaacttttttgttttctagaaagactgataattgttgaccagatagatcattgttagccctaccttgtttaactgtttggtaactgtttggtgttattctcaagatgccatgcatattttttgtttgtttgttttgttttttgtttttcaattcagagtttctctgtagctttggaggctgtcctggaactagctcttctagaccaggctggtctcgaactcacagcctcccgagtgctgggattaaaggtgtgcgccaccacccggccatatgctatgcatatttgaagggtgttttttagggtccatttttctgtttatacataaacataatttatatcttcaaacatgaaattagatcatgtcatattgtttagttttttttttgcctaatttccttgctgttgactttaccccttgttagtgtttagagaaagtgctatgaacagatatccttggattctttgtttttgtctttgagacagggtttttgtatgaagccctggctgttctggaactcactacatagatcagtctggcctcaagcacacagagagctacctacttctattgtgatcaaagggatgtgtcatgcttggctttttttttttttttttttttttttttttttaaaaaatttttccattgtacatttaaaaactccaatgtagctttggaaccatcctggatttcactctgtaaaccaggctggtcttgaacccagagatccacctgcctctgcctcagtcactgggattaaaggtgtgtgccgtcacctaacctttttttttttttttttttttttttttttttttattgggtttttttttttttctagatagggtttctctgtgtatccttggctggcctggaactcagaggtcctcctgagtgctgggatcaaaggtgtgcgccaccagcacctggcttgataatttttttgtctattgataaagtatgcctatttatgtctttgtttttgatgttactacagtcctggtttggatagagttagaaaagtgtctcctgtcaattttcagagtttgtgaattaggattaattagagaaactgactatgcttttactttgttttcatgatctatttactcattcattcattgagtcttactctgtaaaccaggctggggtcaccatggcccaggtagccctcaaacacattgtaatcctcctgcctcctgcctcggtctcatgagtgctagggattataggtgtgatccaccatgccctacttttctgggaagttttgatgacagtttagttagttaacctattttgagtctccctttttagtagatgatgctccccaccccattcttttttatgtttgtatgatgtgatgtgggcggcacaagacaaaatgtggatatgtaggacatctttgcgtgtccgtcccctttctggctagctggcccttgaacttcctaagcagttttcccatcacatcctttggtagacgtgttgggattatagattcacactattgcatcctgaccatttatgtacattccaggattttttattttgtctaggctatctaatttggtggcacatacttgttctaggtttccttttataatccttcaagtttcgtttttattgttaatttgtttgaggtgaggtctcactgtcttgctaggctgtcttccctcccctttttcagcaccgggattttaggggtgtgttgccatgccttgacatctctctaatgttcctttctcttttacttctaagattactactcttaaatcttgtctctttgtttgtggctgagtattttatctattattgacacacctgactgcctccctccctccctcccaatttgagtcaactgttgagcaagtagtagtactgtacctagctagctcagtagaatcgtaactacctacctaccttgctagagaccctggcttctgtctccaggaccaccaaaaaaacccacaattccccaccccccacccctctacagagtcttactttgtaactcagttgatctggaagttcttacacagtctggggtagctttcaacttgaccagctcctccaactcagtctcactagtgagtatgagtaagtagacccagttgtgaattaaatttaacgtgatcaacatgattgacatcccccttttttctttttccttttcttttctttctttcttttttttttctttttctttttttttttttttttctttttggagacagggtttctctgtatggctttggagcctatcctgacactcgctctgtagaccagggtttctttgtgtagctttggctgtcctagaactcactctgtagaccatgctggccccaactcacagagatctgcatgcctctgcctcctgagtactgggattaaaggtgtgcaccaccaatgcctggctttttttaaatttaaggagtgaatgctttcttctgtttttgtttgtttagttttgagatggggttttcatagcttcagtggctgggattcctgatcctcttgccctgagtgttgagattacagactagcactgccatcgtggctaattaactacccgtgtgtattttaaaagtgtgtgtgtgtgtgagagagagagagagagacagagagagacagagagacagagacagggagagaatgtgcgtgcatgaaggcatataagcttgcatgtgcatacgcataaaggcaagcatgtcatggtgtgaatatggaggttagaggtcaactttgtagagttgttctcttcttttcaagtgtatattagcgttctgggtattgaatttaggttactaggctcatgtaaccatacctttacctgctgagacatagtgctagcccattccctttggtgggtttctacttgttttgtttgagacagggtttcactgtgtagcttttactatgtgaacctcactatgtagaccaagctgttctcacaaaggtctgcctgcctctgtctcctcagtggaaggagtataagcctgtgtttccatgttcatctttttctattggttctgagtattgacctaaggtcctcttgcttgcacaagtacttttaccaaataagctgtcttctctgccccatgacaatctctaaaattttattttcatttatatgtatgaatttttttgtgcttttgtttttttcaatttgtgtgtgtgtaccatgtgtgcctggtactacagagaccagaaggagctattgattgggtttcttgaaactggagttactgatggttgtgagctgctttgtgggtgttggaaactgaacctgggtattcttcaagagtaaccattggtcttaatctcttgagtcatctctccagttcccatctcctaccccactttaaagtgaaagtgatatacaatgctacgaaaagcagtggaaggtgctgtattaatgaaacaggacagactattcctgtggaattttagcatctggaccactcatggctttgtctcactcagaagtgactctcatccagattcaatgtaacatgaaggctccatttcagaggctgtacttccttttggcacttaacatgttgttgagcctttgtctacagtagtgggacttctcagttgatggtggatccagggaatggctatctggtgtgcagtatgaataaatgaaagtgtatttggtccttgtgtatactggaagagattgcattaacattgtcaacaagtatgggcattgagtttctgtacagacatctttctgggtgtaatgcagtagtgtttggcagcatgaatagattgggaggacaagactagcttttagattggatataataggctgcagctgctggaattcttattacccacctacaggaaatggaaaggccttgtgaaaggtgctttatgatgcagaacttgccagttcccccatgcatcttgattaaggttccttgtaatgagtgaaatatgtagtaaaagctgaatggagttgggctgtagttcagttggtacagtgcctgcttagcatgcctaagacctagtatcacataaattgagcatggcgacacaagcttgtcatctaactgggaggtagaatcggaaagtcagaagtgtaagattgtctttgactataaagttagagccgagatttttttttttgtttttttgttttttttgagacattgctttggaggtgtcctggaactaggctggcctcagactcacagagagcgcctgcctctgtctcctgagtgatggggttaaaggcgtgagccaccactgcccagcctttatgagattcttaaaataaacctaagaaaagctttgattgctgtattgactgagaatgtgtcttattctgtcacttaggctggctcctgaacttgtgatcctcttgcttctttctcctcagtcgtggttttacagcacagtgccacacttgaccacatatttaggtttttaaatgtgttcaggagttaatgcagactttagttgagaatgctaatctagccaggcatggtggtgcacaatcccagcgctgggaagcagaggcacagggatctataagagttccaaagccagcctgctctgcttggtgagttccaggctgtccaggaatacacagtgagacaatgtctcaagaaaaaaaaaaaaaaaaaaaaaaaaaaaaaaaaaaaaaaaannnnnnnnnnaacaatggtaatttagggctagtggggagggctcaggtgcttctgacaaatctcacctgagtttatttaccaagactcacatgttggaaggagagaaacaatctccacatgggtgccataggctgccttctcctaaataaacaaacatttagttggccatggtgtttcacacctatagatctggcattctaaaggctgaggcatatgagaattatcttaaatttgaggtcagtctaggttatgtagtgacttccagtccaggctgagctacataataagactgccccaaaatcaactgtgacaacagcaacccaaaaaatagcaacaaaaattctccttccagacagtaaactggacctggaatgatggctcagcattgtacttgctgtataatcttgaggactggtttttggattccagcacccatgtaacatgctggcactcctgggcacaccaggtaaccccagctctgagggacagaggcaggagctttggtgttttcctggcttcctttaaccaaggagacatgggccccacccaggttgtgagagattaactcctcctctggcttgttcatgccacacacctacactgtgcatgcacaagagcagtcaaacagacagtaactgaagaaatgaacatttaaagtaatgctagctttactaaaaacttgtgtagagatatgacagaaagtttaatctcttttacataatttacttgttggcctaatcctggtatttttctcaaggattttggtttttcgagacagggtttcttgtgtagctttggctgtcttgggtttctgtagaccatgttggcctcgaacacacacagaaccacctacttctacctctctgagtgctgggattaaaggtgtgtatcaccactgccctgctatttttctaaaatttaagatactgtataggagccaagcatagtgttgcatatgcctgtatgtaatctcttgactttgtaaattaaggatggagaaagaagagtttaagactgggctatgtagcaagatagctcaagaaagaaaataaggaaaatccagttaggcttagtggcacaatcctgtaataacagctactcagggcctaacaggagttcaaaggccttcttcattacagagtgagttcacagccaacctagggtatctgctttactatctatctatctagagatagccctggctgtcctggaattccttaagtaggcctctaacatcttatttacacagttctcctgcttctgtctctagagtgctgggattaaagtgggaaaggcatgtcctaccaggtctggcttcagtgtaggcaagacttggtctcaaaacaacaaaatgtaaaatggattgagagggatatatatatggtacagtgcttgctagcatgtgtgaggtcctagattcaatttctgttacaataaaaacaaaacacgaaagcaaaacatcaaaccaataccacaaactccaaatgagcatttaatagtgtgtcactgcacaatgctactaatatttaattgttataaataatacagaaggaaaccttaaaattttactagtccattttctcttttttttttctttttttcaagacagggcttctctgtgttgccttggctgtcctggaaccctctctgtagaccaggctggccttgaatttattgattaaaggtgcacaacaccatgcccagcccagaagtctgtttcccatctcccccctcctcccgttccctccctccctcaactcagggtgtcttcaaattctcctgaagaaaaagatacccttaatcctcttgcctctgcctctcaggtgctgggattatgaatgtgtgctcaccacacttggttaatcagtgtttctcaaagtaatacttagtgattgagagttctgtttgactgttgccttctaacatctgtgttagtattttagctgctgaaatccactgctttttttttttttttttttcttcctaggcaacagctgaacagatgcggctcgcacaagtgatctttgataagaatgattcagatttcgaagctaaagttaagcaggtatgtttctaggaaagtatgctatgactgtgtactttattttttagttaaaatattctgtggggctggagagatggctcagggttaagaacactgactgctcttccagaggacccactttcaattcccagcacccacatggcagctcacaactgtctgtaactccagttcctggagatctgacatcctcacagacattcatgaagacaaagcagcaatgcacacaaaataaacgtttgttttgtttgttttgtttctctgtaacaacagctctgactgtcctgggactcactttgtaaaccaggttggcctctgcctccctagtcctgggattaaaggtgtccaccaccaccacccagccgaaaaataaattatttaaaagaaatattttctttatgaattaatgtgttttgcctacattatgtatgtgcactgcatgcattcttgttatccagctataatgcatgcttaagttttcagatacaatactatgtctaggagagtagcttgtgtggggtgtaactaataagtttgtatgtgggatattctaatgcaattcatgaatggtggccatgtacaagtgaagtcccagttaatgttttaggaatcaaaactttgcaagttctatgctattgacctaagtttaaacatgatctaggagttctgagaatgttgtctgtgcatatgttgtgctgactagtaggctgggggttgtggtgcacacctttaatcccagcactagggagacggagataggctgatcactgtgtgtttgaggccagcctggtctatgtagcaaattgttccaggccagttgatttgtgggtgagtctactagttttattggggagtatgggaaagtcagcctgcacttagagcctagacttactggagtctaggaaaagctctcatgtgggaggacagcatgatgctgtatttgaatagaagaatcagcaaagttaatattgaatgccactttttggttccctttaatcatcttctgatactttgatagcttatggaagtgacaggaaaaaatcaggacgaaagcatagtggcccttcacgactgtaatggagatgtgaacaaagctatcaatgtgcttctagaaggagactcggacacagtaagtgttatttttcctcagtttcaccttgtatggaagttgttgtagaggggtcggggcgtgctgtgttttggagggggtgttctgggaaataaacctaggttcattcatatgtgagacaagcactacaggaaagttccagtaacttggtattccttcagcaaaacagtttctactaccctggcccttggacatgaacatcaacctaaattaccccagctcttggtactaacaccccctaaagtgccccagcttaaagtgctctggtttgtggatattaacaccacctagagtaccctggcctatggacattaacattgcctagaggaccctgtcctgtgtacactaacaccacctagagaaccccagcctttgggtactaacaccagctgaaaacccggctgcagactgctcacagtttctcatctcagttaccacctctaacctcctcccaccccctcattggtttttttacttttgctcaggatagtctcaaacttactctgaggatgacatggaaattcttaactgcctgcctcctcttcctttgtgctaggattagaggatccaccacaagactggggattaaaatggtgtgtgtgtgtgtgtgtgtgtgtgttatatgtgtttatgtatgtgtgtatgtacaccaggtaagtgataccctaggaatagagttttgggtttttataaactgccatgtacgtgctaggaactgaatccagattatctgcaaaaccaacttttttttttgagggggggttgttttgagacagggtttctctgtggctttggaggctgtcctggaactagttcttgtagaccagactggtcttgaactcagagatcctctgcctctgcctcccgagttctgggtaacaagtaacaagtacttttaaccactgagctatctctccagccccttctgacctactcacaactttagactaacagaaaaccagggtttgctgataacttctttattaatggatattccataagcatcttctcatgaggcttaaaatacagacacttataataatcacacagagaaaactgtaaaaggcggttatgaactttattccctttatctctatgttgaaattggattgtatttggtttgtatttctaaattgaggaacctatttcagggcaagttaaaacaaataatacttcacctaaaagaaagtttattgatgattgtacccaaaatgattttcttggttacagagttggcttggtggttaagaaacctgagttcagtttctagaaccctcctgtgttagttcacagtggcctgtaggtccagctctccttttctgaatgcatttacgtacacatgcacacatgcacaaaagcctgactttgttttaaaagatttatgtattttattctatgtgtataggtgttatctttgtatgtgtatatatgcactacttgcttgcctggtgcctgtgaaggccagaagtgggtgtcagatcctatgggactggagttatatactgttatgagctactactgctaggaatcagacagtacccttaggctgagctgtctctccagcccctatacacacatagttttaaaacaaatacatatagaaatatgtatatatttctttttgtcctttttgagatttgtttttagttttattgtgcacgcatgtgtgtgtgcgctcatgtgtgcgcacgcatccctacaaaggtctcagttgtcagattccctcagagctggatttacaggcagctggagccacccaatgtgggtgctgggaattgagccgtccctccaagttttgtctttttcaggaaagtagaactaaatataaaagaattaaaatgtagggtttgaaaggtgtatgacattgatgactgtagaactctttttgatagacatcatgggagactgtaggggggaagaagaagaattttggaaaagaaagctcagaaaacaaagaaaacagagagaagagaactgagagagaagcaagtcgtggacggggaagcagcaaccgaaaaggaagaggtggcaacagaggcagagagtgtgagtacagcttttctgcttagcatttccataccctcagagagctgaaaggacagcccagagaaagcccatgaatccatctgtacgtgtaaatttcctactgtaatcactaacagtggtctgttaggtgctgtgatggggtttcctgtgagtgctggcctgggctacaggtagttagttcattttttgcatcctttaagactggtttctggtctgggcagtagtagccatgcttttgatcccagaacttgggaggcagaggcatgaggatctctgagcctggtctacaaagctacacagaggaaactctgtccatgcaaaaccaaaccaaccaaccatccaaccaaataaaacaaaactggtttctgttagagatcaagtgaactggggttggagtgggtataggttcattcactgataaatgaactatttttttcttccccagttacagacactcatagtatagacgtggatcaaattaataataggtatgcctttaatcctaagcagagtcatatggatctttgtgtttgaagccatcctggtatacatcgtaagtcccagaccagccagggttatatagtgagacactgtctcccccctcaaacaaaacaaacaaacaaacaaaaacctaaaggagataaatttaataggcagggctttttatttagtttaacctccatttaaaaatagaactggtaaaaatagggctcagtaggtaaaggtacctgccatgcctgatgacctgagttcaatcccaggaaccatgtaggtagaaggcgagaaggggacaacccaaagttattgtccaagctccgcaatgtgtgccatggcatgtttcctgtggatccatattttgacaccattttacttggaacagcccaggagacattttataattagtttattccattgactgcttgtgtcgtgtggagacctatggtactgagaaaaacagatttttttaaaaagttgatagcctggtgatgcaccttatcctagaatttgagagcttttagtagggaaattgaattcagggcccagcctgaattcatagtgaattcctgtctcaatgcccctcccccctttttttcctagttctcataaaaataattagtttaagtaaattctccttcctccagcagtgaaattacagacacccatcactatgccttgctctaaatttttgtttttggcattaagtaaactcctcctcctcttctttagattggttccactatgtagaccaggctggccttgaattcacagagatttacctgcctctctctgtctcttgtgttgggattaaaggcatgcactaccactgaccatcagcctggttttaaatttgatttaaaaattacttttaatctatttattgtttttttgtggatacatatgccatggcacacatggaggtcaggaaacaccttcaggttgtcctctctctccttctaacatgtgggtcctggggttgaactcaggtcttcaggcttggcaggtgcctttacctattcagctatttcaccagccttatgtttttattttcctgtatttatttatttatttgtttttgtttttggagacagggtttctctgtggctttggaggctgttctggaactaggtcttgtagaccaagctggtctcaaactcagagatctgccagcctctacctcccgggtgctgtgattaaaggcgtgcactgccaccagccttatttttatgtgaaggttaattgagtggtagcattaagaatgagaagtatttatgcaatagaaatgtagaatttggtgatggggattgaatcaaagcccttagcttgaactcttctttagccacatctctatgtcttatatattactttattttattttactttttgactacatgactttactcatgtagccctgactggcctttgactcacagagctttgctagcccctgatacccaagttctgggattaaatgtatcatacctggccttatatgatactttaataatgtcacatagaacatgttatgtggggaaatacattcagaaagaggtggagattatgggaagggatatggtaaatttaaatgtactgcaaaggaagcctcactgggagctcatgtgagttaagtagcagctagagtgaagagagttaatgatgccaaaatctcttgtcaggttattttttttttatgtgcaaccatttaagccagtatgaatatgaaaaatgaaaaacagtagtctttgcttgcctctttctgggtagtaccttttttaaaaaaatttttttttaatttgaattagaaagattttcatgtcaatcccagttctttcccctcccctcttcccctgccccccccaactaataccctacctatcccaaatcctttctgctccccagggagggtgagggcttccgtagggggtcttcagagtctgtcatatcctttgggatactgcctgggggcaggggtctaggctcagggagtatccctcccaaagtccattcctatgctagggataagtactgatccactacaaggggccccatagatttccgaggtctcctcactgacacccacattcaggggttctggatcagttccatgctggtttcccagctgtcagtctggggaccaagagctnnnnnnnnnnnnnnnnnnnnnnnnnnnnnagacccgagctaacatggggttagctcgttaaacaacaataaagcctcatgcagtttgcatcaagtttctgcctccgcatggtgattggggtggccgctgttctgggctgagatcctggaggcctgagcttctgggggtcttgcaatataagtcagtcatcaatctcattatcggggaagagcatttaaggttgcttagattgttagttggtgtcatctttgtagctctccagacatttccctagtgcctgatttctctttaaacctataatgtctccctctatctgggtactaccttaaagaacctgtctctttgacattaccttttacaatgacactgcgtgtgtgcctgtgtttgctacgtgatattactgatttaaacacttttacagcctttaattaagaaataaattttgtgatgtgtaacatcgttgcataatgcgtgtttgttttgttcttactgtttaaaaaaatgtattttagataagggcacatccatgcagagaaagtaaaattactatgttatctattggatgtcttgttgctctatatgtagaccaggctggcctcacagagatcctgtttctatcccgagtgccgtcattaaaggcatgttccaccatgtccagcaccgtcttattttaatttaatttgtatatctgtgatatctggcatgtgttgccattcattttttttgtggacaccccccacctctctccgccctttgagactaagtctcactatgttatccaactggccttgaacttacgattctctttgttccaccatcctaatgatgaaagtgtttggtcttatgcttccagttttgtggtactttgtacttttttttttttttttttttaaagtatacagtattctgcctgcatgtgtccttcaggccagaagagggcaccagatcttattcaaggtggttgtgagccaccatgtggttgccgggaattgaactcaggacctttggaacaacagccagtgctcctaacctctgagccatccatctctccagccccttttcctagtttctaaatgttgtttacatcctaacctgctgttggagacacagtctcccttgtagaccaggctggccttcaacttgtgtgatcagaggagagtgcaaccatgcttcacatttttaactttttggtcattatgtgtttggttttgttaagtttaagtgcctgagaagtttggtacaaaggtttggaaatgaaaagttggcatttctgctttttcctctttagtcaagggtgaggagaatggaattgatagcaaccaaggagacaaaccttcagagcgaggcaagaggggccgaggcagaggtaagggagaatgatccaaatagaatgctgggcacgttattgttttgttttgttgtttgtttttttttttttttaattttactttggttctgttattttggtgttgaagattgagcccagtgcctatcctggataagaatgtgctccgctgctgagctacactccagaccctggcatcctattgcttattgcctcttggattctgaaaaccacttttatagtcaggtgtggtgggagtcaggcaggggctggagagttctagtatacatagactgtcaacaaagcaagaacagcttattctttattttgggcttttgtggagttttgcttgtttgtttttgttgtttctagacagggtttctctgtccacccctggctgtcctggatatgtagaccaggcttgaactcagatacacctgtctctgcccctccctctcaggttctgggattaaaccaccactgggcaatatttatttacaatgttttatgtgtatggatattttgcctgcatatatgtccatgtgctatgtgtatgcaggcctgtggatcccagaagagggctatggatgttcctggggactggtgtacagtggttgtgagctgccatgtgggagctggggatggaacacaggtcctttgaccagtgcccctaaccactggacccctctgtctagcacttgtcatttttactttttggtttttcgagactgggtttctctgtattaattgttctggctgtcctggaactcactgtttagagcagactggccttgaacttactgatctgcctgcctctatgtggattaaagtgccaacaataaaggggtgtttttgttttgttttgttttttaaagagtctcatactatagtctaggttggtttggaagtcactatgtagcccagattggcctgaaactctgcttgattaaatcattcaacaatatatacatatacaaatactactgtattccacaattgtgttttctaaaggatttggacgtggcagaggcagaggggcaggaaggttctctgctcaaagcatggggtaagtcacagccatcctattgttgtagttatttcctagttattctacttttctctccctccgacctgtctacaacttattgatcacacttagagcattaatgttgccagagatattaagtcagggttctaacctttgcactgctggcagttttacttggataatgctttattgggatgatagatttcctgcacaacctttcagtataacccctcacctccatgaagtcattaaaatgtctgcagacaactgccaaatgtcccctagggtagggatcaggcatatgtgcataattatcctgagttgccgagttgaaagccagctaaatccagccattgtacacaaaatatgttcttgtaaaaataatacttttatcctgagtgatagtagtaaaggctgactgttctaagtaggtgttacaattgactactattgtttctaggtttactctttctccttgtttttttgtgtgtggcaagacaactcagatattgagccctaaactttaaattggtagcttttatgtttacttcaaattcttctgtgtatattggaacattggtacttattttgttcttcgttaatcacctgatcatgatgccttggggatgttctgttagaacataattattttttacatttttatgtgtatatactgacatatatgctgtgtatttgtgaacatatgcatggcgtccgtatggagtcagaggataacttttgaaagtcatcctgtccttccaccatttgtgtcccataatagaatttagcttgccagtcttggcagctggtgccatctcaccagcccttcagttaggattgtttttgtttttttaaaccaaggcttttctttttttttttttctttaagatttttatttattatgtaaacaacattctgcttccatgtatatctgcacaccagaagagggcaccagatctcataacagatggttgggagccaccatgtggttgctgggaattgaactcaggacctctggaagagcagtcagtgctcttaacttctgagccatctctccagccccttcagttaggattgtcatgcaaatatagagaagtgatgaacaaaacatagctatagctgtacacgaagaagaatataattccattcaaagctaggttgggggtattggtgaaatggttcagtggttttcttggagaggccttgtgtttggttctagtaccccggtaccacattgtgcctcacaaccctttgaaccctagtttcaggggatctgatgcactcttctggcctccatgggcagggagcatgcgcatggtgcatatatgtgcatgtaggtgaaacacttgtacacataaaataaaaatgatggcacagacccatccttaatcctcagcacaccaaggcataggcagacagatctaagtctgtaagttcaaagtccccttagtctacatagcaagttctgggacagccacgtgacattgagagaccttatttcagaaaactgacctccccaaataaacctgccaagcttagagtccgacacaaggaaaaagagatgtattaactgttgatattactgctcattggagtttttttgtttttgtttttgttttttaaccattctaagaggtttattagtaaagagtgggaaatggagaggagggagtaggtacaggcctgtctggaagaaatacagggagagagagaaattggacggtttttaaaagatgatttttgtgtgagccttgagtattttatttgtgtaccatgtgcaggaaggtgcctgtgagacctgaagatgttttcctaggtactggagttcgcaggtcaatttgagttgttatgtgggtgctgggtattgaacctgctgccaagtcctacaaggagcagcaagtgcttttaaccactgagccatctctctaacaccttccttgacaatttttttcctggtgttctttcttggctggaaaagcttccaggtctcctaacttcttaggatgccaaggatcaaactgttgaaacctgagagccatttctacaggagtagatatagggtccagaagtagccatttctttgttagaagatatgcatgcttggctggagatgtagttggtttagtgccttcccagaaagccctgggttcagtccccatcatatcataaagctggacatgctggtacaaacttgtatttttatgaggtatccaccaaagaagattactcagacatgtgttcaagccaacagaaagtctttattagctagccagcaactactctaggtatttgagacaccttgcagccctgcgccttttcttaggttgagcttttttaagcataaaaaaacacatcctctcttggcatacatcagttagccagaagtggaaccacagaaagccaaaatcaaggtttgatggattagatcttattcttgttttggcaggtgttgcctatgtgctgggttccaaggcttgaatggtacttctattatggtatcatttgttttaaggtctgggggcctgttaacagtatcagaagttcaaggttgtcctcaattacagagtgagtttataggcaacctgggatacatgaggcagattctgtcttcaaaaatgataaaaaggagtggagcctcatgtctttagtcctactacttaggaggcagaggtaggttgagtcttgccagcactacatatccatagtgagaccctgtctcagaaacaaaattaaaacattcacatcattgggcctaacaggtaaaggtgcttgttgctaagacttgtgactaagtcctgtctctgagacccttatggtggaaggaaagaacctgctccccataagtatgcgatagcatgtgtgtgtgcccacacactaaataacagataaaaaaatctgtatcaggctgtttgtgttggcataagcctttaattccagcatttgagaggtaggcagatttctgtgagttcaaggctaccctagtttacttactcagttccaggacagccaaggctacattacaagactgtctcaaaacaaacaaaatcttcattataggggttggagagatggtttagcagttaaaaccactggttgcttatccagaggtacctgggtttgattcccagcacccaccagcagcagctcataaacatctgtaactctattttacagaagtcctggcctcttctgatttaaatgaaatccccattttctggcctctcagggcacttcaagtaggtggtgcatagataaaacacccatacacataaagttaaaaaaaaaaaaagtgtttaaagaagcaacatcacaatggcttaaaagttagctgtcatcaatcaaatggtaggagggagaagccttttacagcagccctttgaaggaacttgagcttatttggtttggatttttttttttttttcctctttttgtttttagagacagagcctttcaatgtttctttggctgtcctgatgcttacttttgcctccccagtgctgaactaaaggtttttcgagacagggtttctctgtgtaacagccctggctgtcctggaactcgctctggagaccaggctggccttgaacttctagagactcacctgcctttgtctcctaagtgctgggattaaaggagtgtgccaccaatgcccatcaaaatttttttgtatgggaaattttgtacacagtgtttattttgtgattttgatgcttgctttagttgcctgtttgtttacttcaaaccccaggacatttaaccctgcagactattcagagtccgcatctacagatatcaatgggacaaagtcgggggtttgtgctcagaatggtacagatgagggcactggtaagtgttttgatttgtctgaagtctttgttttgttctatgtctgttcttgagaaatgatctcactatatagcctgagttggctttgaactttcgtggtcctcctgtctcatattcttgaactctgggatttcaagacttaacgatctaacctgtcttcaaagactttttttgagagagagagagacagagacagactgactgactgactgactgtgagtttaggtgcctgtagaggagagaagagggtgccacattcctcgaatttctgggaattgaatgcaggtcctctggaagaacaaacatccttaactgccgctagagatggttttaaaatgttttgttttatttgagtatgatggggcatgacctgtctgaagttcctgaatccaagttgggtatatgtgcttaaccactgagccatctctctagtcctgcctttactttaaaaatgtgatgaagtcctgttttctacctgactttgaaccttcttatcttcttatctcagctgctgaagtgctagaatcaggtgtgtgcaaccactttcagctaggagaagagtttaggattttttatgtttattggtgtttttcatgcatgtatgtttgtgggaccacacttgtcagtgcttgagtaggccagccattggatcccctggacaggtgttggtacactgacatttaggagcttgggattgtactcaggtcttccagaagaacaggaactactcttaactgtagagccatctttcagtccttaggagaaaattttactgaaagtgcttagtattctgggtggtaactgttaaaaccttaaaaaaaaaaatgcgtgcgggctttatctatctatctatctatctatctatctatctatctatctatttattggggggcagttactctgtataacagtcctggatgacctggagacccacctgcctctactcgagtgtgccagcagtgactagctatttatttattttggtgtttttgagatagggtttctctgtgtagcccttgcgctgtcctggaacttgctctgtagaccaggctgtcttagagctcagaccgacttgcttctgcttcttgagtagctgggattaaaggcatgtgccaccatgctcagctttttgtattgttttctgaaatatgtaagtaaatagttgttactgtttgtttacctggagatcttctggagatgagtttgtggtagtcttaactactgaagctatgtttatataaaaatataatttatgcaaaaattagccactaatgacccaaaataaggaataccaaactaattcttcctccacacctggaactttagttgagggctataattctcctggtaacatttggacagtttcatagagctcttgcagcagcacttccatgttttcctgctccaatctggtttatgtggtactgggattgaacccagtctttgcacctgtgaggcagacaatccaccaactgaggtacattcccattcccaaacagaacatggaaagcaattgtaataacctcataaaatgtgatgcgcagttgtttgtcgtacctaatgcctcttaacagtatttaagaagctgatacaggaggattatgtaaattctaggccaacctgggctgtagtaagatcttgtctcaaaaatcacatcaaacaaacaggaaatatccaatgctaagtaataaatctaatggtaacaacagattaacaaacttgtatctagaaaaatacttttaaaacaggtaaaattggaagtgacattatggactttaaaaaaaaagaaaaacttatgtaactgggcagtggtggtgcacacctttaatctcagcactcaagagtcagaggcagggagatctcttgagttcgaggccagcctggtctacaaagctacacagagaaaccctgcctttaaaaaaaagaaaagaaaaaaacccttatgtttgtgaatatttttccttgtatgtctgtgcatcattgcatgcctggtgcccacagaggtcaggtgagggcattggcccactggtactggagtcgcagctggttgtgagcaccaggtgggtacttagcattgaatcgacatcctctacaggaacaagtgcttttaactacggcatgaattttccagatctaaagaacattttttaaatcctgttataaatttgaatttttaactggctcccatctttgcatttagtaatctatagtgatccttcttgtaaatgtctagtatctttaacaagttgaattgaaaaatatgatttattgaactgggcatggtagcacacacctttaatctcagcacttgggaggcagaggcagaaagatctctaagttcaagagcagccagggcttgaaataccatatcaagagcagactccccccccaaaaaaaatcagatttatatagttcagttggtagaatgcttacacagaacccttagtttgatactagtattgtttaatctgggctgggcatagtggtatatgcctagaatcccactacttagatacaggcaggaagatcaagttcaaagttatgctaggctgcacagcaaattgaaggtgagcctggtcatgagacactgactcaagaacagatttattagtaagtaatttatttgtttttgaggggaggcacagtattttttaagtgttattttgagggtcttactctacagtcaggctagcctgaatgtagtgcaggctggcctggagctcatggagattctcctgcctcaactcctttagccctggatttatcattttcagctttattatttatcttactaacttgtttgcatgtatgtgtgtgagcaaatgggtgtattcatggagatgaaggagagcatgtgagtccattctgttcaccaagtggatactggtgattgaactcagggttataaaccttgacagcaagaacctttacctgctgagccatcttgctgacccattgagatctaatttacatacaatttctacaggcagaataagttgaattctaacatgcatacagaattgtaaccataattaaaattgagatggtgtttttctagtagcaataaataattacaaataaactaaaaatggatcataatttaaaagcttgtagcatcttttgtggctggggatgtagctcagaggtagggcacttctttccatgtgcaaggcccagggatgtatccctagtattgaagaagtaaaatgtacataatgtatgtgaaagatttgtttgtggagaaattcaacacagtttctaccaaaaggggcaacatgtttagtgttctggagttggagatatcattattgctgcaacctggttttctcctcaggatgataggtattgataggtagcttcagaatagattctacttcacatcttagcagtcttctgccttcatcctaaaaacacaatggaagagtatttacagtaagccaagcaattgtgatgaaacaaccaagaactcaagaacttaatctcaaattatagtaataggcagcatggaactagcagaagtgtatatggagagttgacaatgtacctagcggggatcatgagtcttctgtctagctgactagagcaaaaattttacaattcagggttgttcactacagtgaatacagcagagcaacggtccaagtgaggcttacatgtattcacaaagaaggcaggaatgaatattacttcaggataggcaaagataatctcagtaagcatgagtcattaagtgtgtgtgtgtgtgtgtgtgtgtgtgtgtgtgtgtgtgtggtgtggattcttgtgcccatgtgtataactctagaaaccagaactgggcagggcaccatgtgtcttttattgctctctaacttttattgctctctaccttcatgagtgggtatgaagaggtcagaagactttctaccagtaggttccaggaatgaactcaggacatcaggcttaacagcaagcacctttactttcttagccattttgctggctccaatagtttgatttgtaaatcaggcatagtaagacatttaacagttagaacttactaaatgaagtaaaaactataagtgttatatgaatgttcttgatgttttgttcctagaattttccatttaatgtttttgggccgtgggctctccctgaaggggactgctgtgtgatacattaactttatttcaagtgctgactttctcttgtttccatcattaaaagctttccttttgatccacagaagggatgggaaagcctcacagtatatctcaggagctgccaaataaaaggtcttatggactcaaaggtatgatggatgttttgttttgaaattttgcgtagataagaatccttcagaaccaagtatgccatccattggtagagtggtcccccagggtacttgagatcccaggtttgaccccagcactgcataaagtaggtgtggtaccgagtacaggtagtgcaaagtttgaggctagactcaaaagaagaaacctgtgagccagtcaagtaatgctaaaggcatgagttcccaatcctgatgagtttaatcctggggacccatagatggagagaattaacctttacaaattgtcccctgacctccacattcatgctgtgacacctataacccatcctactcccaccacaaaataaataaaactaataaaattttgaaaacttaaagttgctccattcctatacaaagtaacgggtttcagactgagtgtagtgctgcactctttgaatctcagcactctgaaggcagaggcagatagatttctgagttcaaggccagcctagtctacagagggagttccaggacagccaaagctgtgtgataagaccctgtctcagaaaactaaaacagaaagaaagggaggggaagaaggagtgtgagggagggaggaaaggaggaaggaaggagattcattgtgtcatttttatagaacaactgtgtatttactttgttcttacttatctcttccctatggctctaccttatactccttgcttctgggcttttagtttttgacctgggactgaagccagagcattgcatatactgtgcaaatacctcaccagtgaactataatcttagttagctcaaccatactgtttgaaactgaaaataatgttatcaaagttatcccatgtgttttggggtataggaccatagataggaaattgaatcatttgtatgaaattcttactgtgaagtttgaatgttctagaattaagagtctgagctcagtccagctgtggtagattctagcactcaagaggtctgtgagttttgaggccaacttagtctacaaagcgagttccagagccgttacacagagaacccttgtctcaaaaaactggggggaaaaaaagagtctgagttcacctatttccatagcatttttatactacagtgtgtatggcaggctattgcagcatgtgcctctggctttcctatgcttttcttcacacatcaattcatggtgctacatctttcctacctacaactatcattatgcatgatgtcttcctgcttagaaacaaactcattttctcacctgattatgcacagcttctttgtgttaattttaaaattatttccctgctcctctggacttagaacaggatgacagttacagtaatgacattgtgtgaacttggttggaaattgtgtaatgtagcaattatttttttttaccttgcttcctatatctgataatcgctaaagtcactggtacaggttttcattacaaaggtgttctaattatatgttcatgtgggtatatatgcacaaatacacatgcatgcggaggctgaaatcaaatttgggtgtcatttcttaggagccatgcctgttgtgttttgagatgggctctctcacttaggttggggccttcagtagtctaaactggcctgcctgtgagcctcagggattttcctgtcatcacctctcaaagatcaaacatgtatctgcctgtttccgaacaccaactttggcttgatcatgctcagcttttacatgagttactggaaattcaagctctgttctccatgctccattctctagtactcgtcttacctgttcccatagcccttgaattcctccccccgcttttttttaacattatgcgttctgagaattgatctcaagttcttatacttccacagtgagcacttcattgactgctaactcactaactcctatagtttattattatttttattttatgtatttatttacttattttttagggggtttctaggcagggtttctctgtggctttggaggctgtcctagaactagttcttgtagaccaggctggtctggaactcacagagatccgcctgcctctgcctcctgagtgctgggattacagacatgtgccaccacctccctgtttaatttattattattttattattattattccagtattgagaaattaaaccttgtgcatgctagacaagcactgtatggttaagctgtaacctgccctaatgatccattttattcttttttttttatttatttgtttattagtatgcttgcattttcttacagcagaattgctaaaatatttcttaaagtgcagtttgaggcattaattttattttagtgtatatagttctgggtatttttatagagaattcattttttatttttattaagaatagatttaaggaaataatttttcttggattggtaattactaattactaattagttgaattagtaattagttgaattagtaaaattactaatgagttgaattatttttcttgcataatacacaaactcattagtgttgaagtttctttccagctaggtcactttgctgtttttcagccccaaataagtacacagagatatattaatcatcaaactgttggccgatggctagggcttcttaaaactatgtatgtatctatgtatctctacatggctttatcttaccagagaacacttggcacgtcctatcttcccagtctctacatggcgtctacttcctctctctccttctcatgcctatacttcctgcctggccaatcagtgttttattcatcaaccaataagaaaaacatatatacagaaggacatcccccatcacattagtagtatggttgactgtactggacctttttttattccctgtcaggtgcctggaaaaattctgtggaagaatggacaacagaagattggactgaagacgtaagtgttcattcagacctttcttcctcctgctatgtcttagcatctctcagaaaaagcccagtgccatttatcttgtctaacctgctgctactgctactacgcttctttcccctcctcccccctcctcttctgcctctgtcccttgttctcaaagagttgccttttcaacacatggttctcaggttttttttattgttgtttgtttctttgttgatgttatatgtgggcctgaatgtcctggaattctagaccagactgatcaaactcatggagatccttctgcctctgcctctcaagtgaactctgaaatgttgaagctgctcacctaagtcataatttaaacactctgtaactccccccacttgccccctatgcgtttcactgtgtggccctgggtgtcttggaacttgctttatagaccaggctggccacttgcctctgcctcctgagtgctgtgattaaaggcttaagatactggctgttttttaaaatcttttatttggtggtggtgaaagaaccgagcattcaagtgttaggtcaagggcaaacttggtaattgctgtctcaggcacacatgtgcaggcaaatattcaaataaaataaaaaatgaatctaaagataataagcccgtggctttcaaataaagattactaatcaatgaaagagaaaagacatttttctttggagaaaaaaaatcatcaaacttttcaaagtttcctgcttttttagcacattcattgatcagtggtgtttcaagtggagtactaactaatacttgaaggttggccccctttgtgttaagttgttccttcacgtctactgatgtagttgcctttcttggggagggttagttacttggtggtttttgtatgagtcatttcctttagacaccctctaggtgataagaacactgctgcctgaaaagggctccagtcaaatatgctttgcatatgtattgtacagacaaaagtaaagttttttctgttgaactttccatacagctttctgaaaccaaagttttcactgcctcgtctgttccagcagagaaccacatcacccctgggcaaaggtaaagggtttttgtgtttttctttttatcttctttttcattcgaagcataattgaaactttgttttagggcaactatttccatcttttattctactcttacagtttctgttttattcctctaattagcctttatttccccttattgcagcactcataacttcattcacatgttatcagtcgtgtccaatgattattgaatgacacttgttcttgggatatgttagcagttggccagagagtatactaaacctagttataattcatagttactcttttaataaagttttgattttgcccttgaatttggggtcttactttgtagcccaggctggtctagagcttagagatcttcctgcctctgcctctggagttctggatgtatatcactattcccgcctaaaacagtttaaagactaaactttagtaccttatattctttagtttcttcatgcatttgtttagatggtctctaacctaattcaaacttgccattttaaatggacatgttattataatgtgccaaattccagcaaaagaaggcctttgaggttaaaattatttgtgtgtgtgtgtgtgtgcgcgtgtgcgtgcgtgcagttgtgtagaggctgtgttgtccttcagaagggctgtctaccctggggggaaaaaacattgttttacatttatgtatttttatgtgtctgagcttgcatgtattttggtgcaagagcatcatgcccatgtgccatagcacttttgtgtacgaggacatttccataggcttacagacgtggttcaccatggtaattctaaacacctttgataatggtgataagggtctgtgtgactggctcctgcagcttgttctctgaccttaatataagcatgcaaacacatatgtgcacacatgctctaaaggtatttaattttaaaattaaaaacattttaaatgctaaaaagtttaaagcctagatatgtgtgtatatatatatctttaagaagtacaagagagctgggcagtggtggctcatgcctttaatcccagcccacctttaatcccagcactcaggaagcagaggcaggtggatctctgtgagttcgagaccagcctggtctacaagagctagttccaggatagcctccaaagcaatacagtgaaaccctaaccaaaaaacaaaaaacaaaacaaaacaaaaaaggaagccctgaatcttcttctcaaaaccaagctaaatgagacagggctttattataggagagaaaaagttcatagatcttcgttgagtttataactaagtgaaaaatagctaatttactggtggtactttaatttctcaaaaaaaaaaaataataattgagagctggagaggtggatcagtgggtaagagcacccaggttagattctatcactaacatgtctggtcatcggtctccatacttccaattccaagggatctgctaccctcttctgatctccatgggtgccaggcataaacatggcacacagatacatatacatagaaatgaaacactcatatgtaaaataaatgaatatgagaaaaagataattgagttaggcatgatgttgaatgtctttaattttaatattcaggatggggaggtagaaggatcaggagttttaagcaaggctcacatataaagtaaacgggaagctaaccttgactacctgaaaccttatgtttcaggtggtagtgcatgcacacctttcattccaccacttagaaagtagagaccagaggatctctgtgagtttgagaccagcttgatctataaagcgagttccaagatagccagagctgtaaccagagaaaccctctcttaaaaaatgtaccaaacaaaaatcccaaccaaaatcgcataaataaaaaatgcttaaaacaaacaaaaagaagccgtcgtcttcacaaattttcaacacagctaatcagatggcaccagggactgcaaactccactgctgccagtgacgattatccttagccactcacttttatttcagtgcgatgtgtgtttgagtttgtttgtttgtttgtttgtgtttgcgtttgttttattccagtgcgatgtgtgtttgcatttctttgtttgtaataataggtcctcactttgtaaccctctggctgtgttggaacctatgtatgcaaggttggccttgaactcaaagatccaactgcatcagcctctcaattgctgggattaaaggtgtggctcaccaagtgtaatgtacttcattcagtatggggtcttcaggagtacgcccattagcaagtcatgaagaatttattgctcataaattcttgcagtaatagctggaagtagaagacggtctttatccaggaaacaatgatgtgatggtttccaagcacatatctgatgattctgtgtggagctcagctactgagtttcctgggccgagatcaaacttctttactcatcagtgagcaataactggaatgaaagatttcttcttattcattgtgtgtatgtgcattttattttcattttgggttgtaggtgtgatgtgccaccacacatgagtggaggtcaaaggagagtttttgagccttgcttgtctccttccaccatgtgggtccctgcagttgaaatcaagtttgtcaggctttggtggcaggtatctttacttgatctctaagccatctcactggtcaaaaacctgaactttttgtagttcttttatttatttttgagacaggttctctctacacagtctggctgtccagaaagtaactgtagaccagagagctgcctgcctctgtctcgtgagtgtaaagggtgtgtgtcaccacaccaggctgtagtgctttcccagaaaaccctccagtactgtttctcacttgagtcttactaaccttttgaaatagaatttgctttgattctggtggtgttgcaagttttattattagcactatatgtgctaatatataatacaaatagcacaactatttgtatcactggaattggaatatcatacattagaacaccaacttaggttttagattattagcctcaaaattgaaattggtttcaggatagtaaaaatggttctgtataaggaacttgggctaggatcttcctctgtatgatttaactactcagaccctgtctcactggcatgatgagagtttcagttaagagttgttaggagtaagcctttgaaaggactcatggagtaccattcctgggtaaaccttttacagctcccacttaactgggtaagtcattcatgttgtacacagcatttatcccaaacttcattcttcctgaggccatcaaattggaatatttggtgggcttttgggcagggtaataggggcattataagatcttcgttgaactgggcagtatggttttccattcctttacaggcagatttgggagttcgaggccaacctgttgtacagagcaagttctaggccagggtggtggtggcgcaacctttggtccaagcacttggaaggcagaggcaggcagatctctgtgagttcgagaccagcctggtctacaagagctagttccaggacagcctccaaagccacagagaaaccctgtttcgaacacctcctctcccccacccccaccaaacaaaagaaaaaagacttaagcttctactatggttggatgtgatgttttaacaatattgaatcactctgtttcaagaatattgaagcctgggggtggtgccacacacttttaatcctagcactaaggaggcagaggcagggtgaactcttgagttagaggccagccagatatacatagtgatactctgtctcaaagcaaacaaaaaccaaaaagttgaaaggaaaagataatcatgaacccaagtaatggtgtctttaagagccattgcagctcctctggggatatcatcggaatttctcagtgcccatttctaagtcggttcactcactggctttgtaacctgtttggtgactactcagcttctcttttattttctctgaaactccatttccccatggttttccttattcaatctctggcttaaatttcctttatattgatgtgctccccagtttgctggctggtgccacttgctcatgacagctgattgctcgtttgtctctcatctgcttagcattgacctggtggccttgctccagaagcctgtccctcccactcaagccgcagaagccaactcctttgaaacatcccagcagcagggctttggccaagcacttgtcttcacaaattctcaacacagcaatcagacggcacaagggtctggcagctccacttctgccaactcctattctcctcagagactggtaactcacttttatttcaagttggggtcttcaggaatgtgcccattagccacagtcatgaagaatgtatggctcttaccttgcagttatttcctcatgtaaaatgctggcagtagatctttgtccaggaaacaatgatgtgatggtttccaagcacatatctgatgattccgtgtagagctgagctactgagtttcctgggccaagatcagaactcctttatgagtcctggtcagtgagtgataactgggatgaaggtatccttagtaatgattttgttttttaaagattttatttattattatgtatacaacattctgcttccatgtatatttgcacaccagaagagggcaccagatggttgtgagccaccatgtggttgctgggaattgaactcaggaaccctggaaagccagtccgtgctcttaacctctgagccatttctccagcaccttagtaatgatttttaaacttcctgtttgttgtgggtgtgcctgcaggtatgcctgcacaccatgacccacttcaagaggtcagagacaacttgtaaaagtcagttctcactctccactctgtgggccatcttgtcagcccaactgattattttcccctggttttgtttgaaaatatgtttctgtatttagtatgttttaaaatttttgtttgcaaattgaataaaaagcagatgtttgtcttgtctgtccaggtgttcctactttgcacttttcttctattccataaaatatactcctttttcagctggacgttggtggtgcatgcctttagtcccagcacttgggaggcagaggcaggcagatctctgtgagttcgagaccagccaggtctacaagagctagttccaggacagcctccaaagccacagagaaaccctgtcttgaaaaacaaaaacaaacaaacaaaaattacactcctttttcttaaattgtcaagtattatatgacagagtccctttcgatatgttttccttgaaataatgtcacccgctgttaggcaggcacagtgactgttacttctgagtgccttcacagtgagttcccatcaggaagaattctgggattggtagtgaataagactgacaggtggggcaacaagcttggagtgtcaccagtgaaggaatttagtacaggaagacagctgaagtctgttgtaatgcaaagtaaatacagagaatctgccagtgtgctttcctctgcttttccatttgctaatgacatatttctgacatctatagtttctgtttggtcacggaggtcacagatgaagctggaccacactttagtgagagcaagttagtattaaattagggttgtggctctaaacgttactactatttataacccctggtgaaattaagtaacaatttaacaataataatatagtaaaaatgggttaacataagacagaatgaatcagaatctgtggtattattaggacttggactctgtacatatgctcatttgtgtcttactggttcagttaagtaggtgaaattgaaactatactaagtgttacagagagcaaatcagtggctgttgagaaaaagagtatttggtaatagtagctgctgggtggatggtggatgctgtgtcagtgagactagtgcttgagaaagatgggtttgagtggggcctcgatggcaaagtaacatttgcacaaatgcactaagaggtcagactgtgaaagatgggcctcagcagcccatgacctagtgtgttttgctcacagtggagagctctgaattttctaactaagctattccacatcttagaatactgataatagccaggcatgatggtgcacaccttttaatcccagtaccagagaggcagaggcagtcagtgagtttgaggacagcctggtctatagagagaattccaggacagccagggctacacagaggaaccctgtcacaaaaccaaagaatattgataataaaccaaagaatattgataatatccatcccctctggaggaggggatcattagtttttttgtttttttgtttttttgttttttttgttttttttttttggtttgtttttggttttttttgttgttgttgttgttgttttctttccctttcttgtggagaatgattggtgttcctagtcatctgaacaacctgagcacagtactgttggcatttactctgcttcctgcgtgtctcagtgtctgttattaactatgagcttttgatgtctacttcaatttaatgtttcaggaagcactcagcactgacctctgctgttcctgtcattagagataattactgtttgcagtttaggaaaagtttgtgttttggtctatcaagcatatttttgtcattagttgtttgtttcttaaaagtttattttatggttggagagaaggcccagcagataaaagcagttactgctcttgcagaggatccaagtttgattcccagcacccatgaattaaaaataataaattagtactaataaataaaataattatttttttaagaagactgtaataaatgcttttgtcctcttaacctcacatcaggaccagggaggaatgctgcatagtctagtactgttttttaaagcaaggtttgcttgttcagatgatccaagatgcagtgttcttacttctgaagaccactgtgtttgcaagcctgaagggaaagaaagctaagagcttgtgctgtttctgtgtctttacagtcatctgtcctgggctcagggtttggagaattggccccatcaaagatggtgaatatctccagctcccagattttggacaagttgaaagcaccaagtttgaattcgtttgctgccacttcaactgcaccgcagagcagtacaagtccaccagccactactgcttcttgggatctaaagccctcagcatcccagtcctcggtcctcaatcattttggtaagtatatgttttctgagctggtttattgtactgagtcagttagcagggcatgttttatgtgaacagtatggtggaacaactaaattaattgtctcattgtacagtgcctccatttgtttattgtacacaattcacaggaatatatagcttcctagctagaagagaagagcaaaaatgctgcatggtaattaatgcctggaattccaacacccaggagttggagggaggaggatcaccataagcttgagaccaacttagtatagagtaagaacctgttgcaaaagccaagcaacagcctctttgggctggcttgttacatgcctttgatcatcatcagtttgagcccagttgctctgcatttcaggactatactttcaaaaaaaaaaatgtcatgcccccccccaacaaaaacaacaacaacaacaacaacaaaaaaacagctggaaaaccaagcaattgggactagagaagtgaattatcgagtcctggttgatctttcagaggacctagcttggaacccaccatccacatgaccacaaaaccttatgtagctccagtttcaggtattctggtgcctttttctaaccttcatgggtacatccacatgatacacagatatgcttgtaggtaaacacctatgcacataaaaagtgtaattactgggttggagagatggctcagaggttaagagcactgactcctcttcataggacccgagttcaatttccaacacctacatggtagctcacaaccatctgtaatgaggtctggtgccctcttctggcatgcaagcatacattcagatagaacattgaataaataataaataaataaataaaacctttaaaaacaagtataataaattaagcaagtagttgctcaaatgaaaagacaaaaggtaagtgaatgcatggtaggggaatctaagtggtagtttgcaactcttaaatacagacatagatagcacttttgagttcttaatgtggaaagtcagtgaaatcactttctcagggttttggggtgcagctcagaagtagagtgtttggctgctgagtgaagccctgggttttaaccacacactacaaaggaaaagaaagtccacaagagctatgatgcacccccattctgccattttgctgtatccatcatgatttggtcaagctttatttttccattgtaaagggagcatgcatatacttgatgttttagtcctgtttcccagctatactcctgtgaatgcttgtgtgagggaatagtccgggttggtagaggggggatttttacatggttgcttttatgcttatcatcatcaataggcagaattctctgcttcctgaaatgacttgccatgctcaaagtaatctttgtgaaggctattaattacttcaactctattggaagctggattcataggcactctgcctgacagagagcattaattacagatttgctgaaagaaaacagatgttgagcatgaaccagggtgtttgtatagacattctaaacacaacaggcactcttattagttcatgtgttgacacttggtgcctaccatatagaaacattgatgttgaatctaaccaacattcaaacacactattcagataatagatataagcttctgctgttagcgtcctcccataatttataagtaagtttatgaataaaagtaggttgtttccatgttctctgtgaagcctgtgttttttgctacctgtctcattgtaattgaacatgaacttacttaaataagatgtgctgtttttattttattattttaaacagtgctatgttgcccaggctggcttttaacttaacaatactcctgccttggcctctgttcttatgagattacaggcatgcatcctaacactcaggtacttggcatttctttactgttttctttttttgtttttcttttttttgttttgttttgtttttgttgtcaccccccccagggtttctttgtgtaaccctggctgttttggaacttgctctgtagaccaggctgtcctctaactcagaggtccacctgcctctgcctcccacatgctgggattaaaggtgtgcaccaccaccaccaccaccaccaccgccacctcctagcagtttgcatttcatttctatgatttctgtttcctgaaattagaagtgttttttgtgttttttgttttgttttttatttttatttttttaattacaattggaggtggacagtggtggttcatgcctttaatcttagcacttctgaggcagaggcaggcagataatttgaattcaaggccagcctggcctacaaagtgacttccaagacagcgaaggcagcacagagaaactgtgtctcaccaaaaaaaaaaaaaaaggtagaaagaaagaaagattgcaattggcatgttctaatagttgattttattgtatggagaaaagagtcgtgtgttcattcattaccatcttgtttttcatagctcatccatataatacgagtatgaaaaaatagactgtatatgctgagttcagtgccctaaaggtgagggaagatgctgtgtgtacattaaaatggagcagcctatgaaaagaaaatgaagatatataaattatgtctgtgtggttttgatagtcaagaacccaggtacaaagttgcttctctagagcaaaaatgagaacagcaatggaaagagttgtgtttgtcacacatgttccttatagttttatattacacataatatatagtaatcaaaatagtttttttagaggcatgtaccaaatcgatggctgtggagatggctcaatttgtaaatgcccactgtgtaaggaggaacatctgtctgtggctgttcacccacatcaacattgggtgcaatggcacacatctgtgatcctagcactgaggaggcctacagtttaattctggagctcactgcctcgatgaatgatgagttcctccaggtccagtgagagaccttgtctcaacaaaaaaaggtagaaaggcactctgggaagcaattagtgatgacccctgcctacacacagagaatacagaaaaattgaaaatataataagcatctacaataacaaacaggtgtgtgtaatacttccatagatatttctacttcatgtcccctcttcatgaaaaataaggaacaaactattcaggcaccaagtgtgtatttgttttcctgttcttccagcaccatactatttactcttttcaagtagatggttcagaacctagtagtaatagaagcctcctgaaactaaaggtatagaagtccaggtgtgttgcagaattactcattgccgcttaacttttccttccacatttcatagacttcaaatctcagcccgagccatccccagttcttagccagttgagccagcgacagcaacatcagaccccggcagtcagtgttcctcctcctggtttggagtcctttgcttcccaggcaaaacaccgagagtcaacacctggagatggtccttctgtcaacagacttttgcagcttcccaacatggctgttgaaaatattgtatctgcccaccaaccacagcccaaacacatgaaactccctaagcgccggatacctccagcatctaaggtaagcattccatgatgaattccatgccaaagggtttatttcacactaacgcaagtatcagaaaactgagtattagacattgggatacagtgccttcaaccatagctcatcatcatcgcttgggaggatttggccatttttcaggcactaggctaattattagagagagtgcagtcaggccgggagacagagcctcttagttcaagtacagacctgagggtctaattgaaaggaagcacttttgttattgtgttggtatctcacagtttggaggtgtgtgattacctgactagataataccttcatcactgctgtgtccctgaaaatagctgaatgtcctcatctactagctaccgttacatcccccaacaactctaaagctacttaatttataatattaacatggaccattcctctacaaaccaataagttgtttgctcgctttccctcactatttaaaaggttctgtttctccccctccctcccctttcccactgtttttgccattgcagcccatggaagccacttgcttgagcctgttgtaagccttaaggcctggagccctggcctctcttcctaacagctttgctttactaggttcccgcttccgcagtggaaatgcctggttctgcagatgtcacagggttaaatgttcagtttggagcactggaatttggatcagaaccatctctttctgattttggatcaacaacttcagccagtgaaaaaaataatcagatgcctatcagcttgtacccgaagtctttaaggtacaaacctcacattttagtttgacaggatatagtcctttctttgcaaagtaaaacaaaacagagtgtaagaaattggtgaagacaatctaataaaggttttgtgcagctctcaacatgtttagcttcacaaactctgctatgcactcctttttcttgctccttccctctgacaaagtgtgtgtcagaactgtctgatcaacatatgtcatgcaagctgaatcctgcaaaatgtggcttttgtatcccttagctttcatttaagctttcagaggtcatccatcatggcttctattgccatccatttcactgagcaaatgtggccgggtcatagttggtagacatataggctttttttctctctttatgggtggtgaatggtattgccgtgttacaatgtttcttgtagcccgataactgagttgtgtgataagcacctggctgtggtcgtactttacactcccccaggagtctacaaggacctagcttctgcacagctttccaacacttcagtgaaaccttttgcaagtagaaagatttgagatttttattagtaggtttttccatgtctagagggaaaacctgttaaattatagactgtagtgcagctttgtagttaatgtgatactgagctggcctggttagtgaagctgtcatatgccagtgtgtgcctaactaacatagtgtactctttccagtgaccctttgaatgcctctttaccaatgaccagtgctgtacagaactccacctacacaacttcagtcattacctcctccagtctgaccagctcgtccttgagctccactagtccagtaacaacgtcttcctcttatgaccagagttctgtacataccaggattgcataccaaagctctgctaacccaccggattcagctccaggctctgttgctgtaagtggttctcctgggtttcttttcttaggatgcacactttagccaattacactttaaaattaatttattagtcaggcaaacacctttaatcccagcattatgaggtagaggcaggtggatctctgaattcaaggccagcctagtctacagagtaggttccaggacagccatgactaaagagaaactatgtctccaaaatgtgatgggggaggggtggtaagacgtcaagagacaacttgtaggagttctctatctagtgttgagaggatctaacactgggtgtcagacttggcatctggtgtctttgctcatagagccatgttgcttgtccatcatagtgtttgagggaaaggaccttgcttttattaaagcaatgaatcaatgaatagtacttttctaccccactgtcacattctaaagtgacattaactacaaagctgcatgtatatagtttttgtttttgtcttttcttttcttttctttttttttttttttttttttttttttttgtgtgtgtgtgtgtgtgtgtgtgtgtgtgtgtgtgtgtgtgacaggatttctttgtgtaactgccctagctggtctggaactagctctgtaggcccctcccgccttagtctcatagagatccacctgcctctgcccctgctggggttaaaggtgttcaccaccacccggccagcctctagtaccagatgtacactaccagaagtgttgcctgtggaacactcatcaaatctaatcagaaaagcattggttattctcataagaggcttatcgttgttaaccagtgggttcttctagtctggattgttgtattcaaggtccatagctaagtaagacttgttttaggggccttggggaccctcctggccaagaactgtaggatagggtatccagcttccaggactggggtttttgtttactaagctattgcttctaagaatagcttgatgcatgagtactggaaatctccattcaaaaaaactgaagcatcattctattaagaatttgagggggactggagggatggctcagggcttagcactgactgttcttccagaggtcctgagttcaattcccagcaaccacatggtggctcacaaccatctgtaatgggatctggtgccctcttctggcaagcactgtatacatgataaataaataaatctttaaaaaaaaaagaatttgagagaaaaacaccagggcaaagcaaggtctagatcttggcagttgctggtcagcagatagagaagaatgagggagaggttggcaagcagctgtggataggaatctctagagaagtggtatgaagcccagcatgtctcaagctggctgtgatgggtctccccagaactgcaatgatagcctgtgagccaccatgtggatgctggccatcaaatacagactccctggaagagcagccagccccctttctgctgtgtcatcattctagtcctagttggacattttaatatagagtgcatcagcttttccctgttgttactttattctggagatggtgtcttagcctcgtgggctctgcttttgagtgcacattctgtggcttcctccccagcctgtgagggcaggtgccattttattgttttagtcagtcccaccacagtgtcttaggtggagtcaagccagttgacttaggttctacaatttgtggagagcatagtcacaacccactctgtcttaaggtcacagctcatcttttcttagaaatagtcctcaatgtgatgcttcctggtatggaagttactctttctttaaaaaggaggttgactttttttttttttaatttagaaacttacctttgcattacagaatttacatgtgaaatgggaagcctcacatgacttaattataatgagacttcatcttccttattcagtttaacaacctgatagctgttttagaagtggtttatcctcctgtgtctttgttacttccctgaattctgaatctgttttcaaaatgcccacttcttgcgatttattaaagttagttgtattttgtcttctttttattttcattttccttttatattagaaaaggaatgaaacagatacgggatggagatgttcggttgtaagagcctgtcctgctcttgcagccacctccggcacatgacacccacctggtacctgagtgacgtgcactcacatagatgatgcacatacacatgagtaaagtctttgaaaagaaataattctcctttgttaacctgtgcatatgggtgttatagtcccaattcagagttaccctggtgattgtctggaaatgtccatgtgttaactctctctctgttctttgtagaatggacatggtggtggccgaagtcagcatacagtagacagtaagtgttatattttcattacaactggtgaaaaccaactggggaaagagtggctaacataattcagaaaacaccaattgagcagtggttaattctccaaaatcagtacttgaccttttccctggaaacccctttttgtttgtttttgagattgtctcactagtagctctgattgacctagcttggcttgctatgtagaccatgctggcctcaaactcacaatacctttgcttgcctctgcttcctgagttcctgaattaaagatgtataccaccataccacacctcagagctactttttctgagggggtgttttagtcactgtgtatcccaggctgactttccagttactaagatgtgaagttatctggggatctcagtgtgcatgtaggaagctaccgtcttgagccattctcactctcccttcctgctccttttctaagggaacattctctgggagtcttttgtgaagtcacccttaggctgtggaagtgacctatatatagcatcttaatttggggtgagatgcttcaccagagtcttcatccagtttctttcagaaccaacttcattttcagaatcagacactagctgggtgttggtgacgcacatctttaatccagagcttgggaggcagagaaaggccggcagatctctgtgagttcgaggccagcctggtgtagagagcgagtactaggacaggctcccagagctacacagagaaaccctgtcttggggaaaaaaaaaacagaaccagactttaaaagtcttaggagtgtgaattcactgcaaacccacctcccccaaccctatcctttagtttcctagcaattatgcaaggattggcaccattcctctcctaatttccctatgtaacacaaggtatttcactccaaactggttgtcctttttgattttcaagtcagggtttctctgtgtagccctggctgtcctggaacccagagagccttgcctctgcctcccaagtgccaagactaaagttgtgtgccaccactgcctgacaaacccataaccacagtcctcttacaaaaccaaaacaaacaaaaaagactcaaaaagaaaaaacaaaaactacaccccattattaattctattccacacttacatattactcaaagataacctaatcatctttttcactatcctatcatatcatattagaggctgaaatggcttcaactagacccaactgggaaaaattaaagcctactcctccatttcccacacagagtgctgctcttccatacaatccaactcatactccttagcccaataattaatatcctaacaacttcagtattccctttgtttttactcattgatattacttccctctcacaaatatgaattaaaatacccattacactatttatagcctctacagtcctatgtctaatttatgtccccacactcactatcgttctagcaaccaacagtaaaatatttaatattagcttggtcaatagactacctccctagcctatatatagctctgagttcagtctctaggaccacatgcaatcaggagtgctggaaggcatgagaatcaaaaggtcatcagtgtggtggtatgtgtgaatgcttcaattccagcattcaagaggtggtggcagaaggattaggagttcaaggttggcctgtgctacatgagtctctgtctcagaaagaaaccaagttggccaagctgcaggccagcctgccccctgcccactgtcaactcttcttgttagagtggagtgcttcctctcagggagctctgcaggagggaagagacgatgatgtgtttccaagcacatatctgacttatgtgcggatgacaatcaagctgagtcttttccacggtcatcagttttatctgtgacatctctgacacaaagacttgtatctgtgctctgtgattaactttttgaaacatataccaaggaagtttccgctgtgcatctgcaagcagatgttggtgtgaattcttactgcagttcatgaacagatttccacatttcccctgaagttccagtgcactctggcagcctggacctttactggcttcaagtggatggaaatgctctgaggaggtctttcttctctctcagctcttccctccctcaagctgtgctttgtaagggatatttgtctcactacatacacgtctgctttggcccgtcttgtcttttctgggtgctggtgccacgtgtcagaaaatgggagaaatatgtccacatcatgacagtttgtttgggtgtcacacgtggttatatagtcctgtctgcaagaagtggagctgcctggtgacatgcttaggctctatcctaggaaaatgttacatgtcatatagcatatctgaatgtgaccagataccgaatatgtctccagtaccaagggttgcttctgaggctaaagagatatgtttcttgcagctacttcatctgttccagctccaaagacgacagatcctccagccctcccatctgtgggctccctacccaacaccacctcctgcactgcacttctgccctcttcatcccagcacactgccactttgccctccttgtcccagtctggtgacctgtccagcaatgccctttctcagcttagcaggtacgtgggtgacagtgagaataagaaaggggatggagacttgtagggctcctatcagatgagaagtgtcatatagactttggttgtgctacacttgtttagactttggcctggtcacatcccagcatcagtagatacgaaaatcctaactgcgtctaatgtttctgctgcagagcctgaggtctgctgagaagcagtgagaacataagcagatacttaaggacttgcttgtccttagtttttgccctgtaccacttgaatgtgtgtctgccttaacgtctgtcctgattccagagatagactactgggataggataaaggaaagggagttagcttgttccccatgcttcctggtagaactcagaacaaacgtggttggttgatttgaactctggatctgatgagaatttaagctggactcttaggtgtgggctaaatagaaactctcttgactctcagtcttctgagctctccagctatgcaatcctggttttattctttttatagccaaaatggttataacttgttgaagccaggatgtatcagatgtcatggtgtatggccctgtagaccatttttgaccaacaggatgactttgtcacatgattctaggggcatcgtcagtgattggattgaccttgattatagcctgttaaaccaggtaagtcagacttccaggaacaaacttgctgacatgtggtactcctttttatcttctagttctctctccagccaccagaacagcttgtcctctccacatacagcgcgccccacaagcacgccccacactgtaagtgcccacacttcctgcactgtatacccagatctcccatgagttggttaattttgatctgagatgacccagagtctcctggttcattgccttagaccttgtgtgctttttcctcacacagatgtcggggctgtgcttgcttcaaggacttagggtgctcttttccctgcagggacagttttgtttcttgccctttttttatttcacaattttttgttgttgttgttattgaagaataggtttgtttctgtttcccgggtctcactgtcctgccttgtggcctaaaaaaaagatacaactaaattgcattcttttgtgttgatgtcattaggactttactaatggtggtgattaggtgtccactttgattgaccttcataccaaattgcctgctaagagacagtgtgagaaaagatgtttttagaaggtcaagaaatctaggctagtggagattcaaagtggagatgtcagcccacatttatgttcactcacatttatggatgtgcactgtgtttttccctgttgcccacacaagtcaggaagagggtttcagatattctcgctttatagctatgcatgattttgagataccaggtgtgtgctagggaccaaatctaggtcctctgcaagcttttaattactgaaccaccatctaaagttcctttcttcttatttatgtatgtgcaactgtttgtgtctgtgtctgtgtgtgactgcaggaaccatagagtctaggaaagggtgttggatcccctggagttgacatgacagttggttgtgggccctctgatatgggtgctgtgtagtggtagtgggatattggcagagacactccccctctagaagagctatgtgcgctcttaaccactggggtttctgtttgagacagtccatggaactcccaaagatccccttgcttctgtctctgaagatgtgtgttatcatgaccagcctccagcccagctttagtagtctggacggtaagtcatggtggctgaatctggccgtacagctagaggctgcactgaccctaagacagggcatctcactcatcttacagccgctgagcaatggcatggctcactgcctggtgagctgtaggagttctttctagctgtcccagctccgtctttcttgctatcaaatccacatgtattggcttttgttttgccagcatgccagtgtggagagcaccccatcctcagccaccttctcaacagctgcaacctctgccccaagtgccccatccacgggggtcgtcttgcctgggagcagtctgtgtctgggtgggaccacagtgagtgtgcccagcaacagtacccgggccacagcgttggtgacctcaggtatgtgcgccaagtcccttacctatctcctcaacgtaaacttccagacctgttccagacctgtacctccacctccacctccacctccacctccacctccacctccacctccaagcagctgagctgcctcacagtgaagtgggtaatctcttgtgtttggtttttcctctttataggcaaagcacccccaaacctgcctcagggggtgcctcctctgctacataatcagtacctcgtgggccctggaggactgcttcctgcttacccggtgagcacatagtagaactcctgattgcctcagggcctgatacattgcaggacttggtaaggggttgtgagttaggacagggctgcccacctgaggcagctcatctccctgtctctgtccacctaatacccaatgtgtcttcctccttctagactctatgtagacatgatctgtagcgcctgacccaagtcccattcctcagtgtgtctgctttggtgtgtgtggtctctaatgtatctgtgactctcctgaagatctatggatatgatgagctttggtgtgtgtggtctctaatgtacctgtgactctcctgcagatctatggatatgatgagctccagatgctgcagtcgaggctgccaatggtgagtacaaaatggcagcccagactctcagctctgctccttaacctgctcgactgccaccacagttggccttctggaccccagctatgggactctcccacactaccactgagaagctgtgtctggtggtgatatgcatggtttgacctgggggaggggaggcagacatatagggagcagtgctcatccccaggagaatttgagagactttagaccacgagcacatgtgaaccatgtcctgtaccaaatgtagtcccttattttcctgctccttttttttatattttcttcttttttaagaaaactaaaaatagctgaacatggaggtccgttcctgtaatcccagcatttgagaggctaaacttgagttagaccaacttaggctatatgttgagatcctgtctcagaagaaacaactatcacacagtcatgagagttgtacttggaaatataatgcagtcttcatctcagggcactggtgtttctttgggctgtagtggccaatggctgccctcatgactgctctcatgctcttctctctgtaggagaatgaggggcggggcttgactgactttattaaactgtcatatgggtttagcctttcacctttatttagaagaacgctgtccctggtgtcattgccttactttcagccagggttgtctgttctgaccctgagtctagggataaaatgatgggtcttataggagagccagtgttgagcagagaaccggagtggcccactcctcatgaagcaggattaccctctggttagccagtctcagcctggtgttttgtagagcatcagtcagtgacagacacagaatgtagacctcaacccaagcatggggctgcctgttcttcctccaggctcactccttctctacacacacccctgtcacatggttgctggccaggccacccagagtgaacagctggagggtcatctcctctccatctgttgaagtccttttcagagccagaggctgcctgaggacctgctgctgggtctaataggacttggaagaagttcctgggtagaatccaagtgtggcctgatgacactcaacagatggctttatcctgtgttaggtgttcttcttggctctccacgcacacccatgggtctccattttttaatttcctgtgtatgcgtgtttcgcctgcatgtatgtaggtgcaccatatatgtgcctggtgcccatagggtggaagaggacatcagatctctggaactggtggcagttgtgaactgccatgtgggttactgcaaaagcagccagttctcttaacctttgagccatctctccagccctttttctttttaaaagttttgtcttagaggacatctgcagtgagctcacagtagaaacagctttaaatttttccttggagcatattccagcctttcttggatttccttgttttatgtgaaagggtactcccttctgggtttcctccccccagtctccatttgggtttctgcaagctctttgcagttttctgtgcctcttggaattctggctgagaattccatgttttcctggtgtttaccaagacttgcagccaaagggttccagtgccactcccagctgagatgctcctgtctggcttggactcagaactagggcagctcagaatcctgggtagtaggggccagggcaggatttcgacctctataaagtataacccctttttactttttgtagctctgtgcagtgtcattgttgccagggctaaatgaattgggagagactaggctagttaggacctagacctgaggtcctgtacctggctctgcttcctgccccttctacgtttccagtggctcttcacttagtctcacagtagagagcagtcaagttggtttgatctgtactgtttaccaagtctccatatgtgttgtaaagataggtgtgagattggctctgtctgatgcaagcattaagatttgcagtctgtccataccttgtcagttgaaacgggggctctgagttgcacaccgagggtattgtcacattggagctctctggtacagctgcccaccatggtcacacagagtgtggcatcacccggagtgcccatgcttgttctgccagctgggtctgctctctgtgagggtgggacagatgatttgctcagtgaatctccttggtcttttctaggattactatggaattccctttgcagcacccacagcccttgccagccgagatgggagtttagctaataatccgtattcaggttagtttgctcagtgggcaagagtgggaagagatgggctggcctggagctagcaattggaggccagaaaggctgaggtgcttgaaggtatgagtcctgagctggcagttcctgttcgtgtttgtaacagccatcctggttcttctaggtgataccacaaagtttggccgaggagactctgcatcccctgcacctccaacgacaccagctcaggcacagcagagccaatctcagacccaccacacggcacagcagccctttttgaatcctgctctgccacctggctacagctatactggcctcccctattacacaggcgtgcccagtgccttccagtatgggcccactatgtttgtgagtatttctgcagggtgctccctgggctgtggcttcctcaaaggttgaaaccctggacatattttccagcgtctgtcagttacatctggccttcaggattgctcaggggtcagagtccattccccagctgccttcagatccctaatggattgcattcatgaaaagactgattctcttggttgtgacttggttttgtctgaggctgcctgatctcctctttgccttattctgacacactcaaacctcacctgcttgtcccactaggtcccgccaacctcggccaagcagcatggtgtgaccctcaacacaccccctaccccttttcagcaggccagtggctatgggcaacacacttacagcacaggtaagggcataccccctgcactgaggggcacagggtaggacagacttgcttagccaacacatgcctctttcttgtaccctgccatgctaggttatgatgatttgacccaggggacagcggcaggagactacaccaagggtggctatggtggatcatcacaggcaccaaacaagtcagctggatctgggcctggcaaaggtagtgtcaggtcctcacctgtaatagttgtctcctatctgactctgaggcagggctaccctgccagtctttggaactggcactgaatgctgtggggaacaactgttttttgtcctaggagtatcagtgtcttcaggcaccactggcctaccggatatgactggttctgtctataacaagacacaggtgagggtatacaaaggtgggcaggtagttggggagtggggagacatcagttcagcctggccttctcattgtcatctttgccctacagacgtttgacaagcagggatttcacgcagggacacccccacctttcagcctgccctctgccttgggctccactgggcccctggcccctggagcagcccctggttatgcgcccgcaccgttcctgcatctcatgcctgcccaccagcagccccacgcccagctgctacaccaccaccttccacaggacagcccggtgagcgcagggatggaggcagcctgcctgccctgggcctggggttgtgtgctacccattatagccttttctcctcttcctcctcagagtggctctgctcagcgcaaccagcccagctccctgcagcccaagactcaagcctccaaacccacctatggcaactctccgtactggacaaactagaccctgaaaacaagagggtgggctcttgtgcaggagagaacacgtggagcacatttctgggagcccggtgccctttcctagaattctgagacataactgtcagctgagcctctgtgggaagcctgcctcccagacccactgttgtatgtaatgtatttatgtatgtatttgtaaatgtgatagaagcctggagggactggggtgtggctactgggcagcatacaagtgtgctgtccccatctggacatcctcactgtagccaagtccacccctcccccccccttctgcctctaggccttccacgtggctcccagctcaggagctgtctggtgtgccactaaagggatggtggtttggggactggggtcaggtaccaatgaagaatcacgacttttctttatctcgctccctgtgaaatattgtttcttccttctgtaattacttcatacttgttgagaaactgatccttttgtcatttgtcatggtcccccttctaacaaatcttcagctgggaatagcagagatgatgcctgcacagcagggccttctgcttttggtctggtcctgccctaggggcttgcctttgaccaaccatttaaagaagaatctgaactgggtctcagagatgttcagcccgtcagctcccttagaaagaaatcaaagatctgcttccatctcagtgaaagcctgtctccaaacaaaggctcctctataccagttgtcccaaaccaggtgggcaactgcttcagggttttctctcacccaaactccacctaataaagttcttgagagcatgctgggtctctgtgtactgtaactaaggatggcttgggagagtaacagacctcacagggatggccatttgaaccgccatcttcttttaacctttctcttcagggcctaggctgtacctatgaaagctagtgtggcttttctgaccacctctcagtaaaacttgggaccaggggccacctttatattcttcagagaacaggagtgccagggtagtgagtgctgtccaaaccccaactgactatgatacagagggaagccaagtgccagaacctttgctttcactgactgtcacaggctgtgccaggcaatgcctggtatcctgaagtgagtgtcacagctcattgtggggtgggtggggaggggagggtgcccatgtagtcccaggacccaggcagaagtggggttagtgcactgttgaagcaggccacatctgttcccatgggattggagggtttgagggtcacaatgacgggcaacctctgctgtcatgaggagagcgtggctggtcataacacacctgtagcttagggtgctgtcagtcacacagtcacgtccgtccttgttctccaactcatgaatgaggggactgaatatgtgctgcctgccatgttctctgcgattcttaatgacaacgaacacaaagtgtttgcccatggatagcaacaagtggccttgactacagaaggtagcttctacgaaaaggttggtggagcccaagtaatggttttaacattttaactggtgacagtgagatatattttttaagggaggtgggtgggaggggatcacccaatagcaatacaggtgtattttatttcacatttttattagtagacaggtgggcagaaaaagacaaaataaatcactaaggggaagtcaacacaaaatgcattggataaacttttttctcataagttaaaactgaaaaaccatctataattttagctaagaaaactattaaagtcaggtgtgtctgctggtttcagttgaaaattgcatctgaatctttttagttgtaaatgtaaaccttgtgtatcagggcaggagggagggtaattttccaagagagctatgcatttcccttccaatggacaggaccaaacataagggaactagcatataatggccaggaaggaggaaagaagggactacaaaagtagagcgaggctcatagaattctggaatgataagagaagtgaggagactgagaagcaacaagagaatcatgatactacacactttctccccacagcctcagggtacatggaagtaaggagcattcattcagtgaggccttgattagactaaaaaaatcttgttcttttcatgccaaataaccacctatacccaaagttctacctgctgcggagacctccatctacccccaaaagtgaaaaaatacactcaagaagttttccacaggacatgttctgagggaccaaagactgaccactaacttgtcactcagtctaactgccagtgtctgcctgccagccagtcagtatagcctttgaactgcctgccctcccatcaaatgcaaagctagccttcagtaatgtcaacaaaggctgaggggccaccatgccacacaggccagcagggcacttccaacaattccaaggtgcctagcatgcccaggagtgaggcgatgttttcatgaaaggcttgtttagaccaaactactagctgtaaactttcaggggccgtggggacaggggtatcagcgctatgaaaggctttggctccaggtttgtaggctatctgggagcactgaagggaactctgggagtttttacaactgtcctacacagcacagcacagcagctgtgtttctgaatcactagacttgggtacagccctggccctgaggagattaatttcaggaccagactaaactttagaggccagagaactgctgggaaatggcattcattcaggagtgtttgaagagtgaatgaaaaccctgagatcagaaaggaaggaggaggaaccatgggaggaagggccacctactcaacagtggaggatccatcctccccaattcctgtctgaagataagaaggagtgacactggcacacaaggatcttaataacctatccttctgaaaactggtttacttcatagcactgctgaagtccctagatggtggaggtttaggagctcagtcttgcctggagtaacatgtgactgaggtccagggaaacaactgcctggactggaaatgcctgcagtcaacagaggccctgacaaaacagaagccaggggaagctccaggaacaattcctgcttgcactccacggccgaagtacactgagaagagaaagatgtccagatcatatccaatgagggaaaacaaccagtcccaagtcacacacatccaaaattatcactaccagtataagcagctcaacgaaaaccaaaatcttaacacatgcacctaggattaatactgaataaacaaaaataaccctcaggtgagagtatctgagatgtttcctctcccgacagtggccacaagtaattttcactcttccccacagcaacaaccaaagctggtataactttaattttttgttttcataattaaaatccacacacactaacctccactcccccccacttgccccactttctggtagaaaaaagttaccctacctttaaaataaatagcaaccgagtgctcagttctatgtaaagtatgaatatttatttcaggctttagatcccaatcgattccaaaaaacaaaatctgatttctctcctcagagtagctgtagcctccatgttgggatgatgtcatagaggcagaagcagcacattcatcaggcttagcaagaggaaggaagtccctgatgcccaccccaccccagcctcaggaagggaaagaaacaaattcaccaccacggggctgaacaaatgcacacgcactaatggaaggagcagctaaaccttggcaaattggcttttttttttttttttaaagtttgttttgtgggttttttttgttttgtttttttttgttttttgtttttttggttttgtgttttttccccccatttccttttgctacccaatatatgcagcacttgtggactcccagtgggttcccagctttaaacacattgatgtcttaaacagactaattcttcaagaatctaaaaacagacaaacgtgttttgctgtgaacattctgcagagatgaagtgaggtgggagtttgaagggcggtggtgtctgttttaaaagaatcaatacagtgatggaagggtgaagaatgcgagaattcagacattctgtgggggttactttctctccagtaaaagtccataaaaaggagcaaactgagatccgcaggggagtcagcaggagctgtgtgtgtttccccaccccatgagtaagttttcactgaggggccaccatagatccccacttgctccctccctttggcctgagacgtcagggcagtacagggtactgaaggaacatgtcacgactcctcattcccagaatcatcatcatcataacagtcggcatcttcttcctcctcatcttcatcatcaatgtcgtcgtcatacaagtcgtcataaagcaaatctgagctgttgtcattggaaggcactttagttttgatgcagtattctgccagggttgtggggaccttcactccatccttctctgcttcagccttagtggccgagacctgtttcctgaagaacgggataacaaaatgtttgtggaagtctgttttgtgagggtttcactaacccacactgactttcaactctaattcttgcccttaagtctcctcatgctgggaatgtgagcacaagccatcatacttgacttagccctgttttgaagacagacttgtaactgaccttaatcaagattctcatcactcactttccaaacacacagcctaagcctacaccacaccaggactctcaacgtggtatcaacatgaagggcccttgtttaattaacacttcagccttgttcactgctgcatggatcaggttagctaacctacagcatttgaaaattctgtcttagccgcccatctcctgctaagggctcagggattacaggtgcatattatgcactactggccttttaagtggtttctgaactcagggtcaggcttgaaggagtgccagaaatcaaacccagggcttggcgcaaacgttctaccactgagctagaggcccagcatatttttagtagcttgaatgcatgaagctgattactcccccatgttactaagtgttgggaatcaaatctagggattcacaagctggacaagcacttctggcaatcacaccttcacacaatccacttcctatcagaatgtgaacttcacatgagagtggacgccatgcccgcctcagtcttccattacctagtgatggcatggcagattaacggatgtgcagcaaatgttgattattaagtgtaggatagtttctttccaaaagtacaaaacccaaagtcatcaggatgggtgaggggggttggaaaaattgaaaacacaagaccaccacttcctgaaactgaagtctgctgcaggcctcgcacacgggtgtttccactgtagcttctataggtctttaccatttacattaattaccttcaattcttgacatacacattcacctcagtggctgaccactaaaaacaagcaggacacagcaatgcacacagtactccccgtgctggggaggcagagtctagatctctgtgttcaagccagcctggtttaaagtgccaccccccagacaaacaaacccaccagagtttgcactactttctagtgagtttgttttggtttctgtaatggattctctttccatagctaaatccattaggttcctactccataaatctgagacattgttttaaagtaacatgatactgaggtttgaatgtgaacaccaagttgactcacctgataatctcggcgtactccttgtctttccctttactgtccctccatttcctgaacataacggaagcgtccacattggctggggaaaaggtgttgggctcattaagcagtgagattacacttaggaggatagtcctgaaaaggagacagaaaaaccatgttcgaaaggacagttgcttttgtttgtttttgagaggagggctgcggaatgagagagaagtttggctgacttctgcgaaggcccttatctaatacaggaagtgctgggaccctgtgtgctcacacctgggaagggcagttaggactgagttctcttaacaagacacactgggagagctcagaacacaaagtacagtttttaaagaaattacacttttaaagtctttctcacttaaaatatcttgatacaaatttgaggcttataaaaaaatgatgatacagttttgtttggggggctggtgaaatggtccatcaagtaaaggtgctttgccaccaagcctgatgacccaacactgatagccaagatgagcatgacaagaggaaaaccccaacaagctgtcctcatacttttgcttagatgccagacatacacccacagaaaacaggagtgaaaaacattcttaagaccagagcctttggggctggagatggctcacaggttaagagcaccgactgctcttccagaggttgagttcaattcccagcaaccacatggtggctcacaaaccatctataatgagatctggtgccctcttctggtgtgcagacatacatgctggcagaacactgtgtacataataaataaatctctgacatcagacctcaccaactctctcaatgcccccaaaccccgacactattcccaacatcccctctcctcatccccttgccccagcccccaacacaagcagagacacaccttcctggatcagaccatcaacctccaattcagggggagaccccctgctcaaccacaggccacacagacctgaagaccagagaggaaacagaaaccaaggaataaaatacccatccaacaaagacaaactcagaaatcggcacctaaacctatatcacccaaacccaagagcctgggtgccagtgtaagagacagtaacgaccagggcaacatggcaccacggagcccagctatgctaccacagaaagccgtgagtattccaacacaactgacatacaagaaaacatccttaaaaccaactttatgaagatggcagaggtcattaaagaggaaatgaacagatcctttaaagaaaccaagaaaaagactaacaacaacaacaaaaaaaaatcaggaaataaatgaattccttaagagggagacagagatttgaaagaaacaaaaatgttcaagaccagaaaatggaaattgaagcaataaagaaaatacaacctgagggaattctggaatgaaaattctaggtaagtgaacaggaactacaaaggcaagcttcatcaacaaaatacaagagatggaagaaagaatctcaggcattgaagattggacagaacaaacagatatgccaaaggaaatgttaaatataaaaaattcctgacataaaacattcaggaaatctgggacactgtgaaaagaccaaacctatgaataataggaatagaaggagaagaatctcagctcaaaggcccagaaaatattttcaacaagatcatgtaagaaaagcttcttaacctaaagaaggacatgcctataaaggtacaagaaccatatagaacaccaaatagatggacaagaaaagaaagtctcctcaccacataatgatcaaaacactaatcatacagaataaagacacgataaagctgtaagggaaaaagaccaagtaacatataaaagcaaacctgtaagaaagacaaccaacttctcaatggagactctaaaagccagaagggcctaaacagatgtcctgcagactctaagggaccacagatgtcagtggtcactatacccagcaaaactttgaatcaccatagatggaggaaacaagatataccatgataaagtcaaatttaaactatctatccacaagtccagcccttcaaatggtactaaaaggaaaactccaacccttaagttggataataatcttaattaactattcccatgaaaacataggaaatcatttcctactagcaaagtcaaaagaaacatgcactaacaaagaaacaggaacaatcaatgatcattgatctatctcaatatcaattccccaataaaaagacacagactaacagaatggatttaaaaacaaaatccagggggctggagagatggctcagaggttaagaggttaagagcactggctgctctttcagaggtcctgagttcaattcccagcaaccacatggtggctcacaaaccatctataatgagatctgttgccctcttctggtgtgcagccatacatgctggcagaacactgtgtacaaaataaatcttaaaaaaaaaaaaaaaaaaatccatccatttgctacatctaagaacatacctcaatatcaaatatagacattacctcagaggaaaggcctggtaaaagattttccaaacaaatggacctaagaagcaagctagtgtagccattctaataactaacaaaatggtcttcaaaataatcaagagagatagggagggacacttcatcctcaccaaaggaaaaaccaatcaagaggatctttcaattcttactatcaatgtccaaattctagggtgcccactgttgtgaaatatttaactatgtaaagatgtgttacatttgtttacttatgaaagaatatattgctattttaccttccctgacaaggcacctgactggtccaataaagagctgaatggccaacagctagggactggtggcgctggtagacggaataacaggagaagtaatctgggaaatagaggaaggaggaaaaaatagggagaagagagagaggccagccaaagacagcaggaaagaaaaaaaggtaaaaagccccgaggtaaaaggtagataaagaaaatgagattaaggggctggagagatggctcagtggttaagagcactgcctgctcttccaaaggtcctgtgttccctttccagtaaccacatggtggctcacaaccatctgtaatgagatttggtgccctcttctggcatgcaggcataaatgcagatggaacactgtacacataaataaatcttaagaaagaaagaaagaaagaaagaaagaaagaaagaaagaaaggaaggaaggaaggaaggaaggaaggcagactaagttaagctagccaggaaacaagcctaagctaggccaagcatgcaaaactaataagaagtctccatgtcatgatttgggagctggttgatggcccaaaagaaaaggcctggtacaaccaagcttataaaagaaacatcactaaagcttaaatcacacattaacagtcatacactaacagtgggaggcttcaatactctactcttgccaattggtcatacagccagaaactaaacagagtaacactggagtaaactgaggttaaaatttaaatggacctaacatatacacaatatttcacccaaacacaaaagaacataccttcttcccagcatctcatggaaccttctccaaaactgaccacataaagcaaatcaacacatacaagaaaattgaaataacttcttgcatcctatcggatttcaagaacagaaacaagagaaagcctacaaactcatggaaactgaacatctttctactgcatgaaaactgagtcaagacagaaataaaagtaaagacttcctagaattccatgaaaatgaaggcacaacatacccaaacttatgggacacaatgaaaccattgctaagaggaaaattcatagcactaagagcctgcatgaagaatttggagaaatgctcactagtgacttaacagcacacctaaaagctctagaacaaaaagtaaactcacctaagaggaggagatggcaggaaataataaaatcaagggttgaaatcaataaaatagaaacagagaacaataaaaggatcgatgaaagagagttggttcttttagaaaatcattaaagatagtcaaagccttatccaaattaactaaaaggccaagagagagcatccagattaacaataccaggaacatgagggagacatatcatgtactccacaaaattggaaaatctaaaaaataaatggataattttctcaacagataccacttagataagttaaatcattatcagataaacaacagaaaaaaaattatagcccctaaggaaatagatgcagtcattaaaaatctcctaaccaaaaaagcccagggccagaattttagtacagaattctgtttttagtacagaattctaccagactttcaaagaagagctaataccaacactcctcaaattattccacaaaatagaaacaatacattgtcaaattcattttatgaggtcacactcaccctgatacccaaaccacacaaagatttaagaaagaaagagaattacagaccaatttcccttatgtagaggcaaaaatactcaataaaacaatggcccctagccgggcggtggtggcacacgcctttaatcccagcatttgggaggtagannnnnnnnnnnnnnnnnnnnnnnnnnnnnnnnnnnnnnnnnnnnnnnnnnnnnnnnnnnnnnnnnnnnnnnnnnnnnnnnnnnnnnnnnnnnnnnnnnnnnnnnnnnnnnnnnaaaacaaaaaaaaaaaaaaaaaaaaaaaaaaaacaatggcccctacccccaaaaagctgggcattggtggtacaagcctttaatcccagcaattaggaagcagaagcaggtgagttcaaggccagtctggtctacagagtgagttccaggaacagccaaggctacacagagaaaccctatttcgaaaaataaaacaacaacaacaaaactgacaaaccaaatccaagaacacattaaaaagatcatccagcgtgaccaagtaggcttcatcccagagatgcagggatggctcaacacatgaaaatcagtcaatgtaatccaccatgtaaacaaaactgaaagaaaaaaaaaacaaaaaacaaaaaaaaacacatgctcatctcaccagatactgaaaaagcctttgacaaaaatcaacaccccttcatgataaaggtcctggagagatcaggaatacaaaagacatgcctaaacataataaaaagcaatatacagcaagccaacagccaacatcaa

SEQ ID NO: 13 - DNA, 3042528 bp, Cricetulus griseus (residues 1-1,521,264 of 3,042,528)
  source 1..3042528: mol_type = other DNA; note = MTMR2 Contig Sequence
  misc_difference 1..3042528: note = N can be a, c, g, or t
ggacaggtgtgccggaacacgcccatgagggcggggtgaggggaagtctaaggtgagttcaggaaggcttcttaagggaccgcagacacgtggaccttcccttctccttgcccatcgccgtgctccctcctgctctctctggcccgctttggcctgtgcttggctggtgcatccgaataaagaaactttggccctgttgactgctgactgatcactcctcaggtgtatgtagagggaaatgctaaccacgcccacttgagtgctggcacaggtgatgttgaccacacacacttggacatggtcagagtgacttatcaagactttaaatatgagggtcacacacatgtggctctctctgttccctctccagactggttgtgcaggactggctccttcccatgagtacttcctaataaacaatctgtttttcaaactagttctgattccattgcgatctgcattaattgtgtttcacattacctagtgacctttgccagccctcaagcaggcatggtcagcatttccctctaaaggtgtatcctgtcagaaccccaatgacagtccagtacagatgcctgaatactgtcacttatcactaagccataagctatctccaattgaaaatgaaaatttaaatttacttctctccaagggagaaacaaaccactcttaaggttaggtctcacaatgagccttagatggtcaactcaaaatgaactaagtgccatctttctttctttctttctttctttctttctttctttctttcttccttcctttcttcctccctccctccttccctccctccctctcttcctccctccctctcttcctccctccctccctccctccctcccttcctttctccctccttcccttcctttcttccttcccaccttccttccctccttccttccttccttccttccttccttccttcccaccttccttccttccttttcttttttttttttttgaaattacagattcattatgtatatactacagcttccagttttgtgtttttatgggattcctgtatgtgcacacatgtgtgtccctgcatctgtgcttcttgtgattttttggttctttttcttctgtttgtttgctttgacctattctattttatttgcttttttatattttcttattatcccttagaaatttgtttgtttgctgatgagagacagtaagggtgtggatccagatgggaggtgaggtggggaggaactgggaaatgtaggaggaggggaaatcttaatcagaatatattttatcaaaagagaaaaaaacaattttcaataaaataaaaatgaaagacaaaacatccagtatggtggctaataacattgtcaggcttgcaaaataatcatactcttgaggacccttcctatactgagtcaaaacttaatccaggcaaccagataccaggtagagagtggtggaggcttgataagaacctgaaagggtgccttcagtgatttttttcagccaagatagcacatgcctgatggagccacttgnnnnnnnnnnnnnnnnnnnnnnnnnnnnnnnnnnnnnnnnnnnnnnnnnnnnnnncccatctgctgctgaccactcaggcagagtccatcactggtgtgtagccaaatcagagatgtagacagcttgcactaaccccccaaaaacagaagaaataataaattgttatttgaattcccctaacttttagaggttttttaattcagaaaatactaattgaaataagtaagtaattatatagaaatttagcaaatacttaagtcttattcatcaaaatagaaagggcatttgaaacgttattaattttcaaaacaaacaaatatatgttttaagaatgcaattaaagttcattagcattattatccaccatcccatggaaatggattgccatgggaaattaacattcaataatatctatttagctaatggcttttatttaagtaagcactaaagtgaacattcacaatcattacccatgtactttctttacagtgaggaaaactcacacatatttctgtcaactgtgaaaactccttaaaaagtctattaagcaagtagaaacttcttgaaggagaaaacaggctttttacatcataagctcattttggtgggaaacattgtacataaatagttgtgtaattttagatagatcataggatggtttgagtttcaatttatatttctaaaaaaattaacaaaattatatcagaaccctatgaaaaatcaaggtataatttcacaaaaccagtaactagagatttctagataggacaagaagtcactagttttagcttgattgattaattttaaccagatatttttaaacctgttatagaattgtaagttttttagattaaatttctttattcgaattcttccacatattccttgcaatatttgtgattaattatgcacatgtatgatctaattattagcaaagaagagcagaatataattaggcactagcctctcctggtataaagttcatgtgtttattaatgctgtcaaatttcctttcacgttgaagcatgtagtgtgcacagggattggatcatttcttgggataccagtaataactaacaacattggatttttgttgttttgctttttcaacaaaggaattggtttgaaagtccactaattctctatatgattattgttattgtgaaattgttttgtaaagtctagcacactttgtaaatatgtttgtatttgtaatgttaacttggtataaaacctaaataattttacatcattattttaaaatatttcttcaatgggatcacacaaagtttagggattctctttgtgatagtgagtccatggttacactggaatttccatataacaagacttttgcaagttctttaatgatattagtttaatcttcacaaaaattctagagttaggaaattaacaaggactgaactacctacccttttgtcaggattttggtcatactgtttcatgaatattgataagccgaaggaagggcctaggcttgattgttggataagaaaagctattatattagaccttttagagataaactcaaatgtctacctacaatgcctgtgtatgcaggtatttctctaggaaggaacacatggtgggaaatgtcattttgtaaatatgtttatcttattggttgatgaataaaacaatgttggccaatgaggcagcatgacaggtgggactaggaaatgaggaggattctggtaggtaggcagagagcagtcacgatgtaggaagtgagagaagtagcaagtccggacttgttctcccacaagaactggctaacagtattataatgaatatgtctctgtgtgttgtttggagctgacacggttgtgggaccaggctggtgggaaagtactcctaacagacacaaagcttgaacaagaatgtatttctctgggaaggaacaatttcacctttctgtaattttattccaagacaatggccattttgaagaaattcatcaaattttccacaatgagggatcaatggttaaaacaggctctgctcttgcaaagaatacgatatcagattctctggaggtagaatgacaggtgactgtaagatgataactggggatactcggaactgaaatcaggtcctttacaagaatggtatgtatgtgatcttaacttctgagcactctctccaggcttctacaagccaattcgtgtatatatacattattatttttttgttttggtttggtttttagaggcagggtttctctgtggctttggaggctgtcctggagatcgctctgtagatcaggctgatcacagaaatccaactgcctctgcctccctagtgctgggattaaaggtgtgtgccaccactgcccagctatatacatttttaaattatcacgttatagagagtgatggattaagctacacaaaccaaatgtacacagattaatattactgtactacagtcattgctagaaatatttaaatagaagactaggatacagagtattaaattctgtataattccaaagtaatgttgaggtgtaagtggctaagttccagtgcacttgaaaatgaaatatagaagaggtcatttgctgaagcactggtttcacattgcccacattttttcttcactagtatgcatagaagtaggttgcatagcagtagatgaagaatttctattcttcatttttcacctgaagtgccacccatttaaaactgtgaaagctgcttgtcactccaacttcgtaaagttgacaaggccagtgcagtttctttaaaaatctctgggtgtaaagacattcctctgataaaccacttctgaagtgagaatcagtgtatctgctccttagagaataataatgtgatgtcatggtgtgagttctagtctgaacagccatatttctttatgctcacagttcaaaaatgtgaacactaccatcactccagcttcagacagaaaaaaattatgatccatgaacaggtacagtatttaggtcagcagccaatgatctccttgcgatcatcatcaccttatattaagctgtttcttctggttgagtcaacaaagctctgtgcttgaggagcatctcagtatgtaccatgaacacaaacatatgtgccctgtagtggtaaagtaaatgccactgtgacccattgctattacatatttatggattcctaattttcaactgtcttacaaatgagaaacgacatcaatttgcatttctttagaattctggtcttgctgccagtgaacactgacttttggcactcactgtaaaaatttttgtcaaaatgccatcaaaatatacacaaggctacattaaacacctaaatatttacacaataaagcatcataacaacaatgcatttgagactgcagaatctctctgaataattcaaaatatttgtacactgagataaaagggaagggacagtcatttggcactctgtaatgactcacagtccagacccacctgttttagaatcaaagacaggatttgcatgttttcatatgtctgatgactttatgcaaacactcttttatccagcaacccactagtgactttaatccttgtctttctttctttaatctgtgacctttgtctgtttgttttattttcaaagcactttcatatccaaagtagaatacttttaggaattattttattattcacttgctctagaacgctcggtatataacctccatggtgctaggaaggtataacaagaaaccttctgaagtttttatatcctgtaggtgatgagatgtgccatcagtatcatttaagtgaatcagtaactcccaaccaacattcctccctgatcccctgttatagagttgttatgattttaatatgaaatgtctcttataacctcatgtgtttaaccctttgtcctcagccggtggcactgtttaggaggtttgaaagtttcagaaggctaagccttggtggttcccttggggtagggtttgacagcttatagcccacctcacttcatgagtcttctctgcttactgactgagaggctggcttcctgctctgttgccaagtcttcaacatcatggtgggctgttatctcctcagggtttgtaagccaaaataaaccctgtagggacacacctgtagccagcccttaggaggcttggttacagtgtctccctacaaaaccccttttcactaaagttacattgtggccagatattcaatcacattaacagaaaaaattcaactgaggggctctacattttgtaacattttgtttataaacctcagttcatgttggtaaactccagttcatgcacagatttcttaccacttctggtcacattaatgttcttctgcctccttttgttatgccatagaagtttaaagtaggggatttttttctggtgtggagaatgactaagctttttattttgctaattcaaaatattaatttgtatgtaatatttgttctaagctttagtttgggtgtcacagacacacatatttgcaaaaatttttaaagtaaaaaaggaaagtgataagctttttccataacatctccccaaactcttatattgacactgaaacacctaaacaataaaccccataattaaagtagcccatatgggtccagcagtttctatggaaccatagacattccagccacacaactagatagcacataaagaggtaaaatgggtgagagaaagagagagacagagagacagagagacagagagacagagagacagagagagaaattccacttaagatgaggaaaacatcacagtggaagtagctgactcaggatttgatggatcaattaggcatccaccccagccctggaattccttttatctttctaatgaaaggacactcaggggtaagggaactcttccactcaatctagcagtatttggagctgaacatgatgagaatgtttgtgtagtcatagccaaaagacagtaggtacagttttaaagatgttcattttcttttgaaaatataaaaacctgttagcaatcagaggatattaagtcttaagactgtgaaatatgcctgggagatggctcagcctataaagtgcttagaaaatcagagtgacacataagtgtcaatcctagagacccaaataaatctggatggagtagcctatgtttataactctggggaacctgttgagatggaacacatattctggagaatccttagaagtgtcatggccagctaggctgaatcatacagcaataaacaacaaaagaccctgtattaaaagtagaaggtaaagattgatacttgagagagtcctctaatatctacaacattctatgacatgtattcactctatacccatgaacatgtagaaacacacacacacacacacacacacacacacacacacacacacacacacactcacacaaattatacaataattttagagtgtgtgtttgtactacaatcaagactgtttctgctggtcccaaatgactactgcaacccaaaatccataatttaaattatggaaaaccgaacatgtttcacttcgagtcaacatgtgataggtcacactgttttaccccaaacagtcaagaacaaagagaaagaacagatgttagtctaagtttgttccttactagacttccatattgaagatctgtgtgtgatgccagagcataattctatagttaaaagcactgaaacatattagctacagcaccttcccatgataattcttcaaagctgacatgcttctgaatgtccaaacatcaagataatgactaggatcaagtaaaatgtgtatgaggctacagatcgttttgttgtttgagatggttctgataaaaacaatccagaagatgccctagacatggcccagtgataaagagccattgctggtcttgaagaggactggtgtttagttccacacctacatctggcagctcactatttcctgtaactccagtttcaaaggatctggcaccttcttctcaatatgagcatgtgcacacaggtcacacacacaggtcacacacaagcacacacacacaacacacacacacacacacacacacacacacacacacacactttattttaaacacagaaaatactatattaatataattgctcggaacaggttttaaaaagttaaccagagtgagtagtaaatgtcagaaattatctcaattttcaatatctagttagagcaacattttaagttaatcttagcagaaaattcaagtgccataccacttcaccattggagcatactgtccagtgtcaaagagcctttccctatgcttccctgactttctccagagagtggatgaaatgctatggttttattgtcctcagagagctctttatagaacactcgcctaactacattccctaactgtctttgcaactatgtgctgatcctgtgattgtcctttagccaaagctggacttgtgtgctcctttactgtttctgactctgcagatccacttcttcccatttgctggtgtttctaagactttccctgcactgttctaaatgaaagcatctggagaagaaataaaaagattacagaaaaataggatgcaatgaataagacatgtcaccatgtctttgaaggctgtgaacaaacttatcacagaaccaaacagcatttaatcttgtgttgttttcctggtgtttgtttgtttgttttgtctctgtgtttaccttgtggattttgttttgtttttagtgctgggattaaacatagagacttagtcttgctaatcatatgctttatcacagagctacactgcatcctcttttgtagaactagtttttatgtgtgtgtatgtgtgtgcacatgttggggaagggtgcacatgaaggtgtgtgaacatagaggactcagatcaatgtaagatgtcttcctcatcattctctatcatattttttttgaggcaaggtctctcactatatgtaaagctcattaattcagaagattaggttgccagtgagctctagtctccaccatccacaactgccattacaggtgagtgcagcattgttcaagtttttaagttaggtacttgggatccaaagccaggttcttaatctgttctcaggggcacccctgtatccactgtcttctcagtgtcttttgtagattttaacaatcctggctgcaatgagtatccatctatgtagctactcactgagaaattctgaactccaagcagaaaccacaaaggatttttcaaaggctgtggtgcctacttgtattagcactaagggcacagaaatgcctctttaatgaaaatatgcacagaatttctcatctccagacgttctaaatgaagaaagcaagggatagccctttatgttcagaaaaaaatcatttggattttaaatgttgccaatacttcctgttgtcattttagtttaatttgaagtaattaacttagtattaaaatttcaatagaaatacataccccttctacttcagcagtatcccaataaccctaattcactaaaaattagcgctgtaatttatagaaacaccaagatgaatcacttttagatgtaattatcaccatttgctggaagttatgaggaaaatttgtgggaaacatttttctaaactgaaggaactaggagccacacacagactaatacactcatttctggctcaaccactgtaatgctttctcacttggtagttctctaatttgtgtaaatcatctatactgttttgctcaattttatcttgtttgtgtctttattgataaatgtattttgtgtgcatttcaaattttattccactccagcatcaaaggttttccttaagtaaattgatatcaaatcttgatttttatacaagtgtggtatctataggatagtatttatccatatttaaatacagaggtgcataaccagtttctgaataagatgtacaatatttgtgaatatttagttgtaaatccttttgagttaagttcccagactgataggtgggaaaccagcatgagactgctccagacctcctgaatgtggatgtcactgagaagatcttggaaatctaaggggccccttgtagtggatcagtacttatccctagcataggaatggactcttcgagcccattccacatggagggatactccctgatcctaggcacaagggggtgagcctaggccctatctcaaaggataccaggctctgaagaccccctaaggaaggcctcactctccttggggagcaaaaagggtatgagatatgtagggtgttagttgggggtggcaggggaggaggggagggagaggaacctggaattgacatgtaaaataaacttctttctaattaaaataaaaataaaattgacacattaaactttatcttagttttaaaaattcaagttacatatcaggtgtttaatttgggcttcacctgcacgcagcttagctatttcacctacctctgatttcatccctccactctcttagctgtctgtgcttggcctggtttctcttttaaatcaagattaaataaaatgtacttgaacttgtgcatgtcttaatgggagttttttttcctttcccttcaccataatttacaaacattcttacatataatcatcatttaaccactttgtccagaataaaaccttcagacatatgacttcgaattccattatcaattttgacttttactcgtattgctacaacattcagaagttacttatagtatatatttgcttaatattattatttttttcaccactcaccaatcaccagttctgtacagttattatgccatatggtatctggcatcagttttgacactgtatgagagttcaaagttgacattgctttgaaggcagacagtatctagtgttgatttgctatcaaaaacacaagaattatctgtaccccacttttctcatacatatgtaaaaactctgggcagatggatagttaaatgaatagttaactataatactgagtggaagacttcaatgaataaagtgtcaggactttgagtattatggtaacatagaccagatatctatttctatatatatagacaagataacatataatgttctcataaacataataaatccattgagggaataggggctgaggggttttagttactcaggcagtgagataaataacatgtgacagcctctcttttgtatagatttaatttttatgtatgtctacatgtgtctgccacatgagtgcaaatttctgcagagaccagaagaggatataggatcccctggagctggagttgcaggtgactgtgagcaatggggttctggaagagcaccatgagttcttaactgatgcaccatgtctccagccacaggcagcttcttttacattagcaacacactgagaaaatggaaacactattaatacattttcaatgtatttgcagacctagaggaaacatcaataaatgctctcatttatttttcaaaaaatctgcatttcacaaaatgattcttgaattttttaaaataaattacgacacatcatttttattatattccattaaactgttcttttttggatgaacttagatttttttgaagttaagggtcatcttaagggacatagacaaaacattttaatttgattattaaagtttctcatgtgaaggaaaccgtttcttaaaaatagaacctaattgatggtttgtaaccatttcatgggttagacattttcattctgtgacagagacgatataacaatgtatgttgaacaagaattcacttgtgaaaaacaataaaaagtgaataagaaacacattggcatcatggtaactgtctcacagtgaataatatttgaatatttatttttgtgtatgagaacaagccatagcatgtttgtggaggtcaaagaacatcttgcatgagtttcattgtagcttaattttttttcactgtggttgtgtattgtgaccaattaagagtgatcaaattaaagctaatacataattgtgtttgggtaagatggtgcacatactcatagttccgagacaatttctttcaagcatattatgtacatcagtcaatatcgcatgttatatactgtatttacagaatccatgtcacttacttggaccacttttaataattttctgtacttcattttcatttaaaaataagttatgggatttaaacagtaaaaaataagaggacattccagagctgaatagaagtaaaagtaggccaagattggcagccttccatctaaggttaggcattacagaagttatggtgcccactatgaaaatcatggtaaggagatgataacatacaagaatattttataaatatgaaagaatgtgaattataactgctagaccagatagagctgaactagagaagatctggagataatattttgagtaacaaatcagataaaataaatctaaaatatacttgtcagtgaaacctgcaactttgaaaacacctaaccatatgtaaaattacagaaattgaagccactgcaatagcatatctcattgagaaatactgaaaaatgactaagatttgggcagcaggatggcttataagacaaagctatctatctgcaagcctaattcccctaagtattatccacatggtagaaagcaagaattgacaggaagaacagttatgtcctaagctttatctaagtacacggcacatgaacatctccctccattgagcctccttctaaacaaatatttaactaaataactgaatataaaaattattttaaggagccaaaattaaatcagtaatctattcaccaagatgtccactctacttcattctcaatcttaatacaagtagttcaatattgtgtccctacttatccatctatgaaatagacaccagacatactgtgctttctatataaataattagggtaatatttgtaatgtgcttatcacagtatgccttgaaaccctcagggtgtcattgtcactgagagtcactggacactcagatcaatgtcactcactccaatcccttcttgcttctgtagttaacccagattttggacagcactgtcatgaaagggtgattccacaggatgtcagaatacatgcccagctctgaaacatccataatgttttgaaggactcacgaatgtgtcactttaacctgtattctactctacctggcaagtacaaagaattgtgctgtaagtatgcatctcatctttcccatatgcctcttcaaaaataatttcttggcctataaatattataaatatgagaataggaggactatctcattcaactttcttcctatgttcttgtctctggcaaaggattgctaattatccactaactttaaatttttctgtttgcctgagtagctaatgtccaccaaatattatctttcttttataaaccttatctgcagtaaagaaaacctatatgcatgccatggaccaaacattccacatgagagatggcgccacactgggccactgcacagagggcatgggtgagattcaggatgaagctgctctttcctgttggtgagcagaagcatgaagtctcagatgacttaatttctaaatcttcctgagtgaagcaaaacagctcccccaaggagctgcagagtagctctgatcaagaagtgtaatgtaatttacatgtcattagtgggtgctaaagagagagttttgtggggaagactgctggattctcttgaagaggatctaggtttgattcccaccatttacactgtggctcacaagtacctgctactccagttccactcaataataccctcttctgacctcctgtgggctactgcaggcctatggcacacatgaacttactcaagtgcacacacatacatatgaaaataaacaaataaagaaatacactttaaaaggtcattaggctgagatttatccagtgttccctcacctgcctggctataacatcttgacaaatgtccttcttttcttcaaagagtgacatttacaagggactgttataagtatcacagcaatgcacaaaaatcttctttcatgggagtattgctaaaccctgcaattatgtcactgttattaaaagaaaaacaaatgtttgatcttgtcaggaaatctgtcaaactgccttttctacatggaaggaaagaacatttattcttccagtatcatactgaaattttctacttaaagagcattgtgtcaaactttgaaaggtagcattgatcctaaaagataccctagagttgtgtttcagtaaattcaactggactgtagccacttcaggttcaagtatctctgagtgaattgtattgagtcgattttctttgccatgagtcacattaagtactgtcctcaagttgaatgagattagatcttaaacagtattctcagttactgatttaagtgagaaattaaggagaatggtgttcattttaatgaagaaaattttcttaagttgtcaaaacaacatgcctagtagaaaccggagctttctaaatatgtacaccattcccgcagaaatttcaggcacctgtttcatatgaacacattgtgaaatgaataaccaaacaagcacagctggggaagccaactagctttagcatctgagttactgtgtgtagatttcaaaagttcatcctggaagctgttatcagacaggttgtgtctttttgcagaaactcattcccttttgtttctgcttaacagtttctaaagaatgggagggagctaggattatgtcaaatacttctggacacaacaaaggaaatgaagactcgtgaatcctggcttctgtttcacagagtgagtgagacaggtagttaaatgctatagcttttacctgccatttataactgaagctagtagactattccctaagcctaaacccttcaaacctcagcttgataaagagtgggatgctgacagcttcctggatgatttaagaaatggcaaaatacctcaaaatgaataaatgctacttactgtctgcttaagaaaacaaacaaaacatagaatgggcataaaatgctaacattgcatgaaaacatgtgtttcaattgttttcctgacaccaaacaggaaatcataactgtggtgtcaaatatgccttgtaggagtaagtctgcttccctgctttgttctgttactctgttaatgcaggaattaagttaacctgggccactgtctcctgggctaagatgatatgtgtctgggccctacacctttgtttataagctaggaactgaagacctccctgaataacaggaatggttgcatcttcctatagctctgagttctgcttcattgctttctgatgcaaatgaactggtatttcttttagctctatggaatgcagttaaacaccacctgcatccttctgatggcaaatgtgagtcttttaatcattgttcaaaattctttctttctttaaagattatttcacaaaaaaacatctgttccatacatcacatctgctagcatcttccacttccttacactgattcagctgaatgaataagcatttctaatcctcagaatacacagacaagcaggccaaatgggccagtggttaaaggtatttgctatacaagccttgtgatcagagtttgaccttggaacgtacaaaaatggatgaagagatgctgctccatgaagttgttctcttatctacacaggcatgccatgggccatacaccccacacacatcatatatacatataaacaattataataaaaaattcaatagctacatgaattcagtaagtatgatcctgttcgtgtataatgtggctcacaatgatcctccctggagatcaaatgctaagttcaatcattttagccacattggaattaaacactaattaggaaaagtcaaagacaagcattcaaatactgtttatacattttgaatcctaaaaaaatttccttaatcatatactatcacagttgtgaatgcaagcatatattacctcatatgattatcctaaatgtggacagtaaatacttcaaatacaaatactgcaatttctttgttaagaaataaactatgtgaatgataacaattatagtttttgttgctctgaggagaaaatcattaggaaaactagtgggtttatttttctgttcatttcagcttgttataaattagatgtgggatacctgcaagagttgtggtttgctctgctgcattcatggggaggttatgttttttcacagactcagaaagactaagctaaggggagaggaaggttgtcttgctcaaatcagtcttcataacttttgttctctatcctttctgaaattgctcagcaataatgttttaactcttagcctctcctgacaaaacatggtagtcattaactaccctctgagaacaagacaactccctactatcttctccatccaaaggaatctcaacatcttaggtaattagcatcaagtcagggaacactatgatcccatgattctttctttcaacctttactcttaaggatcagatgtagcttggagtttttatgggactcctaactgtgggcatgggggcatttctgactcttttggctgctcttgggataatcttcatcctactggattgtctcgttgagtcttgagatgagggattgtacttagtcttattataaatttttatgttgtgtttggttaatgtttatgggaggcctgcccttttctgaagagaaacagagcagtagtggatctgggggagaggtgaagttgtgtgagtaggggtggaactaagaggatttcagggaggagaaactgtgatcagctgagatgtaatgtttgaaagaagaagaaatttaaaaagaaaaaacaggaatgaaaataatctaattcctcatacttgagtggatatatccactttctgtcatattaacttggagtcccacccctcatcacacaatgtcatacattctgctcccctccacaagcttctatggtaggacactttcactttagccacctgattctgacaaaggcctttgagttaaccatgagacagtttcttgctctctctatcctttctgtactgtctacattctttctatcactatatcctgtcatgtctataatctgtcttcatgtcactgagatttttatggctgcttgtagagacaatctcttgtatatatgctaaaattatttttcttgtttctttaaaaaaattcacagttctatttatgcccccaaatacaagagcatacacatatgtaaaaaaaatggtaaaaactcaaatcatatgtgaaacctcacacactaataattggagacttaaacaccctactcataccaatggacaggtctgctggacagaaacttaacagagaaataagggaagtaatagacattatgactcaaatatatttaacagacatctatagaacaatccatccaaacacaaaacaatgcaccttcttctcagcacctcatggaaccttctctgaaattgaacacatacttggtcacaaagcaaatctcaacacataaaaagattggaataacccactgtatcttatcagatcaccatggcttgatgttagaattcaccaacaacacatattacaggaagcctacaaactcatggaaactgaacagtgttcaaatgaatcaccactgggtcaaggaagaaaaaaagaaataaattaaagacttcctagaattcaatgaaaatgaatgcacaacatacccaaacttatggaacactatgaaggcagtgctaagaggaaagttcattgcattaagtgtctacatgaagaatttggagaaacttcagtctagaaaattaatagtacacatgaaagctctctttcaaagaaccaaactcacccaggaggagtagaaggcaggctataaacaaactgagggctgaaatcaataaaatagaaacaaagaatcaatgaaacaaagtttgttagagaaaatcaacaaatagacaaactcatatcaaaattaaacaaaacgcagaaagatagtttcaaatcaacaaaataagaaaggaagaaggaacacaacaacagacactgaggaaatctaaagaataattaagtcatacttcaaaaacttgtactgaacaaactttgaaactctaaaaaaaataaacaattttctgggtaggtaccacataccaaagttaaatcaagaccagatttaaatagacctataacctgcaatggacatcgaagcagtcattaaaattctacctgaatttcaaagaagagctaataccaataatccctaaattgttccacacaataggccacagaaaagacattaccaaactctttctatgaggctatagttactctgataccaaaaccatccaaagatgcagcaaagaaatagaattacatatcaatctccctcatgatcattaatgcaaaaaattttcaataaaatatctggaaaccaaaaccagaaacacatcaaaaattatccaatatgatcaagtaggcttcatcccagagatgtacagatggatcaacatatgaaaatctgtcaacataatttgccatataaacaaactgcaaaaagaaacagctaatcatcttattagatactgaaaaagcctttgacaaaatccaaaggatatgatagactttgaagaacccctaaggaaggcctcaccctccctggggagcaaatagagtatggaataggtagggtattagttgggggagcagtggaggaggggagggagagtgacctgggattaacatgtaaaataacatttattctaattaaaataaaaaacatctaaaaataaattgggaatcaatctacctctagacccagccatcccactcttgggaataaacccaaaggatgctcagtcataccatatggatacttgctcaactatgtccctagcagcattatgtgtaatagccagaatctggaaacaacctagatgcccctcaaatgaagagtggataaagaaatcgtggtacatttacataatagagtattactcatctgtaaaaaacaatggcatcttgaaattttcaggcaaatggatggaactagaaaaaatcatcctgagtgaggtaacccaaacacagaaagacaaacacagtatgtactcactcataagtggatattagatataaagcaatagataacccaggctatgatctacaaccccagagaagctaggtaacaaggaagaccttaagagatacaaatggatgctctgggaagagaagatctcctgggtaaaatgaggatggaagagtagaggggaggtgattggggatgggaacatgaggtattgagacggccgagttgcccggagagacagagagggagaacaataaaccatgtattttgacatagggggtcattatggcgttatggagaaacctaatgttagggaaattcccatgaatccacaaggatcacccaggtaagactcctagtaatagtggagatggtccctgaactagccttctcctgtaatcagattagtgactagccttattgtcatcatagagccatcatgcagtagctgatgtaagcagatgcagagatctgcagccaagcactgggttgagcttcaggagtccatttgaagagagggtggcaggattatatgagcaaggggagggtcaagatcatgatgtggaaacccacagagatagctaacctcctagtgggagttaatggactctagattactaggaagcctgcatgggaactaactaggctctctgaatgtggacagcagttgtatagcttgatctgtttgagaggtccctggcagtggaaccaggatccatgcctggtacatgagcttgcattttggaacctactctttatggtgggatgactcactaaaccttgatgcaagaggggaggatcttggtcctgccgaaatatgatatgctagactttgttgactcccacgagaggtgttaccctttctgaggagtagatggggtgggggtagaaaggaggtgggggagggaatgtgaggagaggagggaggggaaactggatggtatgtaaaataaattttaaaaattaattaaaatatgccgagttctagttcattctcctaccctgttactaatttctgcatccaggaagataaaaatagagataccttacaccctatatttattcactttcttaatttatatcttaatttatataatttatatttcctgttccaaatttgcctaatatcttacttctgtgatattgaaagaagctaaacacagattctttctttcattgctcttttcctttgccctgttccttagttcccacatcatatctcctaactcacatttcttttcttctcctctctcacggtggaatttgctctggactccctctgacatcagtgcccagttcctcttcattcccctgtgctttgctcagcagccccctacagcctatttcccactatataacaatggaggttctatgtgaacctacatagtgcatgtccctttgttgttgttaaattctcaaaatccttaatcttattcaaaccccaaaattgtttagatcatctacaaggcactaaatggtttgcttcttcctccctattttatcctatccctcagccaagttgtgcctttaaatgctgtctactgcccgtgcccagctgctcatctgacagtacccctgaattaaaatgaggtccctggctagtgacacaatcctcactgggattatgattctgaatgcaaacatctaggcccttgtatctaaaacaatacagatttttaaaatatcaccagacaatttacatacacattagattttgcaaaaaaaaaaaatgtgtgtattaccagaatgagaaaaaacattataaagtttaattcctcctcttgaaactccactacttatttgttagaaatcataccttagaaaatttctttgaaacatatatacttgttttggatattaaataagcattttgacagttttataatctctggtatccaagtcaagaacctgggagctatctctttcacaagcaaatgtcaaggaagatagcacacccatctctagttccttttggagagtaacatcctgatttccttgggttcctttctccaaattggagaattatattctatcataaagagaagtttgtttttgccatagatcaaggcaactatcaagcacaaatagtcaacccaattaccaaataagttagcatgaattgtgcattacatagggtactgtcctcttacctgaggacctgttattgttcatcttgatgtgtgatagaatgagcacatcttgcctggaagaaaaagcaagactgctgctgtctttgccagtctttaaactctgtttcacattccatttcagtgcttagttggtaatagaagtgttttcttctcctagtaccttcgcagagaggaatttcgggtttggggatcttatttttaagcttatttcctcagcagttaggatttctaccctagatgcaagcttcatttgatggacaaaagtctaaagtttgtctcatttccacatcaccttgagccaggttgtggttgagcagacatgcctccaccctctcctccactctcaacctgaaccacagcaacaatctctgttcttatgatcaccaagggcaataattcactagaaaatatgtagagtagtaaacagttgaagtgtgtttcagcagcttggtattttagcagcagtgaagtatgacctccatggtggaggcaagacagggccgagcagcaatggcaaaaggcttcctcaagttactggatgtagaggtcatgatctaccatttctcttgcccttggccatctgggagagatttgagatagtgcctttccttgaagaagtggaggctttcttagaggccatgtttacccacatttcgagatgctttaaactcatgaatacacacaagcacgttattattcattgagacattcactaggggaaaagctaacacagttctgacttggtggttcagtaggagtttgcatgagctaagcagagcttgccaagactggcttttttgttttcccagggtctgatagtttttatctagtcagcatggatagtttatatcccactgcatgccctctgtgtaaatgacatagacaacaaccttgctgctttaaccctagtattctttttaagcctagcattcatgttaaccctggcatgtgtgtgaacataatagtcacaatttcccctattaattttctaagcatttcaaacacattgtatggaggacaccttgaattatcactatcaatggtttcttctttactgtttcattcttttaagttttccaactagtatctgggcttctgaaaatctgaaataatactgaagtactttattttataatgatggcatgaacaatctttctgcattttgtccccgtcactacagatgccagcacctggaaatgctgctcatattcctatgtgtgcatgaggataaattagagtgagctgtcattcatagaatgtgttaatggtcctaatcagatgcttaaaaatatttagtttctcatatcaaaaaataaaaccatcaaaccaattaacctagatggcatgttccagtgattttaatgactgtcactatttaaattattactgcacagtaaaatactagaaataaattaagcttctttcttgttctcctttcaaatttctgttcataattcttgctttgtctcctgtcccactccagatttctacctcaagctgacttgattgctctgatgacctcaatcaaaaggcaattaccttgtgagggtggaaggtaattattcctatctcgtggagattgaacactcctcaatagacagctgccgctcttttttcaggatgacattattgccacagaattggactctgaaaatttctgatgcatgtaaaaatctacgatacgttgttgatttattttcgcgatttctatggcagctattcttctccctgctacaagccatgtttctaaaagacaacatgaattagactgtgcgtagcctttggagaaacttgaaggttgactcaggttttaaattcaagctcacaaagcactcagtactatgagatgatttttaccagactacaaaaatcttacagaaacgactcgaaaatgtgtaactataaaactcataaaattcagacacatgaaatgcactaaatagttggaaaacaccaaaaatggggaaaagtaagtcataaaattgccaattattttctcattttaagacagctatgtaccataaagcacactatttgtcaatctgaatagactagaattgggtgtgtccacatgacactgatgtgacagacgcacagtcattcctggattttatgtgagtgctaggaatttgggctggaatgaaaaatgccatctatcacctcagacatttagcctctttatttccagttgatcctgctgtttggggagatttgggaggtatgtccctgccgggcataatatgtcacttgatgtgggttttcaagcttgtggttggaggtgtgagttcttagcttcatccagttccactgcttgctgtaaggtctctccaccacaaaaataataataataataataataataataataataataataataaagaactaagagtggtggagagtaaatgtttctattacaacaaaagggacgaaagagccccctttcttcctgccccatcccttgtgtagtctctccaaggtaaagttaggaacttggacattgaattaatctcaaaattattcactactaaaatgatttgttagttacttacctcaatgtcctacaagtccagaatggaatttgagatatctttttcgcctctgtgtcaacagacactcacatagtgcctagcatgtaatcgaaattctatacgtatttacttgtagaaaatatcaactaatagtatggatttggatgcttccctaattacaaaaggcagttcattctatgtaactctgagtacttttctgacgagaagatagttttaactgccaggttgcggggggatggggggggcgatgagtgcagaataaaacagcatgggagctattgttaatatggaactgccttgtattaagctaaaatttgcaaaactcaccgggcttatattaatgctaaataaatggttactaactacactgtgacagtggctgacacacctatttatgcaaagcatttgttcatattttctggcttacttttctcacattactatccattgctgggatttctttctttcataggggaccagatgattggtgtccaagattcatcaaagaaacaaatctgaatcaaactgagtcagtctatggagcctcatagcaagactttatatttgagagagggctgtgctaaatcaacctgaatggtcttctaacacgatgtatgtctgtttctcccagcctcagatttatccagagtgtggctcttactttgtcttattttaattatctgtctcccttgccagcctgcctcgtaaaagctcagctcctcattatcacacatccgggaaaatcagcatgttttgttgtacagtggatgttgtacattgactgaattaataaaggcaatagtgaggtacttatgtaagtaatttatttgtatattaaataaggagcatgtatgcaattacttaattgtaaaaggaactatcactatgcgaaaactcaagaacaaaaattgttggtaattagaaatttcctagaaactgactacttcctgcagactccacccgatactactattgaatccatcctactgtaagtaaaaatactgcatttaaatggagcatgatgcatatcactcattagctacagtccatatagctttagcttagtatcatcactgatttccttgctgtggggctttgtatttaacacttcccacccctaataagctaaaaacaaccaattagcctttcttgtcacagcatggttccagcatccatccagagttgtgagagggtaaaagcagaagccaccatttagcccagatataaagaataggaccatgtacaacacacaattttaaaagctttgaaataaaccttcaacttctggaggaattatatgtatttcattgtccctcatcctaccaacaaacattctctaggctctacaaaattaaagagctcaccctaacaattagcaggagctgtctgtaactctagaccctccagcccatgtccacaacggtttgaagagcatccctcggttgctactgtgggccccatcagttgagtgccctctaaagagaaatgatagtagagtaagaatggctcttattttctatttatttggtcagggtttaggcaaatgttcacatgtcatagctaagatgacagagcattaaaacagtgaactgtcagagttggcgaggtggcaagcccttatttctctgtggatgatatgtgaagcttgaacttttgtacaatacccataggtcaatttggactcatcaacatgcttgtgagttatgatgtttgatagtggctttgtttgcagggaacatagagacaatttacattgtgtcctgatctgatttaccaggcatttcagaaaaaaaaaaaattactgcctatggggaatggaattttgagtggggtttactgaccagaccttttccattttatcagtgaactacaaaaggaaaagtcctgagcatattgttttcttgacaattaaactggattgtggaataaagccttggggctagccccagtaatcagaagaccatctccataacaaaataacctaatatagaatttaattttggcctttgataaatagtccaatcccatgctatccacatgaaaaaatcaggagtgagaaccagagacatgtggatgtaaacataataggaaagcgttggtgtttgaagaaagcatctgattgccagaaaaggtcttgcacttgacctgaaaacttcaggcctgtgtcctgcagctgtggtaatatgatgaagtctttttgatttgtgtaataaggtttatatatcaggggatagtgttagggggaaaatctaaaaactcctttgctggaaacttttttatcctgtaaagaactaagcatgtgcaaatgataatttccacttgtctctgataatattgcagtatcggtttcaatgaatttcattacatagcagaactggggagggtttaacacaactcctgtgtgtaggcttctaaagacttcctgtcagtttgattttattgtctttttttttttttgccttcagacatagttccaaaacactccacaacacaaaaaacaattgtgattcatacaatttcttttccatttaaaataaaactccacagattttcttttttgcaaagttgtttacaaaggaatgtgaaaaaaaactaaccttactgtccagaaactggagatgatttatttttttgtaatatggcgattccagtagaattctgtcagcccactctgatattctccttgaaatcatatagaaatcacaaatgtaatcttggattaacctttacaatattggcttttcaagcagtgttgcaagcagcaagtatacaggggcagaatacaagctactttgaaactttgtctggtttaatctttaaattacctctgtaactagggctgtgtttttcataaatccaaagaaaagttgttcaagtcagcatggtgtagcagtttaaaagatatcacagttgaagcataaaagttttctgtattcaaactttttcagctgggctcagtggcacctacttatgatctcaaaactcaggcagcagagacagagatggtcataagttcaaggtcagcatggtccacaagtgggaacccctatctcaaaaaacttcaagcatagaatgtaactcattggtagaatgcttgtctagcatatgcagacaaaaccttggatttgagctcaaggaaaaacaaagcatttggttgcacacatctgaggctcccaaggtatcaaaataagaacttaatatgtattgaatctaataatatctaattaccattatattcaaaaacatgaaccagatgtgcttgctggagattaaaagtaatgggaattttgcaagaaccacaatgtgatgaatgtgtaaaagaatagaaacaaatcactgctgtcttcaaaatatttgccacagaatatatattaaattctctaaccttgtcttctactatataaaaatacactataatgtaaatggtgggggaaactcacacattgaaaatgataatggccatgatgatatttttataaatgaagtcactctgaatcttcaatacaatgcatttctggggacatggagactgcatgtgtggagggcagtgctggagaccataagaagaaaaacaagttcactcatgccacattttaatacttagcaatttctttctataataaatcttatctaataaaaacaaggttttgtatttgtttgctttcataccataattgtttattgattctttgggaatttcacatcatgcaccctaattctgctcatctcccagtcttcctatatcctctcctcaccactgcagcactccaacagaaaatcaaaccaaaagatagcatatcaagcaaacaaataaccgtaagaataaaacaaaacaacagcaacaaaaaccacccccaaaaaaatccctcttcactgtagaggagacttttctccatgtagccctatcccacttggaccagtttctctctgccaactgagtcccaacagctgcttataggataaccactcagagacttaatatatatttataattgattggccaatgactcacgcttattactggctagctctctcttataaattaacccatttctactaatctgtgtatccctatgtggctgtggcttactggtgatgccctggtatttgcctcccctggggctacatggcatctctctgactctgtcttccttctctctttgcatctttgtttggaattcttgcctagctttactctgcttagccattggccaaaacaggtttattcatcaaccaataaaggcaatatatatttgcaccatacagaaggattttgcatatcactttgctttctcattttttcccacctttccaacaactgtttatccatcctggtggtattaggagctgtataccgttttgcccaataggctttactagcaaatgttcacagcaagaaggcattggtatggttctagtcctcttgtttctggcacaccatcatccctggatactcacagagactcctctgggatatctgacagtcaccctaagtcatggagatattgtctgtatctttccacaagacaagttccttcaagaggctccagcaggtagtagatgatgtagatgttagggtgggccaagcctaggccagttgtgtgcctgggtggtaaatgaactggtcatcccaagtcactgggacaacctgcctcacggggtcagagccagcttccctaagcctatgacatcatagtcagtttacccttgcttatggcgaggagtgaggtcatctctccgcagtacatgggtcaggtttccagtgagtgagggttggaatcagctctcttgctgcagtgaccagcaagaggcagggccagcattcccagagccagcaaggtactggattggctcaatatggccctctgattctgtcacacttgattccttttgccccctgaggtggcacagactaaagatgtcaacatagtcccctgctgcagctgagccatggacccagacagggccctttgcagcatctcagacctacacaacatcctggctctgcttggaagcactggccactcagatcaggataactccagtagcagcataacccccaataccagcaaggccacagctgttgccccaacatgcaacttcagtgtgacctttggtggcaacacaggtctccataatcaatttatttaataataattcaaaatttgtctactaaaccaaatccttttaaaataagtttagaaagataatccattaatacttagcttgttgatataaaagtttttttttcaatgtttattttttcatgttagtgtgtgcttgcatgtgttagttcatatgcctggagatgcccatggaggcaaaaagagggcatcagactcctacccacaaccctgtgatggagttaccagctgttgtgagctgcccaatgtgggtgctgggaactgaatagagttctctgcaagagcagtatgtgttcttaaccactgagccatcttgtcagcctgagctaaagaactttaaagtaagcacacatttgttgttagactctggtgtgtttgggtacacgcacgtgcgcacgtgtgtgtgtgtgtgtgtgtgtgtgtgtgtgtgtgtttgtgtgcatgcacgtgtgtgtatgcatgtatgtgcgcatgtgcacaagcatgcatgtcaaaataaatcagtataacctatgtagggcttgagatttcttgattttaatgaacttaagtttttgaaagaaaaaattgaccaaattgagaccagaaataaatgtgtttttccactttagggaatttattcaactcctgagaattgcctactaaagaccacacctcagctgcccttaccattccagatggttccaacactggatggctttctacaaggggaagagctgccctgatgattattctccactatgctaggttctggtattcacaggtatcaaagcaagtctttacctaggctttgttatagtaactcacaagaagaagtattttgagagttatcgttttggcttgtcatttcatctgagctttcttaattaacaatggttatttatagaatagaatcaaagactctggcaatcctgtatctgcctcccttcctcattagatgaattgaatgttcttgctctgactgtttctttctttgcttcctgtcctcgcctctgtcattcactccagacgcaaaggcttccttccctgatctcaaaaaaagcaagagtattgtttgctggcagtttgggacttgccctcctatgatttaacacatcctccagacatcccaaacttgggacctccccacactgcctgtctttgctcaagtgacacctcaatagagaaagcctctcagacttgcctcccacatggctcctctcttcatcctactgtgctctgtctgcatagacttcatcaactccataaccttgggtattcacttggtccttgttgtatttgtagtatagttcaacatcctgtttgcacttttttgagtttcaatatttataatagtttatggtcctcagtagatatatagtcaatataagtgtgtgtacataagaacacacaataaaaacctttctaaattttaaattcagtatattcactctgagataccaatactgcaagctaagtgctttcttgttccccaagttttaattcagttgggctaacacattataagatatagctggatagaaagacaatacatagagcttccacgtccattgtggttagcagggatgaggctttcttttcaaacatcagctaattaacactggcatacagaggatcactaaagcttttctactgtgtctatttgttgagtaaacagaagatccagtcatttgtattaaatctgtctcctagccacaatgcctggttctgccataagtagatttgtgagagatgtgttgacatttaatttatgcatcaacaagaatcaatttattttaggcaggaaacattgggtttggcagaatacttgagattataaatgcaaggctttttttccagatggagaaatttcttgctgtgttacttttaccaacataaaaatgtttttatatggaaagtatggatacatagttttattaatacaataaagatttgtgaagaaaaatggttttcagaatcgctaatattttgtgctgtgcagtgccttcatagtaacttttcagattactagtgtgcctgtttgtgccccttgctcctaggttgctttgtgtgtggctgtatatcaactacaggattctttgttccccgctacagatgatcttctaaccatctcctacatggagcccgagtgatttgcctgcagaaggtaaggagcagcatatgcaccggggactctgagttctcaattaaaaaacagtgaaataaaaagtctacaagttgcaagaagacaagactggatcaggagtctcagaattcatctgcttctgtaacacacaaaaaaagccacaccatcaagtgtacctacagacatttttttttttttttttttttttttggtttttcaagacagggtttctctgtatagctttggagcctatcctggcacttactctggagaccaggctggcctcaaactcacagagatccacctgcctctgcctcccaagtgctgggatgaaagccatgtgccaccaatgcccggctacatacagactttctttagataataacactattgaattgactatattttctttacactgatagcatattgataattcaaatttaaaagaagtgatctgtatttagaaaaaagacaaccaaatcaggtctaatccacaagttaaagcaaccaatgttgttattcaataaggagaaaacattttcattagagaatgtggagtattaatgtcaaggagatagaggaactatgggaaaagaacctgagtacttgtataaggattcctcatggctaaattattcctatggaaaatttgaccaaaaggccatccaattcactggattcttatgaatatcagagcattagctatgaagaatgcagaagtgcagtccatacacagtgatgacatctgtgaggatgataggatggtgaggaccatgtttatagagatatggataaagatggtcacagttgctaagcattactaagtactatcactgcttaatcagctttctgtgactgggggtacctgtcagagcacatgcatgtgaaggctggttgtcaacctcaggcaccagtcctcagtaagcaaagaccttggatttagagataagtctttccctgggttggaagctcacttacatatttggcttaagctggctgtctagtgaggcccagggaatctactgcctctgtctctgcctctgcctctgcctctgcctctgcctctgcccctctctatctgcctctctgcctctctctgcctctctnnnnnnnnnnnnnnnnnnnnnnnnnnnnnnnnnnnnnnnnnnnnnnnnnnnnnnnnnnnttctctccccccctgcctctccctctccctctccctctgcctctctgtctcactgcctctctgcctctctctgcctctctctgcctcactgcctctctctgcctctctgcctctctgcctctctctgcctctctctgcctctctctgtctctctgtctctctgcctgtgcctctgcctctctacctctctgcctctctgcctctctgcctctctctgcctctctctgcctctctctgtctctctgtctctctgcctgtgcctctgcctctctacctctctgcctctctgcctctctgcctctctctgcctctctctgcctctctctgtctctctgtctctctgcctgtgcctctgcctctctacctctctgcctctctgcctctctgcctctctctgcctctctctgcctctctctgtctctctgtctctctgcctgtgcctctgcctctctacctctctgcctctctgcctctctgcctctctctgcctctctctgcctctctctgtctctctgtctctctgcctgtgcctctgcctctctacctctctgcctctctgcctctctgcctctctctgcctctctctgcctctctctgtctctctgtctctctgcctgtgcctctgcctctctacctctctgcctctctgcctctctgcctctctctgcctctctctgcctctctctgtctctctgtctctctgcctgtgcctctgcctctctacctctctgcctctctgcctctctgcctctctctgcctctctctgcctctctctgtctctctgtctctctgcctgtgcctctgcctctctacctctctgcctctctgcctctctgcctctctctgcctctctctgcctctctctgtctctctgtctctctgcctgtgcctctgcctctctacctctctgcctctctgcctctctgcctctctctgcctctctctgcctctctctgtctctctgtctctctgcctgtgcctctgcctctctacctctctgcctctctgcctctctgcctctctctgcctctctctgcctctctctgtctctctgtctctctgcctgtgcctctgcctctctacctctctgcctctctgcctctctgcctctctctgcctctctctgcctctctctgtctctctgtctctctgcctgtgcctctgcctctctacctctctgcctctctgcctctctgcctctctctgcctctctctgcctctctctgtctctctgtctctctgcctgtgcctctgcctctctacctctctgcctctctgcctctctgcctctctctgcctctctctgcctctctctgtctctctgtctctctgcctgtgcctctgcctctctacctctctgcctctctgcctctctgcctctctctgcctctctctgcctctctctgtctctctgtctctctgcctgtgcctctgcctctctacctctctgcctctctgcctctctgcctctctctgcctctctctgcctctctctgtctctctgtctctctgcctgtgcctctgcctctctacctctctgcctctctgcctctctgcctctctctgcctctctctgcctctctctgtctctctgtctctctgcctgtgcctctgcctctctacctctctgcctctctgcctctctgcctctctctgcctctctctgcctctctctgtctctctgtctctctgcctgtgcctctgcctctctacctctctgcctctctgcctctctgcctctctctgcctctctctgcctctctctgtctctctgtctctctgcctgtgcctctgcctctctacctctctgcctctctgcctctctgcctctctctgcctctctctgcctctctctgtctctctgtctctctgcctgtgcctctgcctctctacctctctgcctctctgcctctctgcctctctgcctctctgcctctatctgcctctctgcctctctctgcctctctgcctctctctgctctctgcctctctgcctctctgcctccctgcctccctgcctccctgcctccctgcctccctgcctccctgcctctctccctccctcccagttttgctttgagacaaggtatatcccagggtggcctcaaacttgccccgtagccaatcctccagcctcacccgagcgagtgctgggattataggtgtatgctgttcttattccatggaaattgctgtttgggagcattgggattcaggttttcagcatttgggattatatacttcagatattctgagttttggggggtgaggggaatcttgttctttcaagcttttgactttagagctggtattgatctgtgaggtcatgtgtttggaggtggcggcgattgattctgaagtcagggcaggatggcttacaagcggttgacttgttgggggcagtttggatgttctcacccttgggtgaagttggtggtgcctccccactgctgggtttacatacacatgccaccatggtgtctagtgggtgtggatcaaatgcctttatacctgtgggacccaggtgtctccctagcctcctaaccaggctgcttctcctccccctcccccttctttttcaagacaggttttctctgtgtaacagtcctggaactcactctgaagaccaaactggccttgaactcacagagatctgcctgcctctgcctcccaagtaatggcttcataactagatattacagttttctcaaacaaaataattgagaattctgctatagtcacatagtagctagaaatacacaattaagtactaaacagcatagtgtgagctatgtactcatcttggtttactgcagcctccccttacatttataataaaaaattccacaaagtctcagtgatcctctctctttttcttctcaagaaggtaaaaatgtcttccctttaaataagacccatataagatgtcatatattgaagatattttaataaagcataatttgagataatttcaaataatgatacttaaaagctccatttctgaaataatttgtttttactgaggcatcttcttcatgtagtaaaaataattcagagtaatgcattcaccctggctcagaggtcacgggttagagtctgcaggtgggtgacacatgtctattccaacctcctcaatagggaccaggcatcgttttcatcccatagtgttatctgggtctgaagtctattttactgatgagccctatggaagatgtgatacccacatcccatgggtttccaaaggcattcttttgctcagtttaataacttttaattttctatatataatctttgtctcatgacccagagccttccaagtcaaggcaatgttcttattccttgaactctaagctgtagaatggtaacaacttgaaatagaatgcttcaaaagaaagggacttctgcgatcttagttcatttccaagcaacacacaggtaaactaggtaaaaactgcaggtcttcctacatcatttttatacttttgatttcatctttgccttttccaatcaataactacatttatataatgtggatatctcaatccttagagggatttatgttatacaggtcgaacttactgtaaatttagcatttattatttcataaactaagctgattattttgagacattgtttggagagtataattgaaaaatatattaagagaacctaatggcaacttttttgttcataaaaagtaagagaatgttagtaaccacttggctcagtatctagaactaaagccaggcaatgtgtgtgcttttattgttctcttctgtggtttggaaatgtctaagattagattggtaaaggagagtgcataaaattgctgattcatagctttgctaataataaacagtgatgaggaactataaatgactattagtgaacagtgtgagcagtagctgtaatgaacacagaggggtgcatttctaaaatagcatgtgccatatgtacatgcaaaataattgtgcaatgaatgcacgcatcactcatgcagtgttttgcaaatcagcaaacatcctgaagttccttctaatgggaagtttgctgattggggctcagggaaaatcaagcatgatttgggtagtgctatctgggaagctcacagctgtttcatttcattctgatttcatattagtctctttctcccaaacactggttttggaactctttccttcagtcattaggaaaaaaagctttcaaagaaaacccactgcccctgatcttctggagaaaccaggtaggtagccacactttcatgaaaactttagaccatttttctccttcatcttaattctaggggttgttaagaggttttgctttaaccatggacactagtggaagcactgttgacactgttccttgagagaaatgtaacaaggcttcatgttttgtgattgatcatgaagtgtgactccttcacactctacctttgaaacacaaaaatacaagcaagcctgaacttactttgttctataatgaatcacactgaacactagtgcaaagacatctgccaccttctttgtaattatctgcctataaatgttttctcctactatgccttgaatgaggatataacattattaatcatcacattcctggcactaggtactgaatgcttggtgagagaatgagatagcctgtcatgaaaattgcctgaaaagtttattatgagaataacataatctgacagacaaaaacacaaagcataaatccggaaaatagtaaaattccaagacacaatggttgagtgtgctccctcatgacggtttatttcttggcttttccatatgacatcctttcattctgctaagtagccacactattccaacaaatcagttctgttcctgaatcagtgcttatatcattctgttgacatattaagtaccacagtaggctcactcctctgtatcctgtcagaagccttttccatcttcaccatgctgcttctgtgtatagccattcaccaattcctgttaactcttgatgtactttgtccttttataaacgccaacaagatggagctgcagtaggggatgcttctgatctgagctgtgacattttgcaagagtacctcaaaacattcggagattagtaacagtccttgagaattaaaagaacactataaatataaattaaaatatttcaatgaatgattactgaataattattctagttaagaaacaatatttcactactattataattaaaagcaatttaaagaaaatcttttagaggtacaccattaaaagctacaaaagattttactaagagaagagctgactggagatttattgtaaacatagttaccagaatatgtgctttaaaatgatccaaacaatgcatgggtatgctcagaaaattcaaatgaagtctgtatgctgtattcagtcatccaattcttttacataaaatgatgcagtatgtactcatctatgctctaaagggaagaggccctgattcgaatttcatttcatagcctatacaaacattcaaaaaatagaaactattttttagaaggttaaatttgaagaagaacaaatctgcatacacatctaatttgaaagtaatgtttgtatagataatctaagaagcttacaaaatgtctagggtatcaaagcttatttcacctacataactgacaaaaatttcctttaaaccagtctttaaagtatgtatttgttaagtaatggacatttcttttaagagatcaatatttttggaaggcctccattaacaattaattaaaaagtacacatcacacctcacatacacatattatacatttatctatacatattactgaaaagatttttatttttagccggcaattgtatttcatctatagatgatatgtcaagtgaacataaaatatttttacatgttttataggccttcaaaatgtgatatactgtgtgaaatatatcaatatatttaagttattgatcgtaaaaggtttcatacacccatgaagtgatcttttctcgcacaaccactttcctttttttatttgagttacaaacacgaatgacaatcccagttcccttctctctcccctcctcccctaccatgcccctcaactaaaaccctacctatcgcatatcctttcttctattccataccccacacaaactttctcctccctcttgacctctgcatccttcctcttcttcccttctcattctcgtagctccctctgccctcttcccatgctctcaatttgctcaagggatcgtgtccctttcccttctccaggggacaaaaatttgtctcttttagggtctccttgtttactagtttctatggcagtgtggattgtaggctagtaatcctttactctttgtctaaaatccacatatgagtgagtacatatcatgtttgtctttttgtgattgggttacctccctcagaatggtttctttgagttccattcattttcttgcaaatttcaagattccattgtttttttctgctgagtagtattccattgtgtaaaatgtgtaccacattttctctccattctttgagcacaaccacttttcaagacaagattttttattgacttattatttgtgtgcatctctatatagatatgtgcagtgaatgcagtgtcctccatgactaaagaaaggagtcagatatatttgccaggagaaagaaaattaaagcatactgttctcacattcttgggaaacattatcatcatctgccctcaactggaaacatccatgatgatctttaaagaaaatatcgttatacagctatgaagtgaaatatgagctatgatgtaatgtggaggaccaaataattctgttatgaaatattttgagatccagcctccagtttcactaaacaggagcacctggaagctctggcccactattgtattgctaattttgagcaagtctactattgtttaccatagcctcagtataggatgtctcctagtttgcatctctattgggcctaagcatctgaataggcctgcacctgggtagagaggcaaggtgtaagtaactagggagtgttaggagccctcaaggagagaggagaacaaggacagaagtcatctcgtggtcatggcaggacggttaagaaacagctgaaaagatgacaaagaaaaaactctagttttacaacatggaactgagagctctctaaagattacaagatgcctgtgtttggtctttatagccgctgggttgctaggagtttccagttccacgcaccccgactcaggccaaacctcatgggttaaggctgagacatgccgggtcatgacaatgtaatagatagattaccaagcattgggaagaaacaaaatgactcttcactgtgtaaggttaaggaatggaagccagcatgaagagctacacctctcatagtaaaggggccagcttccattttggcagccataacggcagaacacgtgcttgcttctatgaccttgtactagacactagaaagtcagatgcctgcctcgtgacaaggaaccaatcagaagttagctggtagcgctatgctttacaaacctgggtgtgctttacggacaagcgcacagcaataacgtagagagcatagcaaccatcctgggagggactatgggccataacaaccagttgaccaatcaacacagggcaaaccctccaagcctggaggcacaccaattgtgagcctgtgcgtacccctagatactccccttacgctgtcctataagatctcttgggagaccctaggagccgtcttttctagccatccgccatggcgggtgggtgaaagacctgagctaacatggggttagctcgttaaattacaataaagcctcttgcagtttgcagcaagctctcgaatctgcctggtgattggggtgaccgtgaacgtggcctgggacgccagatacttgagttttccgggggtctaaaaatagttcagaggtgatgagtgctatgttctatgagatttaagggcagattgacagtatgaagcccaaaagaagtgtttgcatggaacaccagccactacagtgatgatggagcacagtgggcttttgttaaaataccatgtgattaccaatgcaaaaggacatcttcatgtatacaagtaaaattaatttagatgaaactgcacaatataacagaatctaaattacatcacagtacaaaagaagggaaagaagggaggaaggagggagggaagaaaggaaggattgcccatttactctggtggggaataccatttgtaagactaaaaaagaggaaaaaatcccactgttttctaattaataaaatatttccatagagtatgaagttacagttattaagttactgtaagtgtgtactatagagaaaagcaaagggttgattatagtgagagccacatttcccctgttggaatgtgaagttacaaggaagcagaggatgagtgaagacttccaatgtgctaatgaactggagttgcagatactacatgaactcatggccagcttgatttagccacagtgaggttagccatgtaatttttgttatgtcatcagataagcccttacattaataataaccccctgtagtgataaggaagtttaggattcacaaagattttctaatttttttaatacctgtatccaggatctccataaaaaggaataattctgaggtggggaaacgaatctgtgagtttggatctttgtggttttgtgttaatactacacgaaataagctcccagaagacaaacaacaaagatgtgcataggttcatgtaaagtaaggtgatgtacatatacaatcctaatcttggcattgtgaatgcagaaggaggaagaacaaagttcaaggtcatgctcagctacatcatgggtttgggacatacaaagttatatgagacttgatcttaaaaaataagataaataataaaacaataacaacaaaacaaaaaggaatgcagactctgccaaaatttccaaatgatctgcaaagagctggaacaatataaggtgctattgaataatattagaaataaatattcaattgatacaaataaatgattaaatatattgtttgtagacagacaataaatagattaaggagaaaaatactgtgcagatgaattccagacaactcctatagctatgttgttgttcaggtgattgctacttcagagatctgaatttacagcttaacaatgggaaagtttccagagatactgtggagagctgatgaagttcagcacctgctaacagggatcatgacctgctgtgacacatgagagctgcatttcatcactgtgtttggcctctgacctgtcacatctcctggaggaggagttctagaaaatgtctgaagagtgaccctcagattgacattcagtcaacaagtagcaatgactgagaaatgtcactggcctgtgtcctcagagtccaaactaaagtttgcttctctaacatcttacttgggttaaaggcaaagcaaggcaggtattattaacaattaacataactggatctagaaacaacaaggagagaatcctctgggcacactatgccagattatatagatcaggttagactctgagcatgtctgtgagggattatctagatcaggttagcctcagggcttgtcagtgtggggggattacctagatcaggttagcctctggacatgtctgcaactgattataaggaataaattaactgaagagtggggagacccactctactattgggctgggccagtccctgggtttgaaccttggactagataaaaggataatctagctgagaagcagccctctcattccatttcttgtctgtggatgcaatgtaactgactgcctaagctcctgccaccatgcctttataccgtgatggactctgacctggaactgtgagctgaaacaaactcttcactaagttgctttagtctagtattttgtgccagcaccataaaaagtaactaaaatacaaggccagacctcctgaggagcacagtttgttcatttctataacctgaatgagacaattgcaagataaaatcctagcaaagcctggcacttccagccatcacacacctattgactttcttctccagttttgcagtatcctgccaataccaacattcattccagtgctgtgaaggaggacatcacatgcttgatggctagctcagggtgcctgctatttttttcattattgaaagaaatcatgaaaaggttttcttcttactgcatggttggtttctttggcatccttaaatattcattgaatttataacaggacacacttgccagaaaatgttttcttataattaaaatattttaaatttttctttagatgtgtagtccatgttattctcttataagatcagttgaaccattatttcatcagcatgaaatatattgtacaaatgcttcctttcaaagaattttcacatttgttaatatttataaaactagaagaatattgaccatgtggcatctgtgaagtgaacctctggctggacaaacatgactttcatgatacctgggttgtatgacaagcatttaaaaaactttgtattacaggtaactagattcttgtgtattttattcagaatcacatcttaaagaatcacaaacattgtgtgcattttatgtaattttatttttttcttgtgttgcagttttgaaaatctgatctattttcttgaggtttccattgagaatagtcaccaagcactcagaaatctaaacatatctcatgtcagtttctcataatcatgaaagtctagcctctgtatggatacggaaacacaaaaaaatataatcctgagttcagtctacacattagtcctagagtttatttaaaatttggaaggtaaaacttgaatattaatcacaattcatttgttttaatttacaaagatacattaaatgcataatttttagtatttccccttcatagtattttgctgaggaattatggaaaacaaggagaataaaatatttcttaccaatttcccccttgcttgctgttgactttaattttcctcagccaaaatacacacaagttgatattcaataatactaaattgagtataattttcctttctcttgggaagaaagtttcattatctacttatacccatagtttgtgaataaagagggtgtttcatgtattggcaaagacagagaaggcatgaaactcccctaatgtaatttcatctaattaaagactcgttaagaaagaaatagaaatgagaatttgcctcagaacttgcttaagtaattttaatttttaatcattttcttctctcactaattaaacagtttgataggtacctatcggctatttacctcattttctgtattttatcctacaatttaacatgtgcccaccaatcaaaccactctgctctctgcaggtgtttggctcatttcccacactgtatatattttctttttaactattaccaagacataatttactttccttataaaactacctatttcctttacatcttacaaaatgaactttggatataaatatgatatttaaagaacaaaagagatgggaagaaaagtcaacaaaggtaatactaacaaatggtaaaaaccagtcaaggagagtcactggtcacaggaaacacagcacattaaaatgtgagggctggaatcatagaacacttattctggaatcagagttgtcaaatttatgagttgtaggaacatggatgctcagttttgagctctctcagccttgctcccttcatctgcaaaatggttacaacacaacttaccttgtgagatagccagatcaacatcatccataacacatacagcacagtactgattgccaatgacttttgttcaaataaagtcccttgttcatattcaacctcctggtttcttatccaatccaggtttgtgctcatgcattcccttgctccacactcctcatagccacttctgcatcaagtttcttgcccttacatgtttctgactttgtgcttgtgctatttgtactagttgatggactttatttccaatcgtcagtttttatgataggaaacacctgttcttctttcacattagtctgaggtctttcctaggtgagtgtttcccttatattaaaatttaaacacagtcttacttaaaattgatacatgcataaataaaattgtatgtgttaatggagtaccatgtgatctgcatggtatgcaatcttatacatagttctccacaaacatttgccattttaataacagtactatatcattacccatccatcccatcatagcatatatccgaaggatatatcttttgagtttggtgtagctctaatcacagtaggcaagacaggaaacaaccaaagtgacactcaattaagaatggataaagaaaaggtgagaagggagcacaaccaaattctattcagctataaaaccaaacaaaatcctgtcacttatcacagcatggaaggaactagagaccatcacagaaagtgaaataagcaacacacagagtgacaaggatcttcaatttgaaatgcataaaacttaatgtcatagaaactgagaataaaataatggttaacagaggctggggatagtggagatggacatggaaaaaagaaggattgattgctcaatgggaattaagttgtagttaatgtaaatattgatttatctgcatacttctggggtgctattgtatagtaagatgattacaattagaaataatttactgtgagtttcagaaatctagctttatttcccttatagatttctatttttagtcactgttggcagaaatgtttcttgacatcatttcattttgttcagtctttttaagctgtgctatgtggcctgtcacattatctgccctagagaattttccacatgctgatgaaagaaatattgttcccctgccaccgtatggcatgttctgtagctctctgaaagtcaatttccctgggatgcaacttcaccatactgtttctttgttgattttttttggtctgaattattttccattactgcaaatggtctgctcacattccctgaaactattgtgtgaacacttatctatactctctgtcttactaatataggctttgaatatttgagtggtccaaaagttagtacatatataattgctacttttttgttttgtaattctatccttatcattatgggatgattctatcctcttttctttccaatacttttgtattaaagactacgttactccataactatagcttctcctgatatcttctggattctgttttcatataacatcttattccattcttcactttggttgtatctgtgttctagagaagtttctggaaggtgcctgtagtcaggtttatcttgacagtgttagaacatgcagctacctatgaattttatacctctcattgttttcatcttactcattaatgacatttacagtttggagaactctctaatatatcttgccagtagttccagtagatctgtgttctcacccattatttatctgggaataataaggggctctggtttctaaacagtagctttacatggtggagtattcttgttttgttctccattcatgactactgtgaaaacattttgccactctctgtcatggaatagaagatttgatcaactatgtaaagatgtgttgcttttgtttatgctgcatttgtttaactatgtaaagatgatgtgttgctgtttcacttgtcatcattgtctaataaaaagccaaatgtccaattgatgggggaaatagttctatgtatgtttatcttattgattgttaaataaagtacttgcttggccaatgagacagcaggttaggctggactaggagtcaaagaggaatctgggaaatgtagtagagaagtggtgttccaggcaggaagtgacatagcaaggagactcatatttaagaagagaaaaaaggaagtgtcgctctctttttccatttctgctccagtggcgggatgtgattcaccagcaaggagggacgccaataaggcgtccgataagataagtctcataaaatatatagatgtatggtaattgagactgagctaacagatgagaatcctagtcattggccaagctgctttgtaactaatacaagtctctctgtgtattcatttgggcctaacttgggcaggtggctggcgtaaagcttatccttgggacttcctggccagccagcatnnnnnnnnnnnnnnnnnnnnnnnnnnnnnnnnnnnnnnnnnnnnnnnnnnnnnnnnnnnnnnnnnnnnnnnnnnnnnnnnnnnnnnnnnnnnnnnnnnnnnnnnnnnnnnnnnnnnnnnnnnnnnnnnnnnnnnnnnnnnnnnnnnnnnnnnnnnnnnnnnnnnnnnnnnnnnnnnnnnnnnnnnnnnnnnnnnnnnnnnnnnnnnnnnnnnnnnnnnnnnnnnnnnnnnnnnnnnnnnnnnnnnnnnnnnnnnnnnnnnnnnnnnnnnnnnnnnnnnnnnnnnnnnnnnnnnnnnnnnnnnnnnnnnnnnnnnnnnnnnnnnnnnnnnnnnnnnnnnnnnnnnnnnnnnnnnnnnnnnnnnnnnnnnnnnnnnnnnnnnnnnnnnnnnnnnnnnnnnnnnnnnnnnnnnnnnnnnnnnnnnnnnnnnnnnnnnnnnnnnnnnnnnnnnnnnnnnnnnnncatttctgctccagtggcagggtgtgattcaccagcaaggagggacgcccataaggcgtccgataagataagtctcataaaatatatagatgtatggtaattgagactgagctaacagatgagaatcctagtcattggccaagctgctttgtaactaatacaagtctctctgtgtattcatttgggcctaacttgggcgggcggctggcataaagctcgcatgtggcggtggggctcaggcagcttttggtggaaagatttatcataacagtccaatagctaggcaagggagagatagctggggctggagggcagagtgaaaaggggaaccagccagccagtaagacagcagccagccatctggggaccagtcagccagacatagagaaaaaaggacagcaggatggacagtgcataaacaatccttggggcagcacatagattaatagaaatggattaatttaagtttaaaaaaagatagctagacacaagtctaagctaaggccaagcatccataattaataataagtctctgtgtcataatttgggagctggaagtccaaaaagtcagctacaattctcacccagcctgaagatatctgttgaaagttggaacagtcatacccctttacatgctgcttctgttttattccagctctcaatctttcactttggttttgtggtgtgtgcacatgtgttttgtatcccgagataaactctggcatctttcctcaagagttttcttgtttggcttaacatagggtctttcattggcctggagcttgtggactagggtaggctggttggcctgggagcctgccaagggaggggattacaagcactgtttcccacatctgcatttttacatggttacatggaatggaacttgggtcctcaagaatctgccttgccaattcctttcctctttaacttttgagagctttattatactgtgccatgggagtaaagctcatactatgtcaggggtagagtccaccctcaacagtgacctttaactttccagtaccagatgtttaaattcttctccaaactggggaagttttcattcattattttatagtttttttttttttttagctcctttggtgttttcaagtaaagtcattgagttactatggtaatttatggaaacttgtgaagttacatcatgattatccaaaagtttctaaagtctattgatttatgatattatctaacctttagcctttaaatgactgatattttagtccagtgttccttaagtagctttattagtatctgtgtttctggaaatactaatgatctgcttattttatctgacctatattcacttctgctacatcagcactgagcagtgttcatgtttaggtctgcccagagctttctgctctagttttatcagagttgcagaattaatgggaaagtcaaaccaaattttctctcaaaccttccattattatactattcaaaatgaactagtagactagggaaaataatttatctgttcgagtctggtcttagggctagggtaggccaaggcacttactcaccatcacttgcctaaattcaggcattataggattctgcttggatctatgcatagacatcaagaatgagtaccatcaggctcctaactcatgtctagttaccaataatacatatctgtggcatagtcctgttgctaggactatagcctgctaagaccagaaacactgaaaaaggaccaaagttcattctatgggatgactactatatagatggtcttgtggctcaagaccactgcaccaagatccagtgatccttgctggactagatgtccgatagtggagttgtatgtctttgctcattactcaagctctctccatagtaagacttggggagagggctgggcatcacatttcactagttcatcaaaaatatatattactatatctgtatgtccttggtgaataagtttctgtcttttctgtgctgcccttggatggggtaatgttaataaagttagtctaggggactgccagtactgacaattgctgatcttacatgaatctcacagtcacaaagtatacactgaggtccactttcacagtgatatcaaccaaacaagactatcttattgaactcatgcttggtttattttatgctaatatcatgcttcctgtgtgggcactaattatctatgctacctcaggttgaggcaattgtaggctgacagccaatctaacatatatggggaattgccagtcttagaggatagagaaaacaggattaactggagactgtcaataatgtaagccagagctcaaatctgtccttccatgcacagtcctgccccctctgccacaacaggattaaaggctctgtgtgtggctctggcttgagtaggggcctttcatttctgagtggtgctggtgctcactggtgcaatgatgcaattcaaagtcttctgtcagtttccgtgccctactgtccattgagtacagtttcacactctcaacccacatgggtttgtgtagaggcactgagtcaataatgtactaatgatttacagagtaccagagtcccagtctctaggtattgatttggtgtaaatggttgtgggctctacctggcttctgctctcaatctggaagcctcttggttttgttttttgttttttattttgttttgttttgttttggtttttcgagacagggtttctctgtgtagctttggagcctatcctggcactctctctggagaccaggctggcctcaaactcacagagatccacctgcctctgcctcccgagtgctgggattaaaggtgtgtgccaccaatgcccggctgcctcttggttttaagactcacattaggactcttctgaagaagagtttctatttagtcaaccagtaataatttactttattttatttctgtatgactatggaaagtttaaaccaaaattagatgctgtgttttgtttgtaaatatctcctccaatagttttattcatcactgtattctcattgcatgcactaatcaaagttgacattcaagaatattttgtttcctattgaattgactataattatgtaatttcatctttgtattaactaggtagatccttaaggtttttctttccaatattgggtggtaaattgtgttaaaatatcagcctgtgttctttgaatactatttatactttagaaacttgagatgtgatagattggtggaaaattgaatacagctgctcctgttcatggtagggccatttgtttctggaaaagattagtttcaggtggcctttgaaatgatacatttttatgagaaaacatactatcattatttgaaatgtccttagggaatgttatattaggtgcctccaagacaatcacatctaaagccattcatttaagttagaataatcatctgacaatgcagatagtaatgaaattcagcaacgattgataggatgggtgaagattagccttgcctgtcaaaatggcaaatatgtgataaagaaaactagagtcagtatcaggcaatgtttcaggcttctaatctcatcaacatcacctaaaggggaaggtcatatctgtcaatggagaaaggaagtggcataggaagctgttcttcatgcttgaattagtaatatcaatatagtagcaacaataacttctggaaaatatgatttgtttaagtacacactgtattagttttcatttattggatgcagttataacctgggatcattattttgtttgttacatctcatatccctgaggatgtcatatcaaatcttatttatcatcagatgccatgaggtattttcatagtccagttccacacaatgggcaatgaactaaggattagaaccctattgttttattatgcagcacatattacacaccctttcatagatgaacattttgaatgcaatggctcacttattttcataatatttcctttttaagatttatgttttatgtgtatgagtgtgtggggatgagtgggtatgtgcactatataagtgagggcatcagatgctgtagaactgaagagtatggttatcagagtatggatagatgaactttttccccctttaaacacgtgctttaaactcctatggtttcatgtagagggaattgtagcagagaatcaccatcctcataaccatcaagatttacataaacattctgactctaccctactatacagaggacttcccaggaaaatggcaggggtctgtttaccagaaacagtgtttctgtgggatcagaagaaagcccattttggatcaggtgccctgacactagtccttactccttagcagagttttacaaaagataccaaggcaagtccacacaaggacaccgatgcttgccatttcagcttaacttctctgtactatagacttcaatgaatttcttcttgtctgtcagttctacattgtcctatgaattgatagtaaaacttcaagggaaagtgccatgtacaattacacatctctgaatgtgtatgtgtgtggggggtattgtatgttgtcctacatggggtggtcagagagatttaactactaactgttaccacacaaattcagtgttctcattcccattcattaacttcttcaccatacaagtattaaattggatacctaaaactgtttgcacactattattaatggtagaagaaacagatttgaaagcttggatttgttttttatcaatattttacttactttcaatgggtttttatagtaaatgtacatcatctttatattgcagaagaaactaaatgcattttcagatttagaaaaattttaagaacttaatgtgcacatggagttattaatatagaaaatactatttactctgattagatctgaatattaaaggattcattttaagttaaggtcatttaattaaatgatttattttttcacaatgatatagatttttcaattagtataaaccaattataaaccacaaaaacttgaatatatattttcctttaacatcgtcaaatgaaacatgatatcacatttctacaatttcaattttagcttaaaaatgatcaccacagtgcaaaatagaaaagatttgtttccgtttccagtcttcaaatggaccattaatatctatgataattttataataatcttattatcagcttaagaatgatcactgtataattatatgcttatgataatatcaagatatccatttagtatattgtaaatacttcattataatattatttgctgataatttattttaatagtatcttagaattctgaaattataatcaggaacacgtgcagcctgtgaacttttaaaaaaatacaggaagaatttttagtatattgaatttaaaacaatgtaaacacaaatttttagttactcatttctttagttattaagaaaaaggcaaaaacttctgggtttgactattataatatggtggccatctgaagtgttgattcaatcttatgaattaagcaactataacctttaaaaggtatttatttattaccaacatattttcagaaaaattttatcagttttaaaataaatatttcttctaaataagcaattttcctttggaaaatcattttttatttcctttttcccatttaataataagattttacttttattcctgtgctaaatcattcagaaatattttctaccatgtatgttagacacagtgaagtgtacttgtaaaactcaataatgaagctcattttagaatctaacattcaagctggacagttttacacttaaggattagaataataactggctaaatattaaattttaacctgaatccaaaagtaatcaaaacttcagattcatttaaagaaagggtgcattctggttaatatggtttttgttaattacaagatcattaaggaataactaatgaaatggatgaaatccagcaccctacctttccaaagtaatttaaatctctaatcagagtctgttcccattgctggaggcaaattccaggttcttatttatagctatctgtattctgatatgccatagccttttgtaatcttatgaagtcctacttcctcccctaatgttccttctcataatatattctatagcttcaacttttgatagtaaatgcatgtgcgtagacagaaccacatgaaagaaatgctcctattaagcagatgccactctctaaagaaaaccacttggtaaagttccagatatgggactcagtaatctagaccagtttattattgaactatttttacagtgtcaccttacatagtttgaggctcagcaggggtaaaagcaacaatgctgattttattgctgatctcattgaacaggggtccaacctgtggcagaagataagagcaggagagtcaaaagtaaactgaataaggataaaatgttctattctttatttgagtgtttggaaatctggcatggaatccatattaagttacacccaggacacttccctagaggttgctctgtgtgtgtgtgtgtgtgtgtgtgtgtgtgtgtgtgagagagagagagagagagagagagagagagagagacagagagagagaaaaagagagagagagcagatgccttatggaaaggtattaagcaaaaactgtagatatctcagaaaggaattagcataggccaagtctgtaaactcattccccattcaagtttacttcaaagtgtgagagaaaatattgctttttacaatagttcttgtgtttgtgctgtgttgtttgtgctgttccttttagtgattcagagatgtaatcatttccatgaggcagtagcttccacattgctaggttttggggaatcagggcctggagatgcaaactagtacttattaggcatgccaagctaatgctctatatcctagatatgtcccaatcactaattttgctctcagtctgacttcaatggcaccatcctagtgatcaggataagtcacctaatattattgatttcttattctagggactcaagtcatactttagagatagtcaatgatgccatgtctgtccttgtacttaacaactgtgtggtgcttccattcagaaatacatggacttcagaagcccaatgctagtctttctggcattatttatacttagatatgaatgagaatcagaagctgtatgagattaaagaaagaactctccatttggatgtgacctcaaaagacatggggattttaaaagcaatacagattcttggacctcaccccagatagtctaatttaatgttttgagcacttcttcatgaatgagatgtttcattccattgtgcagagccgaacatgcttctaggaataggtaacattgaaaagccagaaagaaaaataactgactgctcaagaacttaaaaatactccaccacacaggaaataatgcaatgggtggggaggtggagggaaggggcagctagagaagataggaaacagggaactagaagctctagaaggaagaggaacaggcttgtagacagggaaagatagatcctttgatggaaaattatttcattattgattgtattggagaagtggaaataaatgaaattctaaccagtgagtgttagatttttacagggaattacctattcttactcataaaaagtggtttaaaggtcagttcagcttgtgaaagaaatgtataatcatgatataggatttaaaaattatagcttatttatagacacgtacttaggtaatatagtaacttttaaaaataaaattatggtccagtgatatagctcatgaactaaaaacttgtgtcatacagtcctgatgacctgtgtacactctctggaagacacagtgaaagaagagaaccaacttctgaaagttgccctctgacttccacacacaaacatgaaagtgcaagcacacacacacacacacacacacacacacacacacacacacacacacacacgtgaagtatcacaaaataaaaaaaataaaattgtgcagttataagacctcaaatgtgtctgcacttacagactgcagtaaagcaatggtctaatggcgagtaatgaaatatgggggaagactgggttttatgtgacagccacagtcttgattgtgactgttgctcatgcattatgcatttcccacagtaaatagctgtgaataaaaataaacctctgtgagtnnnnnnnnnnnnnnnnnnnnnnnnnnnnnnnnnnnnnnnntccagagttcagagaggagagaacatgggactccaaggaaaaggtatagactaggacaaataaatgtatgtcttgttaaatcatatgaccaacaaggagtaagcaaatgaattattccctggaaatctgaaagaaaatgaactcaaagaaatgcatgatcataccaggggaaatgtgatgtttttatttaaagggcagtacctagaaaattatactcagaatggggaatatattctgatttctccaccatcttgtttaacacattagaaacacccaagattctgttgtattatcttcctcctccaatgctaccaaaatgtttgaaaggaaacagatattactcaagatttggagataggaccctgctttactaaaaactactgaaggtgacactaccacattattaagtttgaaactgtgccatgaaaatgggcctaggccatcaacacatgctactcagggttgccttcagagttttgtttaaggatagccaaatgataccactgagtcatttaaaatagctatgcagagatgtccttgccaatgtatgagtatggtgattagggttttcagtagccatttggacatcatgaggatggctgtgtaagaatgaagtcagtcttacagagcaaacctcagagatggcataggaagactttgatagtacccttgagctaaacttgcttttacctttgtacttcctaattatagaggccaatatatcatcttcattgtctaatgtattttagatgagtttgtctgacacttggaacaaaaccaataaaagagtatgttgatatccaatattggcttttcgagattgggtttctttggaacctatcttggcactcgctttggagaccaggctggcctcaaactcacagagatctgcctgcctctgcctcccaagtaagtgctgggattaaagacatggaccaccaacagaaatagaattcttgattatgacaaagtcactccaaaattacctactggcctttcttctaaaactcctctgtctatttctatgatgaactgttttcatttctagtataatctagcttaactcaaaatttcactaaatcaattaatatatttttcttcttacttattggtttttgagtacaaagtaacatctatgcatattacctgagggctatcacctgctattgcataatcagctgaactattctcttgggagcattctctcagcatttaccgaatttccaaagttcttcattctcggcttgaagctccttgagctttctccctggcacacatccatttgtgccataatattcagatttcatttaggcataatccctaactacattgtaaatatttgaccttatacccagaggtaagtggaatccttagccatcatcaaggaacctactctttgcaacagattgtggtcattatagaaaactacacaattcaaaccatagacttgttggaagcccaaactgatggatacatatatagaaccctcccacaccagaggctcaggaaacactttggaagagaggatagaaagattgtaagagcaatgagacagtgaagtttgctgtgagactgtgtctcctagtaatgtcagagaagctacaccaaaggatgacatcatgtaaacatgatgtaaacacagaagggggaagcccatgagtcctcaaccccacataaagagctacaggcagctaaggaatgctgagaacaagagaaatagtcatccttaggaaagagcataccagctgattattcaataacaaatgctcatccttgaaaacatatacatacaagtaaaattatgtagactgcaaagattgtctttattaatttatgaatactcacacacacacacacacacacacacacacacaaatacaagtaaagaaaaagaggtcatgaatttgaaagacagcagaaggcagggaggtatattagatgttttggggtgaggaaagaaaaggaataaatgatataattataataaaatttcaaaatatttaacaaacaaaacatacaaaaattcagagaacagaggagggcctcggtactgccccaaatgatgtgacagactttgatgatcccccatgggagacctgaccctcctaaggagtggatgggggtgggatggtggagtgaatgggaggtctggaggggagggaactgggaatggtatgcaaaacaagattgcttttaatttaaataaaaattaaataaaaaataaaattgttaaaaaataaataaataaaaacaattcagagagttccaagcatgggcagggaataacttcctatgtgctttttagcaaagcatcaattttctatatgaaatcagggagtatcacgtagtagacaaccacaagctatgaatgaattcatgtagtacttacagtatcattagcaagctaatttataaaatattttgtgtttcctctatgacacataaccacagtcatttaggaccagattttcaataaatacaaaccaaagcaagtaagacaacaacactagttgcattcgttcatttatttaattggtttccatcgctttgacagctttacctactcatatataaaataaattaaaatgggtgcagtagatgctgtgtgtgattctaatttcaaggccggggaagcagaaacagaggaatccttgtgggttcctaaacagctactctagctgaatcagttatctccagattcaatgaaaaatcaattctcaaaaagttaggtgaaggaccaatgagatggctcagaggtcaaagctgctgtctgcacactaaggttgatccatggggtttacatggttaaaggagagaactgaccccttatcattgtactctgacctccacagaacaagcttcggtatctgtgtgcacttacctgcacagaatatgctaaagaatgtgtgtgcatgcaaaaaaaaaaaaaaaaaaaaaaaaaaaaaaaaaaaaaaaaagaaaacaaaagcacaaggcagagagttatttgcagaagccatctaaggttgacctctggcctccatatataggcatgctcacacacacacacacacacacacacacacacacacacacattctttttttcatgaaatacctttaatagaataaagttatttacagttattcaatacttgacctggttcctctgacttccatgagaagagaaagtgtatttgtgaattcttttgtaagttcaaacccccctcaaaacaagaaaatgttaaagaatatggagatagctcgcgtgctatttttagattttcttagtcaataaattaacattatacaactgattattcataattattcatgaaagaaagacatttgatttcggaggaaaagagcaaatgaactctaaagcacatgcaggtacttaccgtcattcataaaatagaggcaagagaataaggagctattgtgactggaaatcacattgtaaaacaaagccttcttaaagtgttccagagaggctgctatcaatttctagtaatgaaannnnnnnnnnnnnnnnnnnnnnnnnnnnnnnnnnnnnnnnntcaatttttttttattttttatttttcgtttgtctgtgcctgttcactgtattttgtccagccaattccatttttctattctatatagacccatagagttggaaactggtaaggtgctcgtctatactccaatatggcatcctggtagtgaaatctatgcctttcctgggatatgctatgtgaatgacccagaaaacaaacaaaaccatacaaccacaaaatctattttaaacattgtttaaaaccaattgattggttaaaatttcctgattgcaaagtttgaaagatcaagaaccaaaattatcccaggctttgtgaagaccactgaacagctcattgcttaggcgacatctttttgatcactaagtgaaactttagcgtgcattaactgagaagtgtacccatttatatcagctcacacttatggatgatgtcagatatttaaagcctacttcagagattcccttgttctgttataaccagcctacttgctaccccatcaaggactttgaaaaatgccttgacatatgactttcttttattctgtgactgtaaaaacttcataaaactacttctgcctgtgaacctgtcatttggtgtaaactgagtccatgttctgtcatgatcatgcatatttatgtcagaataaacactctcattctatctgaggtgaaagttgtggtttcacacaaagatactccttttttcccagtctttgcaatataattggggggtatttggtgggggtgggagaggaagctgttgtctttcctggcactatacattggctccatatgtggatagatcatctgggggacactagggtcatgcttggatgatcattttccagtcatatataggatggaaatattgtttcttggtgatacttgaaaaatctgaagacagatttttagagtcatgagtgagtcaaagaccatgatattccctcttacctttacttactaaagcagctttagtgttgtcaagatttttcctcatttcctttaaggaacttcaaaggaagatgggtaggtcacttgcaaactataggtaccttcattactcaagtgaattgtttagactcacattcatccatttctcttggaaataattactataattactcattatttctaatatgagaatgactgccctaagctaaataaacaagttctgagacaaccattaaattcctgggatttacaaagaaagtgagtggtagggtgttactgtttgagaactggaccacacttgtgccagagaaaatgtcatgtgcaaggaaataaataatcaagccctcccccaccataaattttacatgtataaataatgaaagacaaattctaagtggttttgaaaattaaactcttatgtatttctagaaagctattaatgcttctttaaggaatccacacttctcattgatgttgacaaatttgtcagcatgcagtcatttctctacttacttcaaactttatatctatttcattgagaaactttaacttcctacaataatccactatatgttatagctactggactttatcctactttttaaataacattcatagactttcacgtaatttatttaattcttcacaactcagactgatacttccttctgtaagaatttaaagcagtctcctctccgctgcccccatgtcttcatcagctcatcatcttattgtccttttttgtttgtttgcttgctttttcttatattgagatgtcagctcacaatgtcactcaaactaaactttgctaacacctagcttcatttaatcctcctacttcaggctctggagagactgtaggagcttgtcaacacattcagctatttcagtgaatctgtgtagcactcaccataatgctttgaaattttatttactgtatagactattatttggacaagcagctaacagtaggggtaatactttggaatcatctgaagataattaaagaaaactgaaatccccaagagtttttcatttatgtgtcctgtaatagaactggttccttgaactctctggatatcctaataaacaaatgggcttgaaaaccactgggatttaatcagttctaagaatcaggatctaacacttagcctgtgtagtcaagtggtacttaacactagcacttgagtaaacagtcttgagaatgctgtgttttaatgtttccatagataatcttgatgagtgtctatttacaaaaggctagaaaagatcggcaatattattttctcatttcttctaaaataataggacagaactagcaattgaactaccttaaactgtttataaatagcaataaactgatttcatgaagaaatacacactttaatctagaaagtaaaacataaaaaaacaaagaaattatcactactcctttgaatcaagcgcaagttcaaatatttctttaagttatctagaccataagaacacagccgtcatggacctgctttatgatacatagtagtgaccatgctttatcaaagctgtttttaatgatgttgctcagaatggtttcctcccagatgatgactgagaagctaattaaaaaaaaaatggtgccaagtaccacaagagtaacagaactgtgctgttttctgggattttgttttttttaatttttttgttgatgtttgtatgagagcatgattgataacaatatgctatattttaaaagttgtgagatagaatactttaagtgttctcaaaataaaaatgatgaatatgtgtgatagagcatgttaattggtttaatttagccatgccattgtgaacatactgtattatgtatcataattgtgcatgactttatttatgagctaaataaatggaatggaaaaaaagaatacagccttcatttggttttaaaagaattgaatcttaaaatatgcatgtcaatgcacaaatgtgctatatatattcataaacaaattaataaaatcacactaaagtattcataaaatatatacaacatgtgcatatacccatacacacaatttatatatgtttcattaaatgtgtgtatgtatatgtgtgtttatgttcatgtgagtacaggttcccaaggaggccagaagagagtttcagaacccatgaagttccagatgttttggggcctcatgaagtatgtcccaaggaccaaactcagatccttcagatattctggaaggtcagaaagtgctgtgaccactgaacaatctctccagtacctgctttcatgtgttttgagacaagatgatctctatcagtttgtagcaaacttatagaacaactcatgctgagagtagtccatgggcacagtgctgtctctgagttgggttataacattcaataattaatatctgctttcatggcatattgattatactctgttcagtcccagctggaatttgagtgaaaacactaatttgacttgacataccaatttagaaagttattgaaccagaaatcaatcatccccaatatctacctacttgtgttctactctttgtgatcacagatgtacagcaaccagcgactcttttaatatttttagtaatagaatgcttataaaataaacaggaaattcattttagttatactacataatatactgattcaatattcaatatacaatgaattttttaggattttgtaaatatcaaacactgtttttgagactggtacaatgaaaataggaggaaaaaaataaagaaaatcatctgcccttataatgtatgatataggatccacaatgtttagcaaaggcagttagtcatgtacagaagaattcctggactacttgaggggaaccatagcaatgaagaacattaaaactacataggcaatgcaagtagagacaatcttattttgttggataacatatacaaaggactatattaagaaaatcattgacacctcatgttaaactatgatcattcatagagctctgaattagccttgtcttataatccttttactttccttaacacattgacaaagtacagtggagaagcaactatcctaatgtactctgtctattgcacatgttctcttaatctaaatgtgatagtgtaactcatttgtagtgatttttatagatttgttccttttgtattcagccctatcattttatgcttatgcattcaatcacttgcttataagttgtttattacaactcactactacaatgaatagttttgtttattctaggttacttcttaacatgaagaagccagaccagagtccccacagagggaggcatgatggaaattgaaagtcagttgcttagtgttggaaatgtctgtaatcccagcatccaagagacccaagcaggatggttacttgaagttcaagtacagcatggtataccatcaagctctacactagccagagctacagaataagatcctttctcaaaaaaagaaaatgttcccaatgatagattttcaattggtttctttggaatcatactgactgagctcttaagttctaacactctcaagtatcagtacatcatcaattctcatcttctacacatgagtgcctagttaatataaaacatctgaatggagcacttggatgtatttagggatcctaactggagatacaccatggcagaattagacagttgtgaccattaatgaattatttttcattatcagagaaataactagtgaaagtaaggataggaatacttaaacaaaagttgcaagttaccaatgccactattataaagtagcattagaaaaatacaaattaaccaggcagtggtagctcacacctttcatcccagtactcaggaggcagaaatagggggacctttgtgagttcaagaccagcctggtctacagagtgagttccagaacagccaaggctacatagagaaaccctgtctcaaaaaagaaaaatagaaattaagagtcagtgagatgatacggaattaaagcaaatgtcacaaaagcctgatgacttggtttaactctgagaactcacatagaggataaaggagatggagaatcaactctacaagatatcatgcaccatggttcacatatacatacaaacataaatacattcattcatacatacacactgataaataagtaggcaggtaggtgatagaaatcaattgatcaatcaagtgatcaatcactgtgaattagttcagtaggaagttcagctggaaatattaccgagtgggaaaagaaatataattttaaatcaatgaggctggttattagaagaaaaacactcccagagactttcaatataattccgggaaggaaacatggaaatatccaaagctcaaggcaagtaagcaatgacaactgatcttcttagacttgaaattagaaaataccatctaataattacagaggatataataggcttgcattctcttttaaaatgtcctaaccttctgtctctcgtttggcttgtgaaaggagccggggtcctgttctcttatttgaagagaacacacagaggaaatgccactttggagttctagtgttaaggctgtgctgcacagggtaaatgctacctgggtggagatggatcttgtctccactgggtagccagagatgtgagaaaatgcaaactcaactctgagacacaccaacatgatcaccagtgcttctctgttcactaggaactactgtgatagccaggctaccatcacaaagtatttgcatatgtgtagttaagtagagctttcaagcacttcctactatagttcagattcaaatgtacctatatcaaaggctttgtatttgtttgtttgttctttggtgggtaaaacccagggccctgtcccctgcagacaaattggcctgtagggacagcttaacagttcagagtgtatattggtccaacagaggagctgagcttagttcctggcatttatatcacttagctcacaacagctaaaaactccagctcatggagggactgacaattctgacctcataggtacaggcactcacatgcacaaacttacacacagactcacatgacattaaaaaaaaaaaaaaaaacagtcatccaggcaagtgcttcaccaccagactctgtacccagctcaaatccttggactctaaaaatagttaaactgaatttttaaaacatttaaatatcatccacaagggaaaatagatgtgaaattataaatagctctgctggaaatagctggcattttctaaccctcaaactagatctctgactattgatcactaatgggataaaattagagtgtgtcaaaatctactgagttattttgagagaatataaaggactttctgatctcagttctagagaacatttttcccttgatttttaatatttctttctttatttttgttgttgttggtatttggatccaaggtctttgagcatgccaggcaaatgttctatcatcaagctgtatttcaaaaacctgatgactggagaattactttgagaagaataaaccgatttcaacaaaatttaggaaatagcagaaatgcaatttgatctagatttccatttcagaggaattatgtgataagcttatctagagaaaacatgatttttttgttttgttttgtttttttgtttttgtttttgtttttcgagacagggtttctctgtgtagctttggagcctatcatggtgttcgctctggagaccaggctggcctcgcactcacagagatccgcttgtctctgcctcctgagtgctgggattaaaggtgtatgccaccaacgcctggctgagaaaacacaattttttaaagcacatgttattcagtatgcaaactgatactaattgtttaaaaaatggggaggtattgataaaatgagattaaaaaattatatgactggctttcacctttattactacattctataattaagaattataatgaatgttagccattcagatgaattacaagaggtttccctgacatttgaaatttgatagccagggagagatctgtcttctttcaaattgtctttccattcaacaaatatttatttcttcagggctgcagagatggtttagacagtgaaccttttactatttttgcacaagcatgaaggcatgagtttagattcccagaacctattagatgtcagatggggcactgtgcacctgtaatcccaagattggggaggtagagacaggagacagcttaggtctcagtgggctgtcagcctgggcaaagacttcaaataacgtgaggaaagattgagcaagacgccgaatgttctcctcaagtcttacctgcccacacacgcatgaatgcatgcatgtgcacactcatgcatgtacacacacacacacacacacacacacacacacacacacacacaggaaaaatcctagatattcactgtgggccaagtaacaggtgagccctggattcatggagaacatgtctaaatctttttctactaatcaaatctttcaatgcaaggtttaatatgtaggttcctgtttgcagttgagtggtatctgatccctaccatggaaaggagggcaagtctgattagtcagtgttcagtcttaggaggttaacatgagctgttttgcaagtcatttgcagtcatgtaatctctgcccctgcaagtgagagtcatttgcaaagtagagcagttcttagggttcaagggaccaatcctagtcttctcagggaggtgaggctgcagctctgtggagtcaaattatagcacagcacagcaagaagcaaagtttcattctggaggatttctggacaaggcaagctttctatacacaatgcatggccccatctgtggccttctctcatctttgatttaaatgtaaaacttgtgtcagcacctcaaagacgaccttgaatacttaatatccattacctcaaaataacttttttttttttttttttttttttttgagaaagggcttctctgtattgctttggagcctgtcctgaactcactctgtagaccaggcatgtgccactatggcctgtttttcaaaataacttttctaaagattcctttcctgacttttcatgactgcttttgtttccttcctttggggaaggtggctagacatgacaagttgttgtacccaaagtcacatctctgtccctagattccagttacaaggccacatgtttagcttgactctaatgcccagaaaagacctttatgctaaaatcttttctccaacttggcatttttgagaagctcttatggaatctttaggactacgacatagtggaaaattctacttcactaaaataaagtttctttttaaaattaaatatctatgaggaaataaaagtttagtagtggtattaaaaacaatcagctacatttgtgagatttgctatgaagtggggagtaaaaagtatatggtggacagatagcaccagggagaagttaggcatggctacacctaggacacagctgacatctgactgccagaggaaggaaagaatctgaggagctttatgaaggtcttgatgcatttgcttaggcatgtgacagcatttcagacttattagataaacaaaaattgatattttttattatttctgggctaagaaaaatctcagcctacagtacactagcttgataaggaagagtcaagttcatatacataatacattaccttcaggtgggttccctcctgccttccagtaaacagtgtcagttttctgtttttaaaattgatttagaaacagtcaaggattagctttcacacacacaaacacaaacacacatagacacacactcacacacacacttactttgtgtttgtgtttcaactttgacccaatagcatgtatgactcagttttctatcactgtatacaatatctgagataataattttataaagataaaggtgttgtttggagccatgatttgggaagatacagtgtatggtgagttgtcactattgtttttagacttgtagaaaaatcactaatcactgcagagaccttgttgtataccatgcagcagccaggatgtgataaaagggaaagaaaggaacttgagttcagccccaccctgtccctcctctgggaggaaggaatcttggctctcttcatcactaatgccactctacctattaaagcagttgttagcagatggagatttttagtaaatatctaacctagcagatatagatactcaatgcaagtattgtgaataaatgaactcatatatattttataatgggaaaaagaccatgtactatgtggttctgaaaaacctgaattctcacttcatttgtacaattctctgtgtaagttttcacagacaaactcctgttttctcaattatgttctgagataatttattaaagcatttactaagatgttcatagaacatttatatccatacttacctgacaaacaaaaatattagctaagaggagtttccaattccagcataatttgaaagaacatgcaattgtgaaatccttcacccttctgtggataagcagactatcctagtgatgaccaggaaaccatgtaattcagtcaggatcaagtggacctcagaatttgcacattgctgtaggtgacccaagcagttgccattacctcagcctgagtggacatgagacagggccttcctccgtcagtccttggccattccttttccttaaagaagacttcatcatattctcaggataaattgtctgttcttttgaagttgtctaaatatcttctgccctttttccattttaggacctgatgttgtctttattccagacacatgctttctgaaatgcctcaatcaaggaaggtggcatctccatttggaaactgtgggagagcaggatcctaattgtcctggatatttgaaagagctggtacaatttcagataaaaaatcctgtgtcagttgaaaactatgcccttgagagccaattccttcctaaggccagtcagtgatttcaaggtagccacactattgctgaatatttgccctacctcaggcatcctgtgagttcaatttctgatcctcactgaaatttccctaataattgaagggttttcttttggggttttgcttctttgatttggtctgatacatttatttactttgagaacacatataactagaaggaatttaataaaaagggtagtagaaacaagttattttgtgccagaagtactcatttcactgagaacaacaaaaatcagcacttttgagagttatatatgtaaagacttccacacagactatgtctggcatagtgtaagtatagattaattattaactaatttaataaaataaatcaaacaacagcatgtgaacatctattaaatttgactgtttggggaaatgaagataaagcttatgttctcaaaatcatttgaaagttaaagtaactctgagcatttagaactaatacagtgatgtgtgcttcttcttctttagtctgagcatccccagcagaatcctcaagggtatgctagagtgacccaagaaaaatgaagttgttacaattactctgacttgattgatacaagggactgtgggagtagtaaaatggataacaacaaaattaattagttttctgttcatctgatttgcacaacaatatcattgtcatcttagttttgtaagtattttggtctcatcaaaatcccttgaagaacagctataaaagacaacctcacaaggtctgtctcaactttctgtcagcaggtgccagagggatacaggaaagggaacattaagaatccagagagagtcttgtcacgttcagttttttacatcagtgttattacaatagaccctttgaaatctttgtatttactttttcatgttataatttataattttcagtttcatcatataacatttctattaattctttgagacttttataaatgcttgcaatgttttctttgtttgtatttattctttgagattttgatgcaaaatattttgatcattctctttcttctcctccaacctttgctagattctccctgctctatactcacctatcttcatgttctttctctcaaaaacaaaacatcacacacacacacacacacacacacacacacacacacacacacagagnnnnnnnnnnnnnnnnnnnnnnnnnnnnnnnnnnnnagagagagagagagagagagagagagagagaggctgctgccctagagttggaagtggtaaacaaggaaaccgttttccatacataacagaggtatgaacacatgaatccacagactttgacagcatgaacaagacagacctaagctcaagccaaacaaccccctagcaaggagaagggaagtggaaacagtggcacaatgttctagccttagcggaacacatacatgcacacagtgtttcttactcatgtccatctacaattccttcccctaacttcttccaggtctacccctcacccagctaccacttccccccttcacaccccatactttcttgctctctcttaagtatcccacagagtttgatttgtgccatagagatatgcatgggtgtgaggccacccactgtcaacctgccaggtatagctttaaggaaaatggtggaggtgcacccctgtaatcccaacactggggaggcaggtgaatctccgtgagttccaggacagctattacacagagaaaccctctcatgaacaaccaaaaggaaaaaaaaaaaaaggaaagctaattccaatgccagagctctctaatggtatatactgtgattattacccaccaactcccagtaatttctcttttccttgaaatgtgtcagcttgggatgtgcatagcgaggaattagtgtcaagccattcaaatttgtccataaattcctctacttttaagtttttgtttttgagtttttttcctgtgttgacagagaataaactgtcagctgtagaaccgtggacaatgttacttacattgatttataagaatccccatcttaaacttctcatattaacttcacaaatctttcacacaaacaaaattgtcactcagaactccaggtaagaactctttctcctcacttgcagtgacatatgatagctgtatgctaattcatagcctatacaatattctcccaatactagagagaaactatataagaaaagaatctattcccggatattttaactccactttcagggcaaaacccacatttgtagagtctcttgctaggcaaggctacaattaaatacttttttgcatgtttcagttttcaaaaagtttgaaactatttaaagttcgtgactaggttttctaatgtcctgctttggtgttgtcacctagcataatgatgaattgtgtgtcagtgttcagagagaaccgctgtgctcagtgacaagcctggctctatagcacagcaactgcaatgcgttggctatttctctgctcactgtgcttaaatttcaggcgattaaatccttaaaaagcatttcagcattgtgtgattcagtcttgtcaggtaattttaaagctttagaagcattatgccataaaacattttagtatctttgattttatcatatctcaaacaaattatctctccagtatataaatattgcacatctaggatgggccccatctatcaatattacactgtgacagcatgcagatgcttcttatcagccacgccaaggaatttggtgtttgtcactaagcaatattcagaagcaagctttccctttcttttattatgcaaaatgcattcaagaccagaaagggacacagagaaaattactcgtctgctaagatattttgacacagaaaaatctttcttcctcaaggatgaaaagcaccttgtcactcacttctaattgctgcctgctttctgtgagtgcagggaagccagtgccctgtgatgtcacaagtaatagaaagcatgaatggctatggacagtattgtagacatcagccaggtctgagtctctcaaggcagaggtgatttttaattgcaactattaattttctttaagaagaaaagaggacattttctcttcagcatctctgctatttcatctttgtgtcaatagagacctttcttctcaaatgcctgtggcattaaagcataatgattgcccacattttcaaggcacgaatcaatctgaagagctgtaaacttaataaacattcaaataaagcatttccttgtgattaacaaccctaaccaaacgcaccaggcagggatgaagtttgtgaaggctgaacagcaagatgtgaaatcactctctaggtgtggaaacaacttttgaaaacaaaaatcctggtcaggagcttatgagaaaaagttcccacagaggggatcaggaaacagtggtggcatgacattactcatgtgccattatctctgaggtttccagtcattcccttcttccttgagtgaaggggccagagcctctctggtgaaatgtgtcttaatgatgaagttgaatgggttgggggacctccgagatttcccttggaaaattgtagttgattatgctgttaccgaaactttctctactattctctcccttccttttactttgaaggagaagcctaagaaaaatatccctaataaatccaaggaataacagaaggatggtaggcaagcttgcagttatcttgttgtcaattgttgaccagtcatttttatctcaagtacattgtgatacatttatttgtgtcttttaaaatgcataatatattcactcaataacttatatggatgtgtgcgtatgtgctnnnnnnnnnnnnnnnnnggaaagaaagaagaagaaagagagagagagagagagagagagagaatgcctactggaaacatcaagaattggaaacaggtgacaggtgtattcttaagaagcaggcagtattccacaatggatctcattaatctagaaattgcatgagagctaagccttggataacaatcagtttcgggcaccagaaggacatttttggtagttaccaattttggataccagaaagaaggatgtttaataggaaatttggagtggaaagatgaatgggaaagatcacttttgctcaagaccactcccatagagtatttaaactgtcccccagaaaacagactcctgattttctgatctctttcctgtctcctctctggggagatggaaggccatcaggagccttgtgtccattaaaaatgggctatttctaactcagtttgatttggtctgatttggattgctgcataggtgaagaggcttatcagtgtgcagaaacttttcatctggaggttccaccaagggggatgtttccctagggccatgtggtgggaaaacacccttctcgccctcacctgctctccaaaaggctaagattggcttttgactcagtaagtgtcctttccaaatcattgccttagaggcccagggcctcctgtgattttcagggtatcctgccaaagatgcagctgggccaggcccctgacctgttactgggacaaggacctgccttgtccagtgggaacccttcttcagaatacattctgttcaagggaatatcccacatcccctctctttttgacccaggacctaccacagtggatgcattgcattaggggtagggttccaccatagacttgtgaaatgggtacatgtcattcaaagccatatccccaaatgcccttgggctaccttttaaaaaatctttttaaattggggctatctgaaaccatatgtcgcaaatgcctgatttctctgtgcactaatgcctagcctcaatatgcccttgacaatgggacacaatggccaccagggggaaattctgaattttccatcctctgtgatcttgaaagtttttgctgttgtgggtatcagtgaacaaaacccccatatgtccacagtttctggatactgtgctcccacccttcccctagccagtgacttacagcaacagtcttattgactagagtcaaagtgcctccagattcctgactgtctgggaactggaaccctgaaaattcctacctgacattgatcccctacctgccaaccctgccagcccaaccccttccaatggggccatgccacatattccattcagtggctcccattcctcccattccttccctatccacctcttcccccttgcttactctccaggacaaaggtcgagtaacaacttccccctctttccccaccttcctctctttcccctccccttatcatccctccctatcatttcatgaccttcttgttcccttctacacattggcctatacttgacctagtgtccccagtgggagccatagtcctagccacccatttcatttctcaatcagtgccagatattagaaagcaatttaagaaaaatttgaggaggagtccccaaactcccatactggaattggtgaaaatggcttttaaaattttcagtgcctgagaagaggcaattagttgagttcttcagacagataaggccatgctctgagcctaagccttagcagcttccctgaggccacaaggggtataagggaagtcaacagtctccatcttgctggagctcaacccaagtcaactctgccattaacctgctacaaatgggagcagaatggtcacttggcaagatcttgcctggaccctcagccaccaaccaggtcatgccctggctgctctcaacctggacactggaaatcagagtgcccctgtgtgggctcatgctgtataccatgccatggaggttcagcctcaccaacactggcagttgagactgtgccagcctttgaactactcagcctggcagaggactgatgtggcccaaacttggtgactgtcattgccgtctctgagtctaggataacactacaggtagtgggtaagtctactacttttcttttggacatggagctacctactctgttttgacctctcattcgggtcctacagttccctctccaattcctgtcatagggatgaatgggaccccctctttcccatttcagaaaacctgggactgctttagctgaaaaagttgtcttacttctgctcatctacttatccctctcagatctgatggtttttgatgattagggtactgatagtcttgtgcccaaattctgaacccctaaatcaccaagaaacccattccgatgcaaaagcaaagagtcttattgttcaacgagttaagtgtcttagctctattccctcttccatccaaaacagcgattggcctgagaaggacccaaaggggccttgaggcagagaatttattagggagagcaatgggagtgtctagaggtactcaacagtctcagaactggtgcacatctagggttgggtgacctgtcttgtgttgattgctcaactggtttttctggcctgtaggccgtcccagggctatgctctgcatgtcactgttatgccagttttaccataaaacatgtccagagcctgccaactaacttcctattggttccttgccacatggaaggtatctcaccttttcgtgactagggcaggtctggcaaggtcaggcatgtgctgtgtcagaattctacatcttgctgggtcttttctgcagtttgtcatggctgctgaagcagggggctgggtgagggtctggtcccttcagtagctcattagttcattaagtttcatgctaaaagtacagacatgtgtgactctttttacaggcttcatagtcagggattaacaggtttcagatctaacttcagatgttcagagttttaaatatcctgattgtcttctgaaaatgctcatgccttttaacctaaagccatagccttttgctatgacagcaagatgcaaatttgtgttgaagggaccaactccccatttcgtgttagctggtggtggtatgctttacggctctgcacacagcaatgacacacagagcatagcaaccaccctgagagggcctatgggccataaaaaccagttgaccaatcaacacaggacaaaccttccaagcctggaggcacaccaatcctgggcctgtgcatacacctagacactccccttaagatctgtatgcagctgcttcgaactgtcttttgtagccatctgccttggtggatggatgaaagaccagagctaacatagggttagctcattaaacaataaagcctcatgcagtttgcatcaagctttagactcagcctggtgattggggtgaccacagtcctgggctaagatcctggaagcctgagctttctggaggtcttacagtttcagttgtctcacagatatctgcaatttcctgggagaagttctgcttctgtatcaagaaatagggtctggtgaaaactaaaaagaccccacccatttctgagtatatcttgcaggttcactccccctgcctgggctaatttcaacctacagagggtcctccagaaaatgccagcacttgtaccagcacatgggactttgtcactggtagcacctctccaggcttaagtgaatggaaacctacccaacaactggaatctggttttcaaatatggcccaagaaagggcatatctgctctcgagtctcactcatttacccttgcttctttgtacaaccaggacacttctctgtctcttcattctcgcagttgtcaaccttcccatggttcatagtactaacagtaacaatacattttctcctagcaacctgctttctccacctcaaggaacagatgcctgaggtttcctggatggcattaactagatgcttctttacccacacctcctgctgatcatgaacccaccaacttctgactcccccatcccccacatcatcccttgtcagcagnnnnnnnnnnaagaagccagacatgaaccagcgtccatatacccaaagagtctggggtgttatggtggaagcttcaccccaatattctgtaatgggatgtctggtcccctaagaaagactttttcgcaaggtcaggtatttagacaaaagcccccatcttttcaggggcttaaagaaagttcctactttctaaaaaggcagacattcttatctttggcaagaggaatttgtagtcattcattaacatacgactggggcatattaacttgtcaaggccaatgctagcttcctcaattcctgttctcaagccacacctgagctcacatgccccttgtctcccatttaatcctatgtgcaactatacagtataaaaggtgcattcatctttcaataaatgcacaggcagccatccaggtcaccctcatatcatgtcagcattccccacctaactccacatttaatctttgggacctgaaccctgccaaagcaagtctctagcaatgtgtaattcaccacattagattaacaccctgactgaaactttcaaaaccattttggctattttttaaaaaatgtgtatgcatgtgtactctgtatagagatgtgtatatgtttacatgtgtgcatatatgttcttgtatgtggacactagaggttatcccattatttctccttagtttgttctttgagagtgggtctctcaataaactcaataaactcagaacttacagatttgctaagctacctggctagtgaactctgaggatctgactgccctgaatctccagtgttagtattacagatgtgcatggacatagcatacttctaatagattcaggcatctgaagttaagatcttatgcttgagtggcagggcagccacttacagactgaacctttttcacagctcttacctgcctaatctaaagggagagatttgtaggggtggaaaagctctcttcttcaccttcctaatcaatctcagcatctcttccatggtctctgttttgaaaaacttcactactataaccaagggtttaaacatgtgaccagggaaagtagcttgttgaacggggtgaaacttttcaccaaatctttatgttttgacacagtggacactagtgagggtgtcatgttatgttgggcgatgcttgcaactggactgaatgactgagaaaagaggctaggttttaccctaatctgcatgctcagtcagttcttttactcccgcttgtgaattccacatgagggtctgttcttgtgacagccagaggtacatgttaagttttaattgctatgcctaagagatccatgaaacagaaatgcctctgatcttcaagcctcttgcccaaggacagatacttcctgaaatgctggaggctattatttatgggagataacatgccacatgttttcactaccctaaataagatagtttgacccttggccaggcgttggtggtgcacgcctttaatcccagcactcggaaggcagaggcaggcgattctctgtgagttccaggccagcctggtctccaaagcgagtgccaggataggctccaaagctacacagagaaaccctgtctcgaaaaaccaaaccaaaccaaaacaaaacaaaaaaagatagtttgacccatctgcacctgatgtgcttgatcacatgtcagcaggagattcataggcaggaaatatattaggatgaactgttaccacccaggcaaacacaaacttggtccttattcataatgtgtacccttgccctgatttggatgtaggctgaaagtatgtttggatgtatgtatacccctgattggacatgatagaaaatacctaagatactgaaaactactattcaggccatttttctgggaaacaaggtatgaatttgaccaaagagcccatctacctggccagattttaattaaagcttgctttgaatttggctttaatttgtggtagtgatcttattctctactggtaggattaacagtctnnnnnnnnnnnnnnnnnnnnnnnnnnnnnnnnnttatgtgagaacattaaaaaatattgtgtgttcctcaatgaggaaaatatgctaaatatactttagataagcttggaaattcacatttgatgctaatcctataaacattggagaaccatatgaaaagaatttattagtgctgtaaactttgttacttcagtaagttaagttaatataacatgatgatacttctgagctttgcaaataagcaatctaatttagttaaagctatctaattaggaaataaaaacaattagcacattaattaaagtcttaattcacactaactttttaacttactaatactgcatcattcatactacccactgttattttgttttctatcccctgcccccatcctttcacatgtacacttgcttgatactttaaaatactaagtaattctatggttgtttagtaagcccaataaactgggagtttataaaaataaagtcttctattatatttaaatcattttataactgtaatttcagttatttctcaaatgactgaggaaaaatgaattccctttgtgtgtttcaaagaaagactagagatggggagtggtggcagtgggcatcgagctgaattaatagctcagcaattcagagcattgctgctcttgcagaggactcaagtttcagttctcagcacccatatggaggcttgcaacccactgtacttccagttccaggtgatcttagatcctttctggtctcagaaggtatcaatcacaaatgtggtacacagatatatattcaagcaaaatattcataaaataaataagtctttattaaataatttaatcttaaatatcagaatgcagatagatgtcaatatgatcaagcttatcttgtgttcagagacatttgtttcctatgtgtgtctttttgttaattcctttttgttcatttcttttttcctttattttacatactgatgacactttccccttcctcctactctcccattccctctcctccccacctcccatcaacattctccccatctcctcctcctgcataatctccattcagaaaagcctgcctaatatctttgtgatactgatgtagaccttggccacagaatttgccttgacctataaaccacaatcaagaaagatttggctaattcataggaaatatttaaaaaaaaatcctttgagtgccctctttcttcatgttccaaagactcagtgttatgatccattgtcacttccggggataatagaaagttgctcttagtctgcatttaggctgctcctgcagcctagcacctcagctccaagacttgtgagtattcaataagcaataactgtaacattgtttcttattttggagcatatgatattaaaagctgactaaaagcatatactttctcttatacttacagctttatgtcatttacatatttacttgacaagaaaatttgttaataataaagaataaacatctagggaaacaataacctaactccatggaagcattatataattcatataaaatactgatataaagaaatgataggcactccttaccagtctgcctgaaggtaggtgacagacatgcttccagggtgtgccctgactcctgccacccagtagacattgtcccaacaagacccataccaccacccaacttcatgtaccttaatattctccctgtggccaaccctcctgtgcaaccccagcagactacataggcacaggcacaaatgacactacttgcaaattcaggcacaggtcaaaacaacaacagttggaagatcaggcacaggcacaagccacaccatttggaataacagatgagtaaataccactgtaagaatatattcaacaactgaaagagcaatgtggcaccaccagaacccagtgatcctacaatagcaaaacttgaacattctaatgcaactgaaacacaagaaatcaaactttaatttatctaggtgataaaggctcttaaagaggaaatgaagaactcttttaaagaagtcaaggaaaagacaaaaaattagaagaaaataatgtagtccttaaagaaagaaaagaaaaaaacaattaaaaaggtgaatagaatggttcaagaattgaaagctgaaatagaaacaataaggaaaacataaactgtggaaattctagaaataaataaatctgggtacatgaacaggaacaacaaatgcaagcatcaccaacataatacaaaagatagaagacagaagctcaggcatttaagatacaatggaggaatacacaaaatatccaggaaatctgggataccatgaaaagactagacaagagaatactaggattcaaagaaggagaagaatccaaactcaaaggcacagaaaatatattcaacaaaatcttagaagagaactttcccaacctaaagaaggacatgtctataaacactaaacagaaaacatacagaataaagaaagcatttttaagagctacaaaggaaaaagattaaaaaaaatcctataaagggaaacccatgagaattataaaggatttctccatggagacttaatagtcagaaggtcctggacagacattttacagatcctatgggaccatgatgccagcacagactactatatccagcaaaattttcaatcaacatagccatagaaaacaaggtatttcatgacaataccagatttaaaagatacctatccagaaatccagtaccacgaaaatactagaaggaaaattccaaactaaggaactcagttacatccatgaaaacacaggcaaaggataatctcacaccagcaaaacccaaagaagggaaacatacacactactatcactatcacagaaaacaaaacaaaaaaataaaggaattgacaatcaatggactcagttcatcaataaaaaggcacaagctaacagaatggatatgaaaacagatctatccttcttctgaatacaagaaaacaatgcagagaatcaatgaaacaaagagttggttctctgagaatatcattaagatagacaaacccttattcaaactaccaaaaaggcatacagagaatatccaaattaacataataagaaagggaaaggggggcataacaatggaaattgagaaatttcagagaatcattaggtcatgcttcagaaaacctgtactccccaaaattggaaaatctaaaaggaatggacaactttcttgataggtatctcatcccaaaattaaatcaagaccagataaacaatttaaacacacataaaacgcccaaggaaagaaaaacagtcattaaaattctcccaacaaaaagaagcccagggctagatggtttcagcacagaactctatcaaaatttcaaagaagagctaatataaatagtcctcaaattcttctgcacaatagaaacagaatattgtcagtttctttctatgaggccacagttaccctgatacccaaaccaaacagatgcaacaaaaaaagagaattacagatcagtccctttcacgaacattgatacaaaaatactcaacaaaatactggcaaaccaaatccaaaagcataaccaaaaaataatcatccaccatgaacaagtagacttcattgaagagatgcaaggatggttcaacatataaacaaacttaaagaacaaaaccatatgattatctcattagacactgaaacatcttttgacaaaatccaacactccttcaaggtaaaatttatggagagaagaaggattaaaggaacctacctaaacatataaaggtaatatacagaaagccaacaaataacattaaatcaaacagagagaaagtcaaagttattccatgaaaatcaggtacaagacaagagtgtacactctctctgtatctattcattatagcatttgaggttccagctagagcaataagacaacaaaaggagatcaagtggatacaatttggaaaataagaaatcaaactttcactacttgtagatactttatgatagtatgcgttatgagcattcttccctccagcttgggcccagagtcacatcagccccaaatgaacatgcaagaattatattagctataatactgttgaccattggcttgcacttcttattagctagctctgtcttaattattaacttatttctattaatctaagtatttccccatggacttatcttactggagaaagggtccgggtctcttagtcctttgcatgctgcatcttgactgactctgcctatgtttccagaatcctccttatcttctagtcccacctatcattctgcctcattggccacagtgctttctttatttttcaaacaataagagaaacatatatacagatgacatcaccatcaagtatacataagtgacctcaaaaatcctactagggaattcctacatgtaaaaaaacaaaacaaaacaaacaaaaactccattaatgtggctggttacaagagtacctgaaaaaaatcagtagacctcccatatagaaatgctaaagtgactgagaaatcagagaaacaacactttttacaatagctacaaataatacaaaatgtcttggggtaactctaacaaaaccagtgaaagatctatatgacaagaattttaagtctctgaagaaagatattggagaagagatcaaaaaatggaaagatcagtcccatgctggtatcccaggcatcagtctggggaccaagagctccccgttgttcaggtcagctgtttctgtgggtttcaccagcctggtctggacccctgtgcacatcactcatccttctctgcaactagattcctgttgagttcagtggttagttgtgggtgtctgcttctacttccaccagctgctggatgaaggctataggatggcatataagtcagtcatcgatctcattatcaggggagggaatttaggccatgtcccaaagaatatgatagactctgatgaccccctatggaaggcctcaccctccctggggagcagaaaggatatgtgataggtagggtattattagttgggggtgtgtgtggtaggggaggagggaagggagtgggaactgggattgacatgtaaaacaatcttgtttctaattcaaataaaaaaataaagtataaaaaaagagaaaaatggaaagatctcccctgctcacaaatcagtaggattaacatagtaaaaatggcaattttaccaaaagcaatctacagattcagtacaatcctcatcaaataccaacacaattcttcacagacctcagaaaaacaatacttaacttcatgtggaaaaacaacaacaacaacaaaaaaaaaaccagaatagctaaaacaattctatataataaaggaacttcccaaggcatcactgtctctgacttcaagctctattggaaagctataataataaaaacagtttgatatattttcataaaaacagataggtggattcaaggaatagaatcaaagacactgacataaacccacacatttattaacacctgatttttgacaaagaagccaaaagtataaattggaaaaaagaaagtatcttcaataaatgttgctggcataactggatggcagcatgtagaaggttgcagatagatccatagctatgaccctgcacaaaactcaagtccaagtagatgaaagaccttaacataaatccagttacactgaagctgatagaagagaaagtgggaaatagccttgaatgcactggcagagcagactatccctgaatataacatcagtagcacagacgacagtgatggacaataaacaggacctcctgaagctgaaaatcttctctaagacaaaggatacattcaataagacacaaggcagactacagaatgggaaaagttcttcgccaaccccacatctgatagaggaccagtctccatcatatataaagaactcaagaaactagacatcgaattatcaaataattgtattaaaatggggtactggtttaaacagagaattctcaatagaagaatctggaatggctgaggtacactgaaagaagtgttcagtatccttcactaacagtgaaatacaaatcaaaataatcttgagataacctaatcttaaaactgtcacagtggccaagatcaaaaatactactgacagcataagttggagaggatatatggtggagtaaagggaacactcctccactattgatgggagtgcaaacttgtacagccaatttggaaatcagtatgaaaatttctcagaaaattgggaatcaatcaacctcatgatccagtgataccacttttttgcatatacccaaaatatgctccaccataccccaagggcacttgcttagctatgttcgaagtcacataattcataatagtcagaccctggaaacaacttagatgcccctcaaatgaagaatggataaagaaaatttagtatatccacacaatggattattactcagctgtaaaaaaacaactacattatgaaatttgcagacaaatggatggaactataaaacattatcttattgaggtaaaccatgcccagaaagacaaacatggtatgtacttgtagcatgataaataaaaagactcagacactgatattgggtttcaagcttcaagttgaagatcagaaaagtaaaacagccaccactagctcttactctacctcagactgaaaagtgatcctggctccaccaaatttcagactactattccgcactgctatgttctcctcaacacggctagagaattctgacacttactactgaagaccctgtacctatctagtgctaggattaaagggatgagctctgttactcttttagactgattccaccttgtatagccctgtgtggccttgaactaagagagatccatttgcttttctcttctgagtcttggaattaaaattgtgcactaccactgtctgatctctatagcttgaggcaagctttgagaaatcataaacaatatattatcacacatactccctataagtggatattagacatacagcaaaggaaaaacaggttataatcatcagccccagagaagctatgtaacaaggaggacccttagagggacacatggatctccctagaaagaggaagtagatttaaaataaaatacccagaagtgagaaaaatatatgcatagtacacaaatataaatagcttgtaaattgttttatatgcaaatcacatacatatatatgtatatatgcaaaactgtatatatatttggttagattatctgcattatagaacatttgaacaaataaagtagcataattaaatttggacaaaagacttgagtaaatacaaatgaaaggtaatatatgaatattgaggaaacacatgcaaaatgttgagcaccagtaatctttggagaaatgtcaatgaaaccatggtgagccctatcccacatccaccaggatagctgttacagaaaaagaaataaagaaaactataaacccactgaactttttataaaataaacaatgaatttatttcttagtacaaatacatgttaaatgtttaagaaaatagatacccaattactccaatcagattattatacaggatacacacatactgaattgtaacacctactaaatatatgctgatatgatcaataaaaactagaaagcagaataatgctaccaccaagcaggattgttcacagatggaagcagatccattttaatgatacccgggtacatgtaaaatgataaatcctgaaacttactgtggtagtttgaatataattgaccctcgtaatcttatatagagtggcactcttaggaggtgtgactttgttggagtgagtattgccttattgaagggagtgtgtcaactatgcagcaggctttgagatattttatgctcagatactacccagtgtcccagtccatttctgattgtcttctgataaagatgcagctagtaccatgtctgcctacatgctggcatgctccctgacatgatgataaaggactgaacctgtgaaactgtaagccagccaccccaattaaatgttttcttcataattgtcatggttgtgttgtctcttcactagaaaaatcaatttcataaagatcatagctctaaatgtaaatacaaaaataagatttcagaaatatatatattatatgacaataaatataatatatatttcatatatatatgtatatatatatttcaggattaatatgaaaatctcacatattgatagtaagtgtctgagtagctcaggaactctgagtaatacttgtattatattatccacaagcaaaatgcaagtaggtcctcatatattaatgcttacagcagtcaaaaggtagggactatccatatattcttcaaaggatgagtacataacaaaactcatacatttataggtacaatacaaagatacatacacacacatgcacacacacattttaatctttaatagaaataaaaatttttgtactttatacgacattggagaaatttggagcaattacgtcagacgatgaaagttgtcacctgagaataatcactacctacttctatataatctgctaaaagctacagaaaataaacacattctgagggcatagcataaatcagaaatgagcaggtgagaagaggaagcagggctgtttagtttctgttttgaataacagaattctgaaatagcattgataggaatacaacaccatggtgaatttaatgtcataaattttatgtgtgaaatcatcaaattgttaagttttgaatatgcataaaattcattgcacatgcaaaacaaaaagaagacaaatctatgaggtgatcaaagcatggttctagttatccattttgcaatattatattctggatactgtattaggcatggaatgatcttatccaatagcctactggtagcaggaacaagatagaggaattctgaagtgaatttaagaaatgaaaaaaaaaatactccaatgtcctgagcattaaagatggatctgcagatgcttgaaaaagaaatacaaagtttctattttttgagtattttttaataagtgtttgtgactgtgctgatgacaaaaatgtggaaataatggccactctgaggaggtctcagatggaagtgaggacacatgagaaaatgtgatacttataaggatagttgagggttgcgttctggggatgaaacccaggccagctcttttatttttaattttgagacatggtcccagtaagttgttcaggtcagctttgaacccattctgtagcccatgcaggccttgattttacactttgtcttcatctttatgaacagttgctatcataggcctacaccaccagttggatgatccttgctgttacgtggtaaagacattactgagtggtgttccgtcataactttcaatgggatggaggagtttggtatgatgagttggcctatttttgggtaaaatcacataaatatttaaggttgtattatagtttctcttagcttcagatagtgaaataaaggacagagagagagagagagagagagagagagagagagagagagagagagagaagaaactgaactccaaacaaaaaaggaaataggacttaaagtatgcaaacttctagtcatggtcatattgagaataatgttattggttagaacattaaagctatgatcaaaccaacattgaataatgatataggtctggttacatgagactgctgtcagtcatctattgtgggaaattaccaatacggagtcaggtagaaatataagggtatttaatagggaaaagctacctagccagctggtgtggtagaggtctgtacagcaagatgcaaagagaaaccgaaaccgaaaacgcagtcccactacgtcactctgaccacgccctcacaagcctggtcaggcacacctgtagccagcccctaagaaggcgtggctacagttttccttccattcatcaacaatggaaaaatggtccccaagatattttgagactttaatgaagggacactccctcccctgattactgccagacatgccaagcttcagggtagacctatgctctaccttgctggtgcaggtgcagctccacagagcagaaggtgcagtgaaggacagtaactgttaattctactatgctgagaaatacctagttaagtgcctttgtaggtatgtctgtgtagtgacatattatttatggttaattaaagcctacctgaagattcagaaagcagtcagccacaagctatagaaaccaagcacacacctttaatcctagcaaccagaagctaagagttggtggtacatacttttaatcctaggactcaggattaagaggcagacagatctctgtgagtccaaggccatcaagatctacacaagattaaatcagtctaaaagaaattatagtttgcacctttaatcccaggactcatgagaggtacataagtcagtatcaggattcagtataaggcattcattctccagacacactgaggacacattacagtctgagaggcttggtgagaatttttggagacaggataatcccattcagcctaacgtagaggtaagaagctagtggccagctgctttgctttcctgatattagcttgaagcttgaaccccaataccagtctctgggtcatttattttttgtgttacatgactgtgatggcatttccagagtggttaaccaagagggagaagccccatccaaatgtgaggagacctgctggaataaagcagaagacattcttcagtattggcatgtccctggccatccttggggcaatagtgtccacaaccctttcctaccacatcatagtctcagtacaatcccaaagcaatggttctagctaaccatggtctcaaacctcttaagtagcaagcaagaaaataaaaagaacatttcttcctcagtttagtctctctggtatctcaaagcattggaaaatttgactaggccaaggggctcagctatatgtgtacattgacatcttcctggctgtgctcagtgttagaactttgtgagcatggctctccccacctttattccaaaggatatcccacataaccttgggttgaaaatagctattgagccacatcagggaaattctccaagtttatgaccagcatagccaaccctactaccacagcaagaactcaagcctgagagacacaaaggcaggcagttgtgatccatgagagatgccatagagactaccagtcaccaaactataaagtagggctgcctgaagaacacaggcatggatacatgccagcatgccttcaaggagggtcatgtagttgagaagaggataaggttgccctgttagaaagtagacacccttgggtcagtgactgcccaccctctgcccccccgactctcccacacccatatgactttgtgctcctggttccttcagaacagggctgtcttctctatgctagtcacataagctcattatccaagagcacagaagaaagcaccaagcaggaactaagaacagtttctgcagcagagaatagaagatctggaagcttggcttcataggctcacaatcgcctttatggctccttttgacacttttgggctcctgggcttgtgatgggtttggctactttctggcattccttgagcaataggagtcttaaaggttgggtctgtgttattatttaggggccaggtatttcttttaatgtcgtaatagatttgcagatatgtgacaaggaggctttgtattggtcagtgactatagagatgatgtaggaaatgtagtgaagtcacaagaacaggtatttccaaaaggaggctatgttctgttcatggtggcctcactaggcattctacacccccagtctgtaattcccaatgccctgacacttgggctgatgtaatcatgtgtatgtctgtgggtatgctttcaagcttgcaaaggctggtgtgtgtgtgtgtgtgtgtgtgtgtgtgtgtgtgtgtgtgcatgtttaactgaagtgaggaagataatacctccttgtgatgttgttctgcagcagccacagtgagaaatgagtcagaatatacaacagacccatctaggagtttattagggaaaggggatgaaaggaggctgtggtaattaaccaaaaaaggaagtgaaaaggaggaagatgggcatatggagatggtctaaaagggaaactttgctaatgtgcacagagccttatgcagccatggacatagccaagcaaagcatgatgtagtgatctatggttgcagggctcctgagctggttaactatttacctgaaaggaagtggacacatcctgctggctggcagggacaggctgttataaatcagctatataaattgctaattccttttgggctccaggtattcccaggagactgcactgaggtacagaaatattagaggattttttttttcaaaagaaaaaaaaaaagagtaccagggttgagatacaacagggtgtaaactgaatagaagctataggtatgagttcaaatgacacttccatctatgtccaggtaagctactttggacaaattcttcaaagttgtgagttgcctttgaaatttacaattaagatgtaaaatatatcttaccggattactaaattgcatgattttatattatattaaactagggccaacacaatataacagtgagtaaacacaataaagacacatgtggccaagcctaacagcttgcctttggtctttccatcccttgtggttgaaggaacaaaagtgacccccataaattgttccatatatctacatgtcaatagtggtaagtatgtgtgcattagtgaacacacacacacacacacacacacacacacacacacacacacaattgtcaaaacatggtgaactatgccttggggaattgtgagagaggctccaggataaaggcagagggtcttccacctcaagtgcatgtccctggattgtttagacttgattcatgacacctatgacaaaaatttgcattcaatttataagacatattgattcctgttggatgtcaggaaaagctgacagaaaaccccaatctggtcagtgaaccatgaacctgggtatggccttctgccttgcttttgtgctttccctggtataatctatatcatgtgccaggcaactgtgtttaaatgggtctgtcctgacaaagttctgggaaagagctgctctgttaatatttagtatatgcttactggcatttacttacatatttttctgatcatgtttttctgaacccaaacaactgtccttggatcattgctttcctttttactgtcatgcataaaagtacattgaaattgaggtaagattgtccattgcattactctgtagtctaccccattcttttgggtcctcagttcccatgtccagaagacaagatccgcattggtcaacaatagtcaacacagaacaagcaaatctgtaataaactaaatttaaaagatgaacctagacatggagtactgctgggcatgcacaaggccctggataggtggccctcttggggcttggcaaattagacaggtagttatttccttttattgcactttgcattcttaacgtttcctacttctcattgggctaatcataatcctttcatttttccaaatattgaggtaagacagtttttaaaaatagaagcttaatttaataccaaataaagaatctaattatgtcctgaatcaaatcccaccaaataagaggactcatttatttcagaataattccattaatatggctgactaaacagaattctattgttgtatattctcaggaagattcatcaaatgtgattctattttatacataaaatagcaatataatatttgtcaaatactaattaccctaaaattattattaaagacagcaagctaagaagttgttaggagcagggatagacttcttcctgtttttttctgactctgaaaattataatgtttgttgattttgagaaaagctgtcaatgggaggaggaacaggcaatgtcctcacagatacctgaaaatgtaggtatatatgtatgacattgacaaagctgaaattaaagaaagtattctctatgttacttttctttcctctaaataagagatcaccactgacattggttcctagttaatgactgttcacacagtagatgctcaggaaccattcgctctcatgatcaacttgatacgtgccatcacatgacattttgggttttagaaatttatttgattgaaattttttctaatgaaaaccccccagcaagccacattccagtttctctggttgaatcatttcatctattgtgcataaaatatgtccttattgaaaatttaaaaaatatttgtttatactattttaaattaaagaaaatgtatcatttctctattttcttttactcctttgaacttctccaatgtctccttcctcctccataactatataaataaaaaataaatatataaatacaacctgctgagtaccttagtgtgtatgtttttaggattgaccagttggtattggataacaaattagaggacccatccttggggaaaactgattcttcttcttagcagtcactaattgctaatagcatgtcagctggtattactgttaggtcttgtttaggtagccatattattcagatttcctgggtgaagctctcctatctcatttctgagagatactatatcctaggagacttcttggacttctgatatttctagtgaagaacctactactgctactttcctaaactagtattattcctaactgttctctacatatttatccttataatggcaggtaaatcttaccctcataaaagaaactgcttctagcagcaaatagagaccattgcagtgaggcaccagacccttacccagccccctgctttagcagccatgataggctgcagaaaaaacatgtaggcctctgactcagcacatgtctgtacttgctggacctgccccagtcactaggaggccagatactctccccttgtcaaggaaccaatcacaagttagctggtgggctctggacatgcttttggtgctttatggttacagtgtcataacagtggcatgcacagtatagcaaccaccctgggagggcctctaggccatagcaaccagttgaccaatcaacacaagccaggttgtccaagtccaggagtgcaccagtcctgagactgtttcggacccctagacactccccttgctgtccccaataaatacgctgcctcacagccccttcaggtccttctcatgccaaacactgtgttggatggaagagggaaccaagataacacaattaactcattaaacaataaaagactatttgcttttgcatcagaatgggtctctcagtgatttgggagttcagaatttgggcacaaaagcagaaagtcacaactaatcaatatacagagaactgatgaggtgcctagccccaaatgattataacacacacacacacacacacacacacacacacacacacacaatatatatatatagtctcacaaaccctcgaacatctactaagtctcaaggaacattcttgccaaaattacaggtcggggacaatgaggtaaattccattgtccaaccagtgagatatagaaggttccttgctgccaagcctgacaacccatgtttgataccaggaagccacatggtaggagagaatcaattccccaaagctgtcttctgaccttcacatatactccatggcaaaaataaatgtgtaatatacaaatgcaaaataaatctacttaataaaaataaataaaggcctgtgacaggagtcagtatctgaacagtgacacaagactcatggagaaacatatatcacataaaacaggactattaaacctagaaacccagatctgactaaaggtatgaaatcactttatgaaactactttttgtaattttgataatgtttcttgaaagcatgggtgccaaaatgctttatattttctggctaccctgtaacttgcctttgaatttagctctgtttttgcaagattagttagtgaggtcttagttactatggcttaatcatcagatgtcagttgatacccacattgtcctttacctatttgttttgtattactttctgttcttgtgtgaaactggtctcaaggggagttcttggagcatgtaataattccattttgcttctggaaatgacttattttgacaggtatgcattccatgcttggtacctaccaatggtctgttctaaaacttgagagtattctgttgaaagaaaacacaagtactggccaaatgaagcatttgtcctatgggtaggaattatgaggcaaacaaacaggtgtgtgttctggtaagtggtaagagggaagcaacaccaacaacaaaaccatgctaacatggaaagggctgggtgaactaaacattgctcacattccagaaccagattcctcaccaccttcagtgactcagtgccaacagccccagcatcactaatgactaatgacacatttcccccataaccatattttacctatgagcatgctccacacctcctatacagccagccatcctagcctgccctattgctgtctccatccctgttcagaggcagccattttgggggcaccacccagtaaatatgttctgtggtatgatttttgttgtattccttggccacctattgccaagatactcttttgccataaaaccctttcactggggattgtattagttgacaactgagaaaaggttatgtaagtagtcaagaaaacaaaccctcaggtatatcacatggtgacatttgtttacaggtaggacaagagagtaagtagactagagacttccctttactcttcagcagtacaagctgttactcccttgtagtcaatcttcaaattagtaatgacagtgggattaatattttctcattgtcaggtgtaaaggaaactctacttccccaaattctgtccccttccatttccctctaccaaaggagttatttacttacttgtcagaatggacaaatggctacatgtgttgcctattagcatataaaggctcatgctggccccaggcttccacagatcaggaatacccttacagagacttcatgctggcaccctgactcttctcactccttcactcccctagacttcaccaactcatgtgcttccttcccttcctccagcttgtgcaggcaaaaaagaacagtaaaaaaaaatctcagttatactgatactctcaattttcatcgatacttggccatgcatgagacaaccaagttatagaatgactccctctctagaaaccactggatgcagagagcacttatttcctgactgttttcatgaatgtagacactagattttctcaggcatcaggcactctggcagcacaacatgctcctctttggattccttgggtatattactcttcctggccattcacacagctctcatgtacaaacctgacatgctgaagaacccagacttaatcttttctttgaatgccaagatataatgtctcaatttgtgcagaatactggctcatgcctttccctgttaatgacatttgtcctgccattgtcatatcctttagatttcaacttcccaggcaggagcaaagcctatgtaacaagaaagtaaaaagaaatgttatataaccatttgttacatttgaatctggcagtagcccaggtagatatcctaaccattttcaaactcagcactcaactgaattggagatcagaggatcctaggccaatgcctcttctgcttatccggagaacaaaaacgatgattggcatctcggcattttaaattcaaatgataacctcagtcacatattgaactccatatttttcagacatgattcatgcagagctttagtggaggagcatcaatattggtttcagtctagggagtcaggcgtgagagccatgtcactaaccagaggccttaaccagaatgatcatgtttgtatgcttacttgtttatatgaaagttattttataaaatgctgatgcttatgtattttacatgttagctatttaaaacactatcagtgaaatgcagtagtaaacattttaatatgaagtaaaacatgtacgtatagaaaacatggatagctcaacttctattgaaactaggttgttcttgtattggaccagaatgatttcaccagccctgtctctaagccttgtcaaggctggtagaatctataggtcaaaaacccttcctgactcagcaatgaggaagcaatgtggtagaaagagacaagaacacaaaggtaataattagaagtatttttgtcctgtaacaggcaccagagttacactttccaaagactagtttatgtagatttttgttggagcagaaactgccagagttgcaccatcactattagagacctcagctgcaagaccagaactgtcacagtacagtctaggggctgagagactaattgtaagtgatccatcgtagctgtaagatcagagttgaaacagtaaaatctagggtctaaatgatgagtgctaagtgatcacctagaataaataaatatatcttggtgaccagtactgtaggatagagatatcaagaattcagaagctgggtgacagaggaaaccacaggatattcacaattactatgagatagatttatcactatgtgtgccatcactagaaagttcatgagatcatggactcaccgttttgtgatctctctgctgtctttggacatgcttcctaggtcttactttatacattcagattgtggaaataaactaatgagtaaaggatttgaaaatgcaaaaaatatgaaaagtagagacattataaacatcccttcctattatatactatttgggttagactctttataagcagaaaagaattttagttatttacatttattattgttattgtcattattatcattattattatcattgtcattattgttattattgagacagggtttctgtatgtaacaacaattagaggctgtcctggaactcactctgtagaccaggctggcctctaattcacagagatctgcctgcctctgcctctcaagtgctgggattataattgtgtgccatgaccagctggctagttatttatatttattttcctgttgtctactttcccatgagtgtcagttgttcatatgtaaacccttggagattattacacttatttttgaaacatatatggcatttccttgttcaagaaggttagagaacaagatcacacagtaacatactgctggagccaaggttttttagtgtagcattccacttccaggcttttatttaagcactctcctttaatggcattatggttcttctcctttctgtccattacaaacacacctgttgtgtgtactcttgtatatgccttgtacatatcatttgtctctggaaaatatccaggaatgggatggctgatttacagtgcagcctacacttagctttaaagaaaacataaggtgttacttttctgaactcaatatgccattatgtactccaaccagtaacaaataagaaaaatctagcatcttgtcactgtttaatattggcagatactttctttcctaaatggaaagtatttgatggtgataggtgtatgtaggcctgaatgcctacacaactgtgttcacacatggctgtatatgagtgtttgtccatgtgtgcttttgttttcttgtataaaactattattgaagcataaaaaatcaaatgctggggaaggaagagcacactggtcatacacaatatattgcatctagatggttttaagtattaaaagcaaatatgcatatttattgcaagaagtatgctggttatagaaatacagaggataaatccaaagaacataaattagcaatgtagtttgaaagcaagctattgctgcacagtattttctgcaagtttcaatcatcatcactctaagtattcaggtgcatagggaattctgatcctgcccaaatccatataaatgaaatgcaatgattttaccatattcactttctacaattggagaggccaaggctatgaagttactggattattctagaatgccagcttccaggacacagatacgccatggctttaacatgtacccatgtaactttctatccacctgtcattttacctaccttaaacaacaaataaatatcttctgtgatgattactattgattgaaaaaacttgtcatgatctagaatgacctaaggaataagttatgagtgttgttttgaataattgtctagattagattaatttaagtaggactgtcctcataactatggacagcaccgtctcatggactgagctcccagactgaatgaaacgtagagagtgaactgaactgaccactatccttcaactttgcaccctgactgagggaggaatggaatcaacatctcacactcctgctgctgtgacgtctccactggcatgggccgatccttgaactcaaagtcaaataaaccatctcttttacattacaacagcaagagaggtaacaaatccatcctgcttttaattaaagcaatcctaaattttcatactgatttttaaggctctttaaaatcgtgtttcaggaggaaagtagctttcatttccttacatctccagatggcctcaaccagacctgctgccattccaagtgttcaattcccccaaatgatccattacaccctggggcatctaaaataaataaaggttaagagatcagagaagcgggaccatatgtccaaacatattccctgtaacttggcaatagtaatgtaagggtagagtcagattatactgtgcttgcaaagaaaaattcttaaacaaaggtaagcaggggaaagatggtgtcctctggaccaggaatgcaaacagcagttcccttaagggtggtgatgagaagaatgaccactctgctacctctctgtcacagcttttccctgtccaatagaaaattaaatcacagcatgactgggggttttgtcttcaaaggtttgggtttctcactgttgttcatactcagggttctattcctggatggccttcttgtcacagatacattgtttatatgaagttgcaccatagttgcacataacctttgtactatctcccttaaactctaaattgctataaggttactctccatgcctgacttaatctaacatccatggaaaatttccccatactatattgcttagttcttagatgagaaaaatagacaaaattatttttctatcttttattttacattttgttttgctatgtgttaaatataaattctaaagcatgccaggcaaatccttccccataattttgatacgtggttatttgattccacagatatgaaacttaccattacaaagtgataatcacttgtaaactcttattaggaaagcctcctttgttcactggtgttccaagcctccgttcaggagtttggagtcccagttccacattagacatctctgtttctatgtcttcgaatgatcatgtagtttcttcattttgtgcattagttagatcaatccactaaattataaactttttatagcaaaaaatattttctttcaccttttgttaatttgtttcactcacctgttgagactgtgtctatttgtggagtgcagcttgaatgaaggaaaacatagaacccactctggggctcattggtccctactgcagagaaaatatttgtatcaatgcactccacgaaggagtcttatagggctaaaattgataatgatatgaaacatatatcttcacttattggggttttcaagaaagaaggggagtgataaaagtcacatgaaaaccagaggactgtatccatgctctaggccttggagtttgatgttgtgtgttttcaggagacagtgtcagtttattttaggaatataatccaagtgcagagaatatcttgaactacttaaattcaaattttaacattctaatcaattatttttatgaatgaatcccatgacatttaaaatataaaaaagttttcttttttaaatatgtctaaaattgttccaagactggggcagattaatttgtgctttgaaaagccaacaccaccaccaccaccaccaactctagaaatgactatacttgtgtgtgtatgtgtgtgtatatgtgtggtgtgtgtgtgtgtgtgtgtgtgtgtgtgtgtgttaaatgtacttactcataggggtgtgtgcacctgtgcatgcatgtgcacagtgtgtgtgtatgtgtgtttgtacaagcctgcacatgtgcacatgcatacatgtgtttgaggtacatgtggaagccagagactgacatctctgacttgctgtcttgtcagttgtcctccaaatgttttgggggacagtaatgtactgaatctggatgtcattgatttggccatgctaatgggcccctgaactccagggtttcacttgtctttgcctcacaagagctgaggtacagactccgccactgcacccagctgggtgtctgaactagggtccccttgcttgctaagcaagaactccattgactgagccatcaaagctgttgaccacactgttgaagaacaattgcaacttccattccacagagtgtcaacagcatttgcatgatttgggggaacactgacgatgaagtagcagagtcagagctccactaatagaaaacttctactcacctcctcatcaagcacagtgaaggacctataatggaattgtcatgtatctgcaaattaataaacaaacactctacacactgatcttaacatgatttcttaacatgattccttaatcttttacttttctcttcaattagaaaataaaatggattgatcttagatagagccatggaaaataagaatgttatactcaataccctaacaccgactatgattatatacttcctgaataagaaaacacagttgccttaacagctatcatttttgtatgatcatactttttttctcagtatgtacaattgctattttattatgttcattacattaatttccagtgaggattactcatttcttcatttggaaatatgtcataggctctaagccttatatcactcatatatctcctaaaggggatgagtattgcagttagagaaaaataagcggtgagaatactcctagatttgggcatttgacctggctgtttttatagttttagtgattcagctcagtgaataaaaaggtttgtgactaaatttgaaatgctaagatactggggctcatggataaaaagttgaaagtgcaaatcctcaggaagattatgtgaattgtttgcctcatgcattggtctaaaaaataaatgagacactgcatatggcataacagtatgaggagtttagtaatccctcgagaaacttcagctagtgaaagtgaagactaagtaaacagtaattgcactgagctaaccaatacccagagtttggtcctggttcataaaatatcagtcatttgacttaaccaacaaacattggttttctgcattctgaaaactgagaggtacaagtcaaaggtctgagcagattctgtaccatacttcccatcctggttgtggatggatgccttcttgcaatatccttgcgcaatcagagagcctgtgtgtctttctgtttacatcaacattggtatgagtgctaactgggagagccactatgaagataccaatcagcatggaagttcctgagaaagcaagcattagctctgtcacaggatccagcttgaccttcattgcaatatgcataaaggacttgataatattacagttatacgtgctcacccatattcttcacctctgtagtcacaatagccaggatatgcagacaacctagatgtccacttataagatggtaacttttacaatgatgtattattcagttgttaagaaaaatgaaattcacaggcagatggataaagtcggaaacaatcattcagagtgcagtaactaatgtccagaaagatgaacaatccatgttgtctctcgtatgaatgttccttttcttcttaaataatagagttactatcatcacaaggactacacctaaggatcaaagccacccctattgacctcctgagatctgtatcctcaaatatcaccagattagaaaacaaggctttacccatatgtatctgtggtaaaaacacattcaaccgttgcatctggctttatccaaaatgtaaacatgccatcatttcttataagaccaacaggaagaaaccattgaaaggaaaattgcagtgggtccattgggtaagggttaatgttgtagactttctaataaaatctattgtaaatttggtaaataaaaacacatacattattgagttatgtgtttcacaacatgtgatgacttgggactttttagtgaaattcaaagtgtcaggcaagcagagctctctcatggcatttggtagttcctttttgctttagcaatgttagtattctagggcacaaatctgctctgtaaaatgtgttgcctcttgtttgaaacagggggcagatgactccactagaagacagatctagttaatgctcacacagctccacggtgtggcttatctgaagtgaatgtcaaaccatatgagatatgagcagcctgaattagaaatacaacatcaatggaacagaaatctgcttagaaacaaataattagaaagcatatgtgaagatccaaaagccgtgatttggagatgactaatgttttcctctaaccgttccagcactgacaataattttctgtttgcagaaacacccgctgaagagtccatttttagacagcttctagctccagtcattcccaaactatcaaagacacctcagtttgtaacttcaaaaaccatggatctagagaacttaactcttatctacctggatatgagatctacaagatccgataacaatccatatacactatactggtcataaatacaaaataacccaaacaaataatattctagcgtcatttatcaattgcaccaagttcaccattaccttcccaaagagcagtgccagcatacccttcagaggcagtcatcttcacaacccgtgccctgctaggtgtattctctgccaacagctaattatccctgtttcctaagggagagagtagccagacctgtgccaggacttaaccttctgtagtccatctgtatgtacaaagagctttattgacttcaagaattctatatgatttggtaactggcaatcaaaagctgttttcatcaaaatgcttcaagtgctcattgagcctacaaggtaaccaagattagagtgaaacgcttgtatgtaggccctagtttgagtctgcttatcttactttcaattgcatgtcagttgactctgcatgcagaagttaatcaccaagaatgtctatctacctatcctaccattgcactaatcccaaactgcctgaaattccaggaactgcaaaaccttgctggtagatatgaccaatgccacatgagaaaaatcattggtcctggagatgactcacttggggcatgccgaagatcatctttcaggaacaggaccagtggtccccctgaagcaaagcgaactagcagatttgtacctgaccactgtgcagtattctcatgtttatttcttttatttttatttgacaacttactatgtagcccaggctggcctttaacgcagtgatcctcctcctgcttcagagacccagagtgctgggattaaaggcataagtaaccacatatgactttggggctgcttaattatgcaaatttcttgtgaataaccccagatatttctctgtttaaacctacaacttacatcagtactggaaagcggagcctggctgcctctggactccctgtaccctcttttcagtgtacactgaggattgatttaggcaggagtctttggaacggaggctgagcctaactcattatggcaacagaagcacagactttttaccttactctggatacaagttgaatttcaaatttgaagtaaacatcaagccgaaaagacagaattttaagagaaataatgatgtgtgatgtagtgcatacaatttggtaaatttatctaatgatgattttaagtgaccaatactttaccaatttcttcctcaatgactttagattttattaaaattacagattttatttttctaaataactaacattgtgaaagcataatcaaaatcttattcctaatctggcagttttgagtggaacacacatgtttgtatgtgggtttctcagataagctgttccatataaagtattagatccaattgtgatgattaagacacaaaatcacactgcaaacaacactctatagcttctagttactgtactggactccatgtgtttgggactgtaatggaagagttgatgctctaaggcctatggtggtccatctgctaagtgcctgtgcagacattggattcccacattatttcataaacaataaaggctatactatgttcatgacatgtattgggtatcagaagttattcagagatgttttatgggagggccagtgatacagcatggcaggtaaagggactttctaacaagcctaacatgtaccatttctttggatccatatggtggaaggtgacaacagactgtcacaacttgtcctttgaccaccacatccacaataagatggtgtgtttgcacatgtgtgtgcatgtccacacacacacacacacattaaataaataaaatgtaataaaaatgaaacttgtgaaagactctttataggccatttatagaccatatggcatttatcataagggacagcgttagtggtctggacagatctcagttaaaggagcttgaacagcagcaggctatgcacattcaagtatgttcttagaaatgcccatttttgctaaaggcagtgaggggtaccatggctgcccttccctcacctgccacagtgattcagcaagcccatctgattccccaggtgtgaatgcaacaaacccagagctgtgatcatttccagaaggagactgtgtgggagagttgacaagtgcttagtctcccactagctgatgcaggaaaataaccctaacaaccagtcttggttgtccagatggcataaggaggcccagccctcccaggcacaaaactgagtgggtgtgtatgggagtgaaaaagaaaaacaaatgcatgataaagcatagacactcttgaaaattcattcattaagtttgatacaatgccttgaaaattattttaatttctttcctgtgggatcattaaatgagcagaattttctgtttcagtacctaagtggaaatctcatgagctgcatttaatatagagaggtaaaacttaaggtggcattcatatggatggtctattatcaagtaaaacagtctaatacaattatatctatcctgtgattacagcaatatcagactacttcttatctttaaactagaagtgacttaaaaaacaatgtgctatgaatgtctgttaactctgtttctcataattttctctaataattaatatacctatcaatatatgtaatccatatctaatgaatgcttcattttaaaagtgttgatttaaatacatgaagttttatatttagttattattaactgttaaaatttgtgtctcaaaggggttgaataaagtattggaatggaaaatatttcttaaagtcattctgagaagtaaataacttagaagtatataggagcacatgcacttacatcaggtttgaacagagtcaagaatgaaactctactgaaggcatgttattcttcaacagtttaaaaaggagaaaggcccagtcttcatgagtctacagacgtaagatcaattcttggggatatcccattttgtttgtgcaacttagtacatagttcttctctttactgcatagtaattcttcatggagctgggtagtaacactctccttatgacattgtggaaatagttattgaaaaaaatgtgtagtctgccacaggtaaagaggacatcaattctgaatacacttgtgttacctgtgaggtgtttatggaagaggttaagtgtgagaaaaggatggaggaataaacatatacattaaaatcagaaggttccagaaggcaatacttaatttgaaatgccaaatatgcatatttataatgctttcattcagtttgtgattttgcttcacgaaagtcttagattttgcaccaagaatctatcactcaatacactgaaaacactaggtgttagtttaaatgtggacctgagtaaaatactgagcttatcagagtcttcactctctaccacattttctgctatatcacatgacttttgttctgtcttaaattttttaaattacatatattgtgggcagattggggcatgcatgtgaagaccagagaacaacttgtgtatgcatgtttttttcaaagtcatttacccttccttctctgtgcatatcattgaagattactggcagtgtggcaatggtaagaaacattaggcaatcctctctgctgggaattttgtttctaaggaaatctacaaaacatgtaacagttaattttttaggagagtttggagtgggtcttcttggcatcatttatcaagagatgaaattacttcagggccaattatttctccaatgatttttataactaagtattaaaagggcatttaccccaaagatacatttggtaaatgatgttgtgagaatacttcctaaattttggtgacagcaaggtatagtatatagttaaaattgggcaactccttttaacgtgcttgtgtagaacatgcagaaggaatttactgcctttctgcagcttcccagcaaaaggcttactagtgaccctcagcactcagaccctcagacatggaggccctggttagtggtaacaatgagcaaatgattattgatgaaggatttcacaaattaaattactagagatatttattatgtgagattttataggtggattttaatcttacagtttttgtcagttttaattgttatatattttgaaagttatttcatgaatgaggcaacacatagcttagggtattttaatcatacactacttattccagtgtacatacagcatgctattggattatagcttttgatatatctatttgagattgacattatcttacatcaaaatgagatgattacatgaaacaccttcttaagtgttcttcttttgagtgtttttgatcagtaccatagcccatttttgtaactgggttgtttgttttcttgatttttagattttctgaatactgtgtatgttatagatattaaacctctgtcaggtgaatagttggcaaagatgtgctcacatcttcagcttcatcttcaagctgtggtctgttgttttaaagagcttttaagagtcataaaattgattccattagtctgttgtttttattatgtgagctacccaagtcctgcctacaaagtcaggcctataactggattcttttgattgttacaacagaaggcttctaaaacatagccatggggaaagtttcccatttatgcagcttctaatcataggatatatttgtgtatgcatgtatagattgatggatatagatttgaaaagcagatttatcttattctctctctctttctctctgtcactctatgtccctctctctctctctcttacacgctcgtgtgtgtgtgtgtgtgtgtgtgtgtgtgtgtgtgtgtgtatctgtatttgtgtatggcttgtgtgtattggtgtacacacaccaagagtctagaagaagttggatgccctcaagccagtgttgtaggtgattgtgttgtaataatttagcagaggaaagtatcttggcaagttggagccaaggggtgccacaaagtcatagcaagcaacagatatgtgagagggttataggggtgtgggcagaggtggcctatgagcaagagaggaagtcactcacgctttataagtggatatagcacatagggagagtgcacaactggtggatacagagtcacatcttggctggtgataatgatttgttccactgtcacttggtccctgagggaagtcagatgggaatgcctgaatgttaacatgtatgccacggtggtatatgggtattgggaactcaccttggttcctcagaagtaaaaaaaaaagtgttcttaaccaccgaggcatctcaatatcatcaagattttgagtgtaacagaaatagaagcaaggcaaaagaagattgttttagattatctcaattttcaagactttaatactcaagcttaaatgagaatattttagttggtttgaattgtcaaaaacaaagatcttcagtgtgaaaacagccttggttatcctatcgcaacgttttccccagtacaagatagttttaacagtgaagccatcagtaaatgtaagtcatgggacagggattgtttgataatgcacagctgacctttttttgatagccagccctgggagggagactgttctgtggagtgacacagacctgtgctgaagtcccctttcagtgacagtgttttcaaactgccaagaacaggcatattgtctctgtcttaagtctccttgtccccagagtgcatcatttcccaggcgataaagattcattatggcctgctctccttacccagctctgcaggtggctaatgctgctcttccagatggagcttgacaagcacagacatctcactggggcacctggcagcctccactctggcagccaggtttaccaagatcgaaatacagcaactaataatcctttctcatttttcaaactttgtattttgagctggttttaccttgttttacgtatttccttttcattagttttacccacagggggaaaaaatggctcttttcttggagctacttagcaggaattctactagtatcacagcaggaagcttaaattttccaatttaattcaaacagatagttattatgctcctcaaaataaaaataacaataattgaatttggacagtaaaattggtttctttaaaatatttagttctgagtgctttttgtagataaggggatgacttaacatattttcatgaagtataatttctaaaatcattctcctaatttgcttttggttacaggtaaaagctttgtgtttaacaacttatcatttataaccctgatttgtgtctcccacccaccaccccttcacttgcagctgtctctgaatataattataaaaaattagtttagggaaaactaccagacaaactacattccccaggtaatgatttccataatatttcaaattctggaaatttttttttattttttgcaagtaacatattcttctctcacgtttaagactgtctttgcaatttattttctgattctaataaatattttaaaatatgagacatcagcatggcaaacaaagcaatcgccgctgtttatgtcaagatactttagctgcttactttataaagaagagcaacatgttcttccatcatactcaatcacactctgtgtttgccactgtaatttctgtcttaatttggacaactgcaatgatttccagttggatagcgattacataggattcttttattcacccagttgtctgtctgtctatctatctatctatctatctgtctatctatctatctatctatctatctatctatctatctatcatatatctatctagagatgaggtttcaaatagttgaacttgtccttaagctcctcatgatttttctatctccatatcctgagtgttagcacatgctaccaggcatgtctgtaatcatggtttctcatttaaatatttcaactccaagtaaacactgaactgaaatcatttttcataattgttttactcactcaggatttaactccctagtaatttgatggagattcttacttgaccttcaaaacaaccctgtttttctgaagctcaattgaaggctttgcttctcgtttttcttatcagttgtttcccgctcaaatgctttacctttacaaaacctacagggtgtgaggtttgtagatctctggataccctactgtactccacagtgagacaccaacctatatattctgatttgttctcctactgtttgttgaacccaagaaactgaaagttttatacaagtcattcagcttgaaccagcagaagtgagactcatatgcatattttctgacatcaaatgttccatcagtttccatttacaggtggggtgtaaattctgatgagaaaaataataaagatagatacgaaagtataggtcagaaataacgccaagcaaggttaataatgttcactattttgtattcacatatgttttatcaagcacagattttaaatcttttattaagtggcaatatattttatgttgtgacacatattcatgtctgttttaaatcaacatgctaatatttattagtccatttaaagtgaaatgttagctgttacttcaatttgttttgggtacattggaatataagttcttttatgaagaaatctctttccccattataaaacatgattaaaattttattttatctacttctggactttaatttagaaaaggcacaactcatatatgctaagaccccaagtgttttaatacccacccccagtaaagtagatttgatggattattattttacaggaaagccaacccgcaaatgacttgcaataaaagcagaagcaagtagaccatcttctgtaaaatatagaatgttcagctcaaagacattttgatacatttgtattctgtaatcttaaatacatttaggataaacataggagatttatacttattttaatttattactttttaaagatttatttattaattttgcgtacagtgttctgcttgcatgtatgcctacaggatagaagagagcactagatctcattacagatgattttgagcctctatgtggtttctgggaattgaactcaggacctttggacaaatagctcatactcttaacctctgacactatgactgaggttattagaatgagtatttattatttcaggtagaagtctctgtactttttcctctttactcctcacatttgctcttaaaagctttctttccattcttctcatcccacctgaaaatatagccatcataccaagatacaaagaatgtcaattcaaagttttcatctcatcagacccagtacagctcttgtgttgtgaaatattaatttaagatgtgttgcattcagttatgctgtgggaaaatttgtttaatgatgcaatgtgttccattcttttatgttgcaattctttaactttttaaagctgttactttgcctacctaaaacacttgattggtctaataaagagctgaatggccaatagttatgaaggagaggggcaggcggggctggcaggcagaaagaataaataggaggagaaatctagggaagagagtgaggaatgagtaaaggagaggtcgatgccaagaaatagctacctagccacacagctagccatggagtaagaagggcagaaagatatacagaataaagaaagttaaaaatcccagaggcaaatatagttaaagagaaatgggaaagctggctagaaataagtcaagctacggctaaggattcatatgtaacaataagtctccatgcatttatttgagatctgagtggcagacccccaaagagttacaaaatgaattacactccactcctccttttctaataagagttaaacatcccctttacaaaacttcttcactattctttcaggctctcttgctgcagtctttctttggcctctcccctctgtaatcattcttcattattcttctttcagattctgtcactgctctttctttggaccctccctctaatacattgcctttcctttgtaacctgaaagatgcatggaatcttcagtgttctgtcttcattcaaactgtcttcctggcatttaggttttatcagcaaatacttccaaattttatctctagacaactcagttttcttacttcagttcatatttcctatggctcaatatgccccatgggattgcatgactccaaaacattatagttctgtcatcttcaccatgtgacagccttatctgaaagtgagctccttgaatcccatcacacatctgctcctttgttatcctcccaatctcagtaggaaggaattacctttttagttgccaaggcaacccctgcattactctttcttgggcttaaatcctttcattttattataagtcttatataatccatcaacaaacactaaaacttcaattaaagagtgacactcatccaaaaaatttccaatcattttcattattttttctacatctatggctcatgttctagttcttatgctaatatgaatgaaatatttttgattgaactctccttacgtttgaagaagtggatacaacaatttgagggagttttctgaattcactagtgcacattaacatatcttcgtatacttctaataaaataagataaaatcagtttaaaagtcccagttatatttagatcaagattagtgttaggatgaagactttgcatatatgtatttgattcagaaatttattctaagccctagtgtacattcatagagcaaaatctgactccagttaattatatcttagcagtagatatcattagtgcatccattacaatccctcaaatgctcccttacagccatatagggcagctggtgagttcattgacatcttccaagctcagtggtccataggccattgcactgtcttgatccttctctgcctctgggttatcatgagcattattggaatctgctcaggcctgtgctgcacgttgccaagtgttagttgctctaaagttagtctttatatactgacaactgatggaaacaatcataattcatgaatctgtgactgttgtgatgtatagtcaccaggggcttctcttacttgtcagcaaatgctggatttcagttgttgcaaatagcacagggttttttaaaaattcaatttgttttagaagtggttgctgaaataactctgatgcaactgagtatggtcttcaaaggaaacatttcatgggagggaagagaatatacattattgttttattattctgatattttagttgaagaccagagtcataatgtctacacagaacagacaatacagcatttgcatgcaactgaaatacattttcttaaaacgcaaatgtttctatttctccaaaacttcacaatcaagatgatttgggcaactttaagtaagatagcataaaaaagcatgagtgatttccaaactgaaattaataaatgtggctcagtctcagagtaataccacatatatttgatttcaaaatttgggagattgagacataaaggttaagaattcaaggctgttcttgactattcagtgagtgttaggctagctacaggagaacctgctaacctgggctacatgagaatctaagtcaagaagaaaggataaatacataaattaaagtccacatagagttatggctcactgtgttggcagtactggctcatttgaggaatttattgtctactattctaatccttaaatttagtgtaagtcgattcttttgaaaaaaactaaaatcaattttgtttactgtttttaaagttcataaggatacactgctacctaaatatctttggtcatcttcattcaatacaaatatataagccaaaatattacccctacatataatgttaaatttactattaattgcccattagaaggaaataaaagaaaaagctaattttactgatatagtttatttcattcattttaaatgttctcattttaagatgcaaccaaattagttattaatgaaacagttggtacattttatgctgaagtctgtcaatatttattgtatcttattttcatgacgttatgttgatcgaaggattctgtcccggcaagtatctgcctatatggggcaatacaaattggggtaatattatattgataaggacatgggctaggcccatatattttttcagtaattttctagctattagctattttatgaaatatttctaagttgctttccatgttgagttctttaatatgctcactgtcttctagttgccaacatgaggacattgattcttaattctcaattcaggatagatgggtttctatttgtggaagcctagttatatttttatattctattattaaattgtgaggcattgaggagctagactataacatctgttacagctcatttctgagaatttatgtggttttgggtgagaatcttcaaagttctaagaacaaagagcagcacactttcagtacaaaagcatgcatgtatgtgttagtgttttgtttttgtttattgcaaggacctgattatgtcatccttgacagtaaatattttctgaccaaagggaaaagtttggaatggaaaaatggctcagcagtcaagagcactgcttgctcttccaaaggacccaagttcaatttttcagtacacatatagtggcttacaatctttgtgactcccattccagggcctctgatgttatcttctgtccctacaggtaccaggaacacaaatggtacacagacatccattcaagaaaaatactcttatacgtgaaataaaatttaaaaatgtaaaagggaaagaccacccatacaaacatatgtttatgcatgagaaacagaacaaaaaggaatggtggggaatgagaggagggaaatatatcatttaaaacaattcctacaaaagaggatagagtgaagagaagaatgtgaaaatccattattgttaactgtgttggagaggtctgagaacaagaggggactcagtcacctggaagacccttctctgggaaagttactccactcgtttttgttcccactgcatggatcactgcagtctttgaatgatacaattgggggctgtgacacacagatatagggggactttccacttatttccacatgttagcttagtgttaggtatctttaaaacaacttatttttatttactgtatggatgttctatttcagtatacatatgatacagtatacagcacttgcacacttggtagccccataaatcaaagagggcatcagataacatggaattggagttacatacagttgtgaggcacccctcaagttctggggtcataacttgggtgctttgcaatagcaaaaagtacttttaacccctaagccacttttctagccccaatcttagatatcctaaatagcaaaacaatattaagagttatattcagaatttacctctaaaatgcttgactaattgttttaacttttcagttatttgaaaagcatgattattgtgggaagaattgactctgacagagcacttgtctataaagtgcatcaggttgagtctgtctttccaagggccaccactggaagagaggacactgagcactgctataaaggaccttgtatcctcagattgtttgcttccttcgagtgtcactaatggagattctcaaaaatctctacagcatatgtgaacagaaacatcttctgaaaggactgtgggtctgctcttcccaggcaatacataccagacataccagctaagaagatggatgaaacctgaagcaattaaggtgctcaactagaattaacatagaatcataggactcttgtatggcagtcagtcatgaggacagaacatggtaggctaagaccagtgttatcatgtctcaggtaaaagatgtcaggttttgaggactacttacttaaatcttccaaataagaaaaatcagaaagccataccagcttctaaatcacaacacacaaaaaaagaaagacaaaagaatgataaagactgttgtttaaagggaataatattgttaataaaacaagttttgccttttctttaaaatttttacttttatttataagtgtgtgtgtgtgtgtgtgtgtgtgtgtgtgtgtgtgtgtgtgtgtgttagtttgtgtctgtatgaatgtgtatgtgcttggatacagttgcctgtagaagcccgaaacattgtcagatatcctggagctggagttgcagatgattgtgaccagctgacactgatgctgggacccaagctcaatcactatgcaaatatttcaccctaatttccctctttcagcctcatgttacaacctcttacagtgtgctatggcagaacactgccagtaagaattcatttgcagtgtaattttttattaccaacagtctaatgaggtctccatacacatcatatttaaggctgtgtgatttttgttcctagggatagtatggcattgtttaaagaacacctaatgctatttgtatttgaaacatgggttctgccaatcattgtcactcataaaaaaatgaagagagcctgggagatggatctgtggttaagagaaaaggcagctcatccagaagaacccggcttggattcttagcacccaaacagctgttcaaaactccattcccctagtcagctgatatcttcttctgataaccatggacactgaatgtgttttgtgtaccggcatccacataggcaaagtactcatatgtaaaacaataaaaataagtatggagagatgctctctcaacttggatacactggggagggcctaggccctgtcccagttgaagtgacagactttggtgatccccatgggaggcctcaccctccctggggcatggataggggttggtagggagcatgggaggagggaaggcagagggaattgagattggtatgtaaaatgagattgtttttaatttaaaaaatttattaaaaatgagtaaatttaaaaaataagagtaaaaataaaacaagtattgttaaataacttataaagctattatttatggaataaaataaacatctgcctttgtagcaatgagtatagtcatattaataagaatttatatacttttctctaagtatcaagactaggtgcaaggaatcatgggaggcacagatttgtatagatgtgccacacagttcaaaatgaagcctatgcaaaatgaaagtggaggaacaactattatcagttagtatatgggttagtttttctttttatagaagaagaaacagaaatgcagttgaagcaagacaaattgatagtgatttgaaatgagaaagagagagacagagagacagagacagagagagaatgtactgtgtttatatgctaaaacatgaagaaatgaattagagaaagatggtagaatacatacttagggacaatgaattgaagggaataaatggatatgaatttccttataaataatgtttatatcagttggctaatgctacatgatgaattaatttaaatgtgatgactgaaaacaaaagtggcatcatgacatctgacattttgtatctgtcttcccttcctaatcagcatcatgattgtggggaccaccactcacttccctaaggtctacctcagggctggctcactgcagcttttgtttcattctatctatccatcatgacacaccatataaatcaaacccagtggcaggaagcacattttagtccttaaccaggaacaactgggaagtaccatgtcaaaaggtagcagagtgcaaagaatcagagacaggattaccatctaacaagctgtaaaatacatagcagaaagttctatagtagatgtatttttttaaaaaaattcaccagcatcaaagcttaaattctattttgctggcaagagggagttattaaaagtttagatggcaagatggttcaatatagtcttttgtctcattttttaccatatcctttgtcctgtgcattttatagaacacgtgtggctttcttaaaaatgtatttctctgtattgacatgatgtaaatattgctgtatttttgtcctcaagttaaaattctgcttatcacattgagattttaaagtctaaattaagctatttttcatcatttagcttctgaacagcacacttagaaatttaattttatttagttttatgctcagaatttcacttacacatttatgggatggtaccttcctcctcactcaactactgtattctctcactttgtttttatgtctagtttaataagacagaaattgtaggtagacctgtagccagcccctaagcaggcgtggctacaggttcccctaccagaaatattttctgttgttcctaatgtcttccagaggcctaactaggcctgttgcctattcacttaacacgttttaaaaatttcattcaattatttatttatattttgtgcatatgtgaattgtgtgtacctgagtgtaagcattatacaacatgtactcataaagccctcagcttatgctatagaggccataagagagtgatagttctcttggaactggagtcacagcagctgtgagtgctggagatgcctgacactgaaatcacatcctctgcaagagtagcaagtgctacccacacctgcacctgtgtctgcacctgcccctgcactgcacttgctaggctatgtctctagccccttaacacattccaaagaattgttctatgttaactttacagttgtaggtaaccaaaatcagatgaaggaaattaagacctgtttgaaacagagcactcctttgtgtaatgatatctttctgcttttaggcatttcacttggctttgcatatatgcttgggctaggtgtttatttttagtcatctttctatgttaagatatttcaatcaaaaagaaatttagacagaggtgatttacaggtgctaaaattgctgaagacacaaacatcaggaaagaacacaattaactcttaggtttacctttagagctcaaagtgaagggattctaagtaactccctacacacttctggcactgtacagtatccctgggactgcatcagtgcctgcttcagtaggaggggcttcggcagtgcctccctctcaggtaaggttctgtttgctgtcatctactgctcagggcctgacaggtgttgaaggaattgcactgttggacttccaggctttctgatttccatgggaacacaggaatggggaactggactaactctaggtcccaagccagaacagccctaggcaacaatatttttcagtaatgagtgaaacactgaaattccatcttcatatgatctgggagaaaaacagttgcattctaatacttttctttcttacacccaattaagagtttcacattgcatgactagtttcacattgctagtgccaggaaaggacacatctacttagtttctctctttttttctttcttcctgtttcctttccttccacaacatccctccttctcttcccttctcatcttttcttcccctctattcctattctctcctccatgtttcttttcttctcccccctcttctctttgcttcattaatattttatcaggatctcaagagagtgtagttctctttggtgattaaaaaaacacggtacttattttgtcaaagtacagccatctgttaaacattttctgtataccaaacttcaaatgtaatcacttctgtatatgtcactgtgtatacacagatgtagttatagatatgttctatcctgtctccctacacctcttctaaaagttaggtatgatccaatttataagtgaagaaactctgaggctcataaaaattaatataatagctggagtttcccaagtggcaaaataaaagagacacagtccaattttaacttcttcataaactataatcttttcatttgccatttaaaccccaaaacatatagaaaagacaatagtttttagaaaatagtccactcctattaaacatttatatttttttaaaatctggaacccactctctgtcctaggaaagatagattagcatcagcaccattgtagactgatttgttgatagaaatagatcagcctctaagttttcacatctctggccattcatatttcctccattgctcatatgtacacaggattggatggacactgccattaaaacttactccagaacattcattttgaattttttccgattcaaaggtattctcccgatcattaaaaggtattgagaagttttgtaaaattgaatgtaattatttctgataaaaaaaactttctaagtatgtgcatacacacatgcgcctctagtcagaagacaactatggaagtcagttgtctccctctaacatatgatttctagagagttaacccaggtcatcagactcagctgcaagcaccttactttcctcagccatctagctgggccttatcaatattcttctgtttcaatagtcctttgcacataatttccatatatgtaactagagttcctatatactggttatatgtcatatcttgcatgacaaaattgaatacccttacattaactgtagtgattgtatgtagacaacttacagctgtgtcccatcacgctccaaaagttttttgttccataaagcctaggcactctgtcatggcaaccccatgatgtcatcaccactctgttcttcttctcccttctccttctttaggtaaaccccactttgtttccagacttaagaagtccaattaagaagcattcatttccccaaggtagcctccatgaataggatggcagttaaactaagaccaacttcaatgactacacctttccccctctacaacaaacagagggagataaacactgacagggtttactgaccacctgcatggttcaaaacatttcacatcaacagaatagtaacttggggaagaattctctatgaattgacctagatagacaattttatatttttgtgtaatatatatctaataaaatagatcaaggcacaatttttataaaacaatcttcaaatatagttaaaaaataactatgttttacaaagagcaaaatatgtataactttagcataactcctacaagttaattgcaattttagtggtataaatttgtgcatgggactcccttttccctccttggcaattaggcattgcagttcctatctgttattgatgcatatctgtggaagaatactgtggtttccccaaatcactgatacattctgatattcactctgggcatttccatgtattttcctttgagtttaatatttcaggtatgaattatatactgtgaacatgttcacaagtaacaatggtattcacatataaacagaacatacaattaacaaatacatgtgaatggtttctttcaacaatgttgtacaattttcaaaagtgttactaatgaaatttaaatttctccagttttaaaactcagagcaccttgcactcctattctcagccactgtacctccagctacatgcatgcagtaatgcccagtttttttttttcattatgtaatgagcaatactgccaattctgaaaatctataacctcagagcccctggccccctccataatggaaggaactctgcctcttgggcctgtgccaatgactactggagacagttgtgtaagttattgaggaaagtgttttattctcagtggctgaacttaggaccccttttaatatgtgtcacctcttataatggcttagttggtgtgttagatgaactgtcaatgagtcccctgaatgtttttagtggttgcagagacagatgacatgcaagtccatgaatgactcagactttatttaatgtgacactgtaacccaagctcatcagactcatcaattctaattcacttatgcctctttggaatgttcagtccaattcatctgtttagattgttttcattctactaagatgtgcttttcaataagtcagtaacaagaatgacatgacaagagtgcattgtactctgtcaagtcaggatcctcagattccctgttcagtggctggacctccacatccctattctcaactcagcttaataagacatcaagaaaagcctcttatcagaatttggagttctgcttgaatccattaattgaatacatttgggttgacacctgaggtagtgtacaaggtcacagttggtcaagacacatcttattttcattgttaatatgtctaatgtaaatttaaattctgtcttcacacatgtgtaagtgagcattatatttcctctcaccctacagcagttgtgttgtgttctgatgctcttctttttttcttaaatttacaagcaccataaatcatttatctattcccctgctaagttgaaccaaggtgtcaggatacaatttaatgttcataggcatttcagaagtagaaatataatatggagtttgatttattaaaatgttcatgcttaaacaaaacaaaatgatacatagaaaataacacctttccatgggtttatatatcgctagaatatggatttctgaactttatttaactttactttgtttctataatatattctgaaatcattcttacaactggcccagttatgatgactatctaaaagtctttccaatgtttcaatgaaatgatgtgttaattcacgggaaaattaggttaatacccccatgatttggagagtcctgtcagaaacattctgtcaccttctctgtcctttctccttcaggtttcctatttacttacctattgctttctttttaaatattaaatatcatggttgcttttcttgacagatttaattgatggataccttgtgtagttagggtttttaatcaacagaattgttataatttaacagaattcatgaaagtttggagaatataaactctccagaatttgcacgtggctgtaggactaaggttaaacacctgaatcaattgtcatcttacactgtcctatagaacagctcacaagcttggtcaactcctcacttctattctgcctttgaagattctgaacttgtagaatatacttggaaaagaacctctcacattttaaatcagtttaataattagagaatggaaacctttaattagtttgatatgatacatattttataaacaataattcattttcaattaacatttaaaacttctgagttatcagtattagatatgtgtttattcatgtattataaatagtgtaggagtcccacttttaaggaccattactaagtcacacaatgaatattttcacaatagacaagtgtaattaatatctggtgatatgtgttgttgggtgccatgcaaacaaggcagcactcatgaacaaaaagcacttgacatccttgtgtaggaaatgcctggctcattctagttggcaaggctacctctcccttcaggtgacctcctgctcacttaacataatcattatcttcaatctgaaacaagctaacaggtacaacatccacttgccagaaagccagacactagtgagcacattgcatgacttgagacttcagaatgttcccctgctatcagcagctatctggggctacccattttacctgccatgcttatgcaaaccaaaaaccaaagtaaaatcattgtgtgccactttgactacaatatttctgtaatatcttcgtgcttactttttttcaaactaagtatttttacttcaaacacaaagtgccacttgatttgagcacatattaatcttgagcttacaggggtagtcccttgaaagtgtagctgctgagacaacacacatggctttccttctaagggtttccaggcaacatttttttcatttgcaacaaaatgtattaaagagaaaataacagccgtacctgttttttgaatcagggtccaaatcacactctccaaaaaggcagtggttgatgcaaagtaatccttttgtggtagtcatgcagaaatgatgcttagtggaacttgaatggcattaaactgcaatcttctaaaaatacctgttaagaaagtgttgcaaatgtgaataaaaaagactcctctaaaatgttttcatttatcccaagcccattattaaatattataagccatggctctatttaatgataacttgaaatctcaatatttactcctatacacaattgatgatgctggtttttatttgaagtattcattgaattgaaatttcttacatgattacaatagttaaagaaccattcaccacatcacttcatatctgtgttttaataattctccagtttttaagagatactttatatttaatgctattctaagtatttgtgaaattttattttgtattttatttaaggaattgaaaatctaagaagtagttgtctttttaaactatttgaaccactatgtcattggttctctggtgtgctgaaaggaatttacatgtttgaggatgtctctattttgtgtaatttaagtgacattcattgtttagtgaaattctctaaaaatgaaatggtttgggtttatataacatgttttcatagatccattgaagtgtttcaagatctggaatcaacagccatggggaattgatgtactagtttgaactcaaatattagcagcccagagacacagggttaacattactgatttaagttaatgagaaaacatgctccagtttgaaggctgtcatccaggaggaatccacacctcattcagaggagtgtcaacctttgtgttgtcccaagacatctgctttcaactgatcagctatggcccaccttggggtggtatcttacttgtacaaataaagcttgtctgaatatcagagattgtagcttgcctctagctaaccatagaggtctggaggtctatacaggcagacaggaagtgagatggctgggaagagagagaggatataacctggaagaaacaggaactcactccctattgctgagaccctaggagataaggtggcttgctcctccttctctctgatctctcagcattttcctctatatctgactctgggattttattatttagatcaattaacaactcctatttacaccacctatattaaagaggactgctttgttcattcaactgattaacatattaacatatctacaaacacttgcaatgtcacattcagaactatcaaaaatctaagaccctccaagtagacacacgttaaccaacatgtattcttactgttgtgcactccttagactcgccacaaaatgatttacataaaatgtaaccatgttccattgtaggtaattttcatggctcatttcacttttacatgtagaattcattcatttctccttgatacattgcatactacttgacctatttgtccttcactcccacccatatggtagtacattcttaagtgctgccttcttgaattcttacttcccttttttcctagatggttcagaccctccacataacatgaaaggttgcatattgatgcacctttccttgggagttatctaagtgatacgaaattgcctaagtgcaatacatgcctaagtgcagccaggaggcaggtggtcttcctctcctgacccttctggaagacaatagtcatagtcatcagctcctcttcctgttccatttctttcctgtgtgtatgagcctgccatcttcccacaactgtgagccataggtcttatagccctctcagacttcttattcttcctctgtttaattattttccaaatcatgctgacttaaccgctgtcaatctcagatctattcctactccattcctatcactactgtggtttaggtgggcattttcatgattgccattaaatcagtcacactgcatccagaatgacagtgcagaaagcaaatcagaaaacaggagaaagggttctgatacttccttgtataaacttttattcatatactcgtgaagcaaattcattttaatatatttcttgattctccattgtatcatatgccctatactatatatagaaaacttaaaattaaagatggcaagaatgctgggcataattattttttgactcggtgagaaagtagtacctgcacccagtcagttctaacattgtgttctgtaactgtagtcctattaagtggtatgacattacaggacaccttccaggctactactgagtcaacaaagaagacattctacaaaagcaaattctaaacagaaaaaaagaagcaaaccaatgtatatatggttatagttatatacatagagatgaactaagtttcatgttcatgaatattgtctgatgctttaacccccaaatgatatgacagactttggaaggtcctccatggagactaacaatttaaaaaaatctttgaaatcaatgctaattataatattagtttccagatttatgttaagtgatcacagcttgcagaacagattaagctattagggcagatacaaagaagcccactatgatttagtagataggcaatgtttgctttcagagggaatactacacctaggggattacagagtggtggtgttatggtctggaatgacccaacacactccctctctctatagaaacagggcctataatctatgatttatgaatggtgaccattgatcacagactgagtatgggactattcagatatacaactgatgtcaaatgttctcatctatctttgcaaagacattaagtgttgattgtccatggttaaccatctctgatgtgcagttagtttttaatgacaccaggtggaccatattgatttcagattaactacctccactcatatgatttctttccatcctgttgccacctgtttggtaccaaacccactcaactgtggaaattgacagctggttcttcagtggggactgatgggagcagaagtcaggtgaaaatggctcattagcaatgaaacggaaaaatctgcagacttccctgaggatatcttgggtgatgtgtatgtctcctaaattgcccaatggagagttaattataaaaataaaatagcaattttcaatagttttataggttcctatgatgtggtaacatactatttaatatgccaatttatgtttcttttaggtgagatttccatcttgatatgaattttaaaataacggctgaagataaattctctgatagtttggctttcagagggtggttcaagaggaagtaacccagactggcaagtgggcttgtggcactctagtcactcacacactgtatgaagtcccacagttcctttaactctagtcttcaacaatatatcaagagaatagaaattgaagcccatgacaatttgattatgcttgtagacttatttcaatgtcctgtttaaactgcttaagcctcttttgtcctagaatgcttaaattatcaatagttataaagctttatgcttggaattattattattattttgcacagttatttctgttatttaatgtggtgacacacacacaaacacactttttagtaacctagtggtcatagaatatttcctattcttcaaattacagagataaattatgtgtaaataataaatgttattgttaggtgtgtgtgtagtggtgcatatctgaaatcctagcactctggtttggcctaagtttgaatccaacctggactatatagtgaattccaggttagcaaggatactgagtgagagactgactaagagggcaaacaaacaatcaaaaatcaaatttcatacaaatcataaccatactaacagcatactgaacaaagcttcatacatgcaaaaacaatcaaacaaaaacagtggctcaggtatggtggccttctcttcagaccatggctatcagagcacattcttatattagaaactggtaaaagaacaagcctgaatcagaccagcaaaggtctgaaaataaacttttctaaagtctctctggttctgttcttgactcctctctcatggatttgtactgccttctgaacttgtccattgcccggtggcccagggtgttgccactagtgacagtcactattagatagaattctattctacttcaagatgagtagaatttcctcctataatcctgcttgacatcctctaagggaggagggaacagagggctgtctgcagtggatgccccagccaagaatgaacatgttgttgaatcattttatttcataatacaatgaaatccagaccatcctcgtttactgccatgtgtcacaagtttactacatgtaacttctctctgcaaaaaaaaaaatacaaaaaaaccttttatctctgtaaatccaatgtcacagaacaaacctgccttttggaccagcaaatcccttcaggagagcgggagcaggttgcaatggggtttagcagactttgttctctgtaaagtgcaagtctgtgaggggcatcagggctggaaaggtgtttcctgccttccctccataggcaccacagctgttagcacttctggtgtcaaggcacaaatgtcaggcaggtactggtaatgagctaacacccacagaaagtgggccagcagcctggcggcatgccagggcagacagtcacttggttccaggcttctgggagttgggcttctgttgtcactgtcctctccaattgctcccaactgagctgggggatttgcttcacactatgggataaaagagtatttcttggctctgttaaaaagagtaacttttaaaagcaaagactcatttgagctttgtgtaatttataaggatgtacactgcgggaggaaatggtttgaattaaaactcagtttctctaattatctttcctcaagaactggaatatatgaaaatttccaaatgcagaggtatgtaagtattcatttttgtaattctatgagaaataggacatttaatatattctcccaatctttaagaaatgcaagagcactttagaaaaatgtagaggatttcattatctctctcccttccaggccactggtatggttttgaccctggccataagagccaaaagccacgtggatgtggatgatgcctgtccttgggatgggacataagagttttgaatattggcaaactgcctgtcagcatcaatgtttttatgatctgcagtggccatcgtctttcatctcagaagatgatttaataatcattttgtcaacatgtggaggaggatgtcagtgactttggagcaaaacttgtatattctttttttttccagaatacttgccccaccataagctaatacttctaaaatatgctttaatatgcagttaaaataatagatattggttgtgtatttatcagttccattaaccaggttcatacacacacacacacacacacacacacacacacacacacgagagagagagagagagagagagagagagagagagagagagagagagaagacagacaccttctgagatgcctaagatatcagctttggagtctgtcctggaacctgctctgtagatcaggatggcctgaaactcacagagatccatttgtctctgcctccagagtgctgggataaaaggtgtttgccaccactgtccaactaataatgtacattttacaatatatattgtattaataaaactttttgctaagattgtaagtggcattgaaatgaaaatcaataaggtgactataatgttaggaatcattcaggaaactagagaaggaacatgggaagggaaaagggaaggaatggtggtctgagactatgagacattactgacaacatctatgggagaggaagtttgcaagtgttgtgtgggggaggggatggtgatgggagggaggggaaatgaagggacagcactaaaacaaccaacagatgagaatgtcacatggaacccagtcacctcgtggaacaattaggaagaatgataggaggatggtagctacattttaatacagtcactggatgttttctctttgtgaatattgtaaatatttgctgttttcttgaagtgactttaaataaagctaaagtttataatatataattacatatcacagttatacataagtataaattatgttataaaacctctctatatatgtatacatatgtatacatatggagaaagaagttaagaccactagtgccatcacttgccttctgtcagcagattttaaggatggagcttctgtttgtccatctaaccaatccatgaaaaaggatttctcacgtatcttacaaccaaattgtttcacacagcctttagctttttctttttcattgttgttttctttttctgtgccttcttcatctacccagacttatgtcaaaagctaaaccacacaaaacaaatacaaaagctccatttttgcctcactttgcctttttgtattgtctgatgttttggtccaacacttgccaattctggcattgtgactcagaattaggagctgattctggccttttctttctccaaaccagagttcacactggcaattgtctcaaagaagaaggtgacagtggtctcccaatagccacacctgtcccttgacttgtgcttgaacagaacctctttgtagccttgtgtcaacaaacatataaagctaaactttgaacataagcacttaaaaacttctattccccccaaaagaaattttgaaaatctgtaattaaggctgttttcaacacattttccaacgtaatcatctgcctttctctcttctcccggactacttactaagccactgtgtttgttatttcctgacttacaataggtgcatcattatgtcggcaataacagctatgtcttctctctattatttggacactctaagtacaatatgaaagctatcaaagtgacttatgtttgggagctggtgataggtgtagactggtggaatcagggcccataagccaaaaattatccattgtccattatacataatacagaatgtctctttcttaacgatactgttcacaccacacaatggtcctacaataacaaatatcctgatattatggagattttgctcatggcctctttccacacaaacatggagtcctacatcatcttttgctccatttctttgtcctgttggttattcctttataccagtgaggaaataggatcagctagctggccctgtcctcagatatgccaatcagttgctctcaattttcattttgtttggtagctttctgattacagagaagatatgtttccctctctaccagacagtaaatcacccactctaaacatggagggatgataaagaaatagcaagaataaagatcttaacgatttgtgtacaatgtattgagatgtcaccctttgccccattaatgtatattcatacaataattaaaatgatataaagggctgaaaagaagattcagaagttaagatcttgcagtactcttgcagaagacctgcgttagattccagaacccatgaaggtcatctcactgctgtctatccatacagctccagggggaactgataactttgacattatggacacttgtattcatatgtacatatgccctacctcagaaacacactcatacatataagtaacattatttttttttaatttaaaaatctttttaggaaataagaaagatcactaatttttttcatgagaaaaaactcacctttataaacctgaccaaatatgaatcattaaaatgagatagcataagcttaccagggcatggagggacatgcccacagtcacagaatgaatgaaacagaaacattagtgtccctatagctatcatagcaatgcaactgtaagctgcattgagattgcacatcacccatcgcatcaggaggacagccattaagaacatgtgtgtctctgcttttacattcctaactcaagcattttctttagctcttttttttccccatttgttttgtcttgttccagtttgtatgcttttgttttattttatcttactttattttgtttcattctctgggtgactgttttataacaagagactgaaatgttgtggattcctataggagagaaggttcgggattttggaggagttgggggaggggcaccatatcagaatatattgtatgaaacagatctattttcaaagaaagaaagaagaaaggaaggaatcaagatagatataaagaaaggaagggagaaaagaaggaaggaaggaaggaaggaaggaaggaaggaaggaaggaaggaaagaaggaaggaaagaaggaagaaaggaaggaaggaagaaaaaaggaggaatatataaaaactcacacaactggaaaggatgcagacaccaatggtgagaagtaaactactctaactactaaggatatcagtgtggtgagccctcaaataactagtaacacatctactgcatgccccattgtgacacacttgagtataaaaccactggactctaaattaacaaatcagaactatctgcacactgataattactgtgacattatttaacaaaggcaagttatagaatcaactacatgtcattatagaggaatggataagaaaaagaagtgaatatacacaaggagattttgaatagccacagggaaaggtgaactatctcacttttcagaaaaattaatggactggatattataatattaatattaatgtaactaggaaaaactgatattacatgttccactctttgtgggtccaggattttgtacatatacctgaagtcatgtttatggatatgacataaagctagaagagaaaccctcagtgaaaccaaaaactataagtacttatagatgtcccgcgctaaccgccttgccagcaaaaaacgacacggggacactcctcaggatccttctgcagtaaagctttaatgcctcttgagaggaaaggcattagcttacannnnnnnnnnnnnnnnnnnnnnnnnnnnnnnnnnnnnnnnnnnnnnngggcagagactaagggcaggaaagttacaaagttacccattgcgcatgcgcacagcttccaatggctccttacatacgcaccggctcctaacaagtactggggacagaaagaggagtgtcagggcaagaggaatgtgctggtttaatgtcttttcaaaacccattgctctgtacaatgctatgcaccaactttaaaaatggagaaaaaaatcaccaaagacaaataaccaaaataaacaaataaatacaatgtgccacagggcagggttaagagaattacgttcttctggaagtcactatttatagagtcatgacccacttttagaggagctttataagactgaatatatttcagttgtttgaactatgtcgtaacacaagtgctcacacaccattaggctactaggaaaaattgaatttgctaattaaaggaatagactgactgttcagtctaacttgttccattagttatgtctcccaaggataggtatacttttgaaactatcatcgttcactttctcctgtatcttttcactacctggatcttgaagtttgtagatgcgatagatgacccaaagtccttccatttcacttggatagtagctctttgggagttatcagagttcagatccacctgctgcattaggcttccagactcctttgctcctggctgttgtctttaatttgcatctggcatgccctcttcctagaatatctttttagcatcaattccttatttagtctacaaacccagggcacaaataaaactgaaaagttacaaaataatggcaaatcttctaaatatgtaaacaaaaattctaattaaaaattgtgagaataagtattttaaagttcttgatttttatacacaagttttattttctttaaaattttaaaattatatgtctttgtggtggtgtatgcatatgtgtacaaatattgtggagagggctcggaatccctagacctggagtgtcaggacactgtcagcccatggatattgctgctgggaacaaaacttaggtcttccagaagagtagcaaatgttgttaaacactgagttacctctcaatcacagacatattttagaaagtatctttacaatcataatatacaatattaccgaatgctagctctgtgctaatcaacactttttgtgaaagagagaatttgaggatcttacctctgctatttcatctacaacctgttttctgtgtaaagccaaagtgaggtaagaagatttttgtagagctctaaatgagtcactttgtcctctattcagaggtgagacttttgttgaggtttcagcgctaacactctcttagcacattttagctttctgatgaaattctgaacttagaataaattactctgttggtatattaatcttaaaatttacagattcaagtgtaaagttgataaaaaatatcttgataacaagggatatgaacaagtatgtgggattatcaagaattcagctggaaatggtgggaactatgcacagatttcctggtaacctgtcaatagccttagatgttggcttcatctatgattgctgaagttcacttggttcatatttcatttataaacctattagcttgtttacttaaaatcatagcaaaagtagaaaacaaaaacaaaaaccttggagacttttgatcaagtggcttcccagcagccagcaggttatgtttgaaatctgagtgctgtcacctcgggcctcttctgctccattctgattccttctgagcttattctgcaaagaccacattttgtgcaacctattataagaataaccatttttttacagcgttacttcctcctttttaaaacctaaggcatcatagctccatgtttacaactccttttttgctttgggagcctggataaaataattggtctgacttccatttccactatttttcatagagtttgtgagttgaacattctgtaatattccttggaaactaacttaatcttgttgaatattctgaggatctcatagtaaatatgctaatcgtgtcttatagtaacccaaagcaggacagacatgaagaaagggcatgacatttgtgtctgatgtaaaatttgttaaagcagacagagtagaacccatgttcttaagtataggaacatgacagtgactttttttttgtttttgttttgttttgaaacagggtctctatatatgtagctctggttgtcatagaacttgcttatcctagaacctgttctggaacatgctggcctcacactcacagagatccacctacctctgcttccagagttctgcaattaaagccctgtaacaccaaccaatgcagaaagttacttctgaatgagaaggaaacacattatcagacagacatcacatagaggcaagatatcctttcctgtgattcatacatgaaatgaaacatgaatatgtcaatgagaaggttacaaagaacacagtactgtgattgctaacacggatgggacttaatctcaaacaatgatacaaggctggtgagatggctcagcagacacacatggtgaaaggagagaaccaaatcctacaacttgtcctctgacttctatagacctatggtggtttataacctcacaagaaataaaaagtctgtaatttaagtaagtgaatgaatgaatgaataaatgaatgcactttttgaaaatgacgatgcgtaagttatctatcacacacacacacacacacacaaagcaagtaagcagttgcatgatttttcaagaaaagacatgatgtctttaatcttagtgcttcacagtgaatttttttcattttaaaatgtcactcccattatgtaatacctaattgcaattttgatttttatttgtaggattgattgatgtaaggcatgtctttgaatttcattgagatttatttaatagatttcatataacatacttcacttgtgaatagtaatcgatcataaagcatgaatttgtgggcccagcattttacttctggctaaaatccagtattattcaatagtgttgtattatctgtagagatacttcaggcattgggaagtcctatagaggatttggcaagttgtgtttatgtttcgctaataagcctaggaaatgtgttcagccacatataagataaataaaaatatttcttaatcattcttcccagtttttagaactattagagaatggtagatattggtatttatacacatgcatatggactataaattgagatgattacttcatggatgtatggatacaatcctcagattatgtttaaaatagttcaaacctgaaaagtttgattattagttatttttctaatgtacaaattcatttatagttgtatttacaaaagatatccagggaaagatgatgatgctgccaattaataattaacaaaagaatcaagaggcaacataataattacctaaaccaatttggcaatgtgtgccataataattataatttcttgattgctaagataatgctatacattatgtataaatgagcttctggtgacagttatcccatcatagacagaatccactatgtccttggcccaggtctagttagtagacacagccagcccttctcaaactgagaccccattttcctgtcctgtctgtgtcctcaggcctgtatggagaagtagatgctcagcttattttgctgctgagatttttgttcagggtcttgtgtctagagtctgtgagctcccacttgctcaggtcagctctcttgtgggttttcatgtcctgctctttactcagaaagagcacactcagaaagtaacctttcagtgaggtttgtctgtatcccttggttttcttgagaaaggggcattgctgggtatccaggttccttttaccacttcctcctcagtgctgggaacatggacctgtacctctcagttcgtggaagattatgtcaaatacaacaatgatagcacaaaggaaaacatctaattttcttaatatcataacactattatctgaaactagcaagacattttacaaagctctatatttactaaatatttcaaaatagatccaatactaagttatatttattcctctggtaaaaacccaaatgagagtgtttcacatttacaaagcaagtacaaaagggctgtaatggggaggagatagggcatgagaacatgaggcaatgggatggttgaattgcaggagagctggagtgggagagcaattagagatgtcttgataaagagaggcattgtggggttagggagaaacctgctgctagggaaattcccaggaattcatgaagatgactccagttaagactcctagcaatagtggtcagaatgcctgaattggccttcccctttaaccagatttggtgactaccctaacagtcatcatatggccttcatccagtaattgatggggaagcagatgcaaagcactgggctgagctcctagggtccaatggaagagagggaggtgggattatgtgagcaagtgggggagagtcaagagcaggacatgaaaacccacaagagagagctgacctgagccagtgggagctcacagactctagaccaacagccgggtagcctgcatgagacccaactagggcctctggatggggacaacaatgtatggcctggtctgtttctagaacccttagtagtgggaccaggatctatccctggtgcatgagcagggtttttagggcctattctatatggtgggatgcaggggtgaggggcttggtcatgcctcaattgaatgtgctaggctttgttgactccccactggaggccttaccttttcagaagagtagatgggttgtgggttgaggggaggaatgtagattgggaggagaagagggagagggaattgtggttggaatgcaaaatgaatgaaaaattttaaaaaatccttacagcagttggtctgggatggagggcccaccttccctcattatctagacaatactaagttgtttctctctattaaccattttatggtaacagtacatctctggaatgaggatgtgataatgacattatgggaaaactaaacacaattagagaacgggagcttcctttatgtggtcataaaattacaaaatgtaacaggctcactgttcagatacatgatacatcatgactcaatgagaataatgctaactgtatttgctacttaagactaatcaacttgttacattattagaacacaagagaaaatcaggtttgtcttcatcttaatatatgcacaataatgacagacttatctatatagagaatgaccatatatattgtgatttatttatgcaaaccagaagtacagtctatggaaatatccagttgaattcataaatctcataaaattattttttaatttaaattagaaacaagcttgtttcacatatcaatcccaattccctctgcctcccctcctccccggcctcccactgaccccccatctcatcccctttctgctcccctgggagggtaaggccttcaatgggggatcttcgaggtctgtcatatcatttggggcagggcctaggccgttcccaatgtgtctaggctgagaaagaatttttctatgtggaatgggctcccaaagtccattcatttaatagtgataaatactgatccactgccagaggccccatagattgcccaggcacattcagggaatctgagtttgtcttatgctggtttcccagctgtcagtctggggtccatgagctccctctttttcaggtcagctgtttctgtgggtttctccagcctggtcttgaaaggtacaagatctcctgagcaaattgggagaatggggggaagggagagggagttaggagaaagagatggggagaagagatgggtagaggaggacttgatggagcagaaagtttgagtctggggaagaatagagaagagcaaggaaagaggtatcatatagagggagccattataggtttaaagagaaatatttcactagggaaatgtccagagatctacaagggtgaccccaactaacaatctaagcaatagtggagaggctaccttaaacaaccttcccctataatgagattgatgactatcttatatgccatcctagagccttcatctagtagctgatggaagaagaatcagacacctacagctaaacactgaactgaactcctagaatccagtttcagagagggaggagagatgagcaaatggttcaagaccaggatggagaaacctcataaaattcttaaaagcatttgagaaaaaattgtctgatgcaatacctagtattttgctattctatttatatcagttcaaagccagacataatcacttgcattatattggatagctgttggctatcttgttaaactagcctttaaagttatgaaagtattacatattttgaatgctatgatggttatgcaggtgtatctattttcaaaactcatcaaaatgtacaattagtatgaataaatatgaaggtatataatgtacctcaatataaatcagtaggcaaagaaactgtcagctatattatgaacatcttccagtataataattgacatgaattaaattaatcatatgactaggcatttagagtgtcttattgggtgtcaattttgcatcaagttttagaagtgtttgaacagtattctggacacttggacatacactcaagtcttcattttctcccttattaataccaaagtctcccaactgaggctagacattacaactctggtgtagttttgaagaggggcattcatccatgacctggtcttgccctctgctgaccatctgtaaccaggagaggagaagtaaataggccttagtttgagaaggattggctggttcctgccaatcagaaccatggaaattgtagattctacctatgatatggcagctcttatcattagcgtatctgtttatcattcataacattttcttgagggttgatatctgaacaattgagaaattataattattatggcacacattgtcaaattggtttatataattactgtgttgccttatgattcttctgttaattattattcagaagcagtgtctttctctagatacatttagtaaatatacatatgtatgcagtcatatagctgaagtataattagcattaatcaacttgctcatctgaactttttgaacatattttgaaggttgtatctgtatatccatgaaataatcacctcaataaatattctacatttctccttatttctttttctttcctttcaataagtaaataagattaatttgtctataagtattatagattactttatatttattggcttgttatataattgaaacaagaattattctttttctctgaaacccagaacaaagattttgagaaaaatatgtggatctgcagttcatttctcattatattcagatagtattacataaaccattgtttactaatataataactaactgcctatattcaggaaagttggattcgtcatacatgtatatgaattctttttacaatttcttaagtgtaattctcatgaattaaactggaaacatttaagaatttgacaataggcaggcagatctctgtgtgttcgaggccagcctggtctccagagtgaatgccaggataggctccaaagctacacagagaaaccctgtctcaaaaaacaaaacaaacaaacaaacaaaaagaacaaacaaaaaaagaatttgacaataatctgggttttcattataaatggccacttaaccaacaccctaaaaagttgagataaacaatcagtttgatctctattcctttggttattttctgggacctggtgtaagaagacagttacaaagcaggaagcaatggtattgatacaagtaagattgtgcaccaactgcgattgataggcacaccagagccttaacaaaagatggctacacctgtctagtgtgtcccacatagttacatattagacccttgggcagtttcaggactgcaaaagcacatgagataactacagatgttcctaaggcagcatggacaggatcctgggacactggaggaataggagtctactgtctggagaacagctcctggctgtccagtgctttctagaacccagaaagtatatgttatggtgtgaagctatgaactatactttaagagtaagccaaaacctatgtggtggttcatctgacaaaacttttgaggcttgtgtcattgatgtgtgaaccaggaccaaacacaacattttagttatgggacagaatctggaatgtcaaggctttgtatttatgttttaaaatattcagcatgcccccatcactaaacatttaaagaaataagaggatgtaactgataaaaagtaacacaatagtttacacaatgttgcatgaataaatgcatcttacgctaaaaagactttcattttgtctcttactagcacattaagaaaagaaaaatctagatagctgatggatgatggagttttctaacaattaattattgtgccttaaaatcaaatttgtactttagaatgggaaagtttaacatgtggctgaggaaacaactcattgttgtgtttaaaatcaaagtcaatgttgccaatgatatttgtgaagttaagaacaactcaataccaaatatacagagtgaggctggaaatgaagattacaaatgggaggaatatagagtaatgagcgcaggaacactggccaagtcctttcaggagaaacacagactgcagaaggacatactcagagcaaaatcaatatttaaagagatgatgaatggatgttttctctgtgctgttacttctattcactgtgaagaagataattttattcttgacttcactttcttgtagtactttttttgttttgtacttcttcaagatcatggtcgatagttattaattgtagtatatctaggcttagagttcaattatcaaagaaaaataaaaagaaatgaggccctctcaaggtcttacaggattttgaaacttaaatttttactttgccaaactaaaaatgaacaccatgtggtttgtaagaagttctcaaaacagccttattaaagagagtgtattttttgcacccttttcttgcatttttttgaaatcactataacaacattcttatctgtggaatactctggtcttctatctacagtgagaaaacaaaatgttcagttgtttctctgcttctaatttaatgcaagctattcaacaatcctttagttgtatgctgctatgtgccattctcaaattgtagaagaataaaggaaatatgtaactcaaatgtaagaagtttggatttatggttgcttctaaatggaagcagaagacaattcctgcagagaaagtggctttgctgttctccattttcctgacagtaaattagcttttcatttgaatgttactttctttcagaagactttgatgcattttaagttgatgcagccgtgcatgttattaaagctaggaatcataaattattccttaaatcattgagtcttgggaaaacagaaagccagtgaatgacattccacttgaatattgatttggtttctgtgaagcttacactggttctggcctgtttggctccagcaggtctaaatgctttctaatttgtttgaaaattgcgtgaaaatatccccatggccctcttgtaaaatatgacagcctgacattttctttaattacaagacccaatctgtttaatagcataaaattggcctccaatttgacaggcctcccctttaaaatcaatggttagactctagggcaccagcttggtcatcaagatcaatatcaaaaaaatatagcttgtcaagacctctcagccttttattgattcaaatggggagctgcttacagactgaatacatgttagtgctcagacccaacaagcacaagcctcttgcatgatattcaggttggaaggatagatagggctagatgatacaagcataataaaataatccaagatatgacagtcgtaaaagctgtgagttccagggaaaatacaaatatactttaccacactttgaaatatttattatttgaaaatttcatgcataatatatagtgtctcttgatcatatccactcccccattcttacccccaacacatgagaccctcaacacatcccttccatcaatatcttacttaatgtcctatgttttaaaaactaaatttcaatgtgcaaaaaatacatcaaaactgttaactttgtgttgttaaagagaacaagccaaaccactgaaatttctctggaaagttttctcactgctattccacaagggaattcacagcaaaaagaagaaaaaagttactaggaaaatattttttctagtttagtgctgaaggagcacactgctgccttggtgattaagctgggccaggccttgattttcatactcagctctttcaaaattaggttgctatctgtttcatggcatttgtctaactctgagttagaagcacccatccatccatcaatagcacttcatgctccacttcatcagggcttaaggcaagaatcatagtcacctcacctttatgtctaacatgaatactaacaaggaagaatgcaagttaaaccaaagagaaaggaaaaatgaagctaggcccacaaagtgaattatctacaaaatcaatacagatcaaaaataagaacttactattcttttaaaaacttaaacattgggtacttaccaccactgaaaataacattgagattgatcaatggtgagatttttattttgccacaattaattttaagtgcagaaaaggtgaaatttatattttgaagacaatatacctcaacaacccacattgtgtgttaacttgaaaacaatttgctatagcttatgggtgtttgttactgcagttaaaaatccaccaagtgtttatcagctgtgatattaggccctatttttctttacctcacttacatatgcatgtgttctataattgctctgtatttatgtgcattatttgatctatggttatatttgttttatgaatgcacaataagccagaatgtataattctctaaagaaaagaaatacatctagtatttgacaagttaattctccaacccaatgtgcagagaaacttaatatcttacattcagccacataaatgtcagtttcagaattgggattctgagctgtatacagcttttcatgtcttagagaccaaagggaagacctttatcactgacccatgggctcctaagtcaaacattgaataaacattttcacattttcaggaagtgtatgaacttttggattttaaacacattattgtttttacaggtaactgtcaaagattataagccatggaggatacgcagaatcggcaagcttcctcttgcctactgaggaaggttaagtatctaatactacttatgctactgtggaatgtttaagttgccaatttacaaggaagaagcagtcctcccttatctcaaacacatgggccatttttaatgcaacatatcaatgaatcagacttggtgttccttttttatttttataaatttgaggcaccaataacccagaaactttcccaagtctcaaaccttttctctttattcaattaaaattttacagaccaccagctttccttgctagttttactgtgacatatgctgctgagcagtcttctgttcagagaaatactagatctttccaatgaattcattaacttatgtacttatcaggtaactcagtaggaaaagaaaagtcaaataactaaatcattttagctcagatctttgggttgatggcactaaaacaaccactgttgaagtatcggtttttttctcttgctccttctcacagtggtagtcaaaagtgacagtcaaggctttctataacatacaacagacagtgttcacattataacacccaaagacacaactcaagcacactcaacagtcataaaatacgcagggatataaatccttaacatctaaactgcatgaagctgaatttgtgaataggcaaaaatcccacaaattatggaaaaattaattttaaaactacttagaagacatacttggattttcactgtagtaacaattgttaaagacaaaaccagaatataacactttctagacattttatataatagaataatagtaatatgtatttttaagtatatagagcctgttgtatttgtgacaattttgtgagtacaatatttaaacaaagtcagaactgaaagtatgtcactatggctaggaattaattgtgctcacatttataaatgtagttattgaaacaccatggcagacaaaatatgtttcaggctattaatctaaatctcatccagatctctgtcatatatgtattctccaaagagttcagatatccagaaatgtcttttttatccatggtgttacatgaatgtgatatctctccatatattgaggaagcttctctcctataagtgcacacatgatcaagctttgagttaatcatgttcagggctcaaatttacaaacaaagccaagaacaaaaacagctttctgaagtctgtctgtagttcatagctccaaggaagatagaggaatgcatagaagacaaagcttttaaaaagaaaaatgatgacatctaagtcaggaaatggctcagcagatgaagctgcttgctatgtattcctttaaacctgattgtcatcctagaacccaagttgaagtagaaggagagaagtgactccacaaagctgtctttgataaccacatgtgccagtggtaactctgaacacaaccacacatatgcacacacacacatgcatacacaatagagagctccatatttatatagacactaatatgaataataatagttaataatgaaaaatttcagatactgaaatctactgtagtgaaaccgtacccaaaattaaaaaataacaaacaaaagagaaaaaaggaaataaacaaatgataaaggaatccaacatataaaaatttattccagggataattacagacactttgggagcccttagaagttagccaaccatcttggttattaactagtgttttatgacgtcttgtattatgatacagtggttttattttatttcttttagagcatagatcatctcacagagaaaacagacaaattcaactttatttcctccattgtgatagacgcataatatgtaccactgtgagtgtccctgttaatttggacatgcgagcaggatctgtatgatgatgcataatggaagcatgacaagcatgcacctgtttccaggcacaaatctgcatgaaaaacccagtaagagagcatcagccccatcatataactatctctcttccctgcacacaagtgtttttgaggcatccagcaactgtttaggtgtcatcaggcaaatgtgactttattcattaaaaggtcttgtaatctcctcggctaggagaggacaagtgaaggcaaatacatccctttgaaactgtcattttcatcatgactttgtgtctgttaggtcacttccctagagttcaattgtcaacattatcacactgcttttcccttatggagattaaaatctggtagagctctgcatcagatatttgacattcagagtttttatttttaatactgtaattatgaataaatgttgcatctttggggaatgcaatcatcattgcagcaaaggagacagccacctttctgaagtagtttagtgatgctcactcagtaggacagttctcattggatggcagcaaatctcatttaaagtctccacatcaaaataaaaactataaaagagagggtgaggcaacaggacactcagtaggtagagggattgctactaatcctggcatcctgagttaaatacccagaccaatgtgatgggggatatttgataacactgtgaacccaaagtttgcatttgcattaattaaataaaaataacttttggtcaaaaggcttcaagcaactaattgacagaaagtaatcatagtgtgtcagaggccatccaggaaagatagagagacaaagaaaataggagggtggggtttcgagtgtcacagcttttttttgtttttgcagagtgaaagcaagggtcttcctgacaccagtaagtaaagtgggttagccagttgctgctcagccgctctgagcacgcagattttcaccctagcctttgaatctcacgtcttattcataattagaatgatagtaatttagttaaagtcacctttagcagcagtgacatggctggtgcctgcaggagcagaattctttcctggcttctgcctgaatgcccaggtagtttctagataagtagagttgcacttgctgtcggagatagcagtggaataaggcattgtcactgtgctgaagttaaaacaacaccaatgtcagaatgggagacctgactcttgtaagctatcctatgagttctatgaacaccatggtgagtgcctgaattctagtgcatgtacacacacacacacacacacacaacacacacacacacacacacacactcttttaggaaaacctaccatggacttaaatctgaatatttttgaactattttccaaactcaaagcctgactttaaaatttcattgaatccactataagcaggcttagaaaaataactagaaaattttaattatcctcagcataaagatttctttccatggagcttgaaattatttttaattaatttatttaaagaaaggtatctgtactctttaataacatatgtatctttataaaagttatatatacataatttaattttgaacagattccttttctggcatagtgtacagaggccatgcttattgatggagagggttacagagaaagacagaggtgtggcaagatgtactggagaccttctctcctggaggtctctgaatactgacatggagacagagtctgatgggattgtgtgtgaaggaagttagggcacttcaaacaacatataaaacaattttctatgctgagttaagtctctgtcctttgtaatgctcagaaaaactgccaattagttttaagttatctcatgtgccataatatttaacaaagtagaaggatggagaaatgagattttgtgtggagacaggcatttgcatgtgagaatatcctgaggacccacctgtaggcttcacttagctgagagaataagctgagccagcccacgcatgcttcatggtatgtttattagaaactatgctgttattgaggtgtggatgcatagaacacatgaaggaagctggagaagtactcctgccccaacaccagtctgattgcatggctcctattttcacaccctcaacatcacctctgcaaattaagatgccatcagcaggtagaatgtggctcaccaccagtgtaagaatagggagcactgaggagcacttctcaagtactgtgaacaccaactgtaaccttgaaattgttaaaaactgaagacaaggtagagccaggtggtgcttaatgctacttctctgaacttggaggatggtttgggttaatacatttacttcttccttctgctttaacacgtgtcatgccctatctttggtaggtcacaagttggatataattatgttgttccttaatcatcttctctaatttgcattaaattgctttgaagataaatgtatctcaaatttgtaatactaattaataattgtacagtgatctgtcatgtgcttggtttctaagtttagcatattatattggaacattctgtgttcagagtgccttctgacacagatttagagtctggtgcttaggaactgatgatgacaccagactatttcaacaacaatgcccttgttaaatgcattcttagcatttaagaactcaatccctgctgcaatcaggaagaatctgaaagatattcaagggcctctaccaggcacaatcatggcaaacacaggccacagcatggcaaacaaacactgaagacaggttttgaccttttaactcctcccacttctagctaaaaaaaaaagttacttttcttaaactagctcccaaggtccattcccttatttggtcacttctttctcctgaggctgacgaccaaagtccagctatcttaagtattgaagtccaataatcaaaagcctcctctttgcccccttaattaacatgccgaatggaaattaaacaattcatccgagcatatggtctccgcttttacctttataaactaccatggcctgtgggccacgtctgtctgccctatctccagaagcagtccttcatccctctagaattaatatccctttcccttctcctttgccccccctttcctctttcctatagtgggaaattacaatacaatactgagtcaggtagaaatacaagggtatttaatagggaaaagccttacttgccagctggtgtgccagcagtctgtccagcaagtacaaaagtgaaactgaaagagaaacgcagtccccaagtgtgttcaggaacacctgtagccagcccctaagcaggcatggctacagcttcccctacgccttcctttgtctcttctccttctctcttgtcctctatttcctgtctttgtacttcatctctgcactctgtccctctggagtaaataaatctctattgtgctaagaacttggtcttggggtgtcttgagttgannnnnnnnnncaaaatagaggagggcaagaaaggagatgccttgatagagggagacagtacaggttcggagagaggtctgaaacaggggaaatgttaggagatccacagggatgaccccaaataagaagccaggcagtggtggagaaaatgccattgatgcccttcccctataatgagattggtgtctaccttggttaccaatcctagagccttcatccagtagctgttcaaagcagaaacaggcacccacagctaagcactgaaccatactaatggaaaccagttgtggagagggaggagggatgagcaatggagccaagacggtgctgcagaaacagttgacctgacctactgatagcatggagaccctaagtcataaagctggggaaacagcattggaccaaaccaagccctctgaatgtgggtcccagctagggggccaagacagtctatgggacctctaaaagtggagccagtctttaaccctagagcacaagtggactttgggaacctattccctatggagggatactattgcagcccagatacagcaaggagggcctaggccctcccccaaatgatatgacacactttgaagttccctcatggagggcctcactgatccctggggaggagtttggggatgggctgggagggttgctggggaacatgggtggatgggagttcaagggaatgggggaatggatatgtaaatatgactaatatttaaagaaataagaaaaccaaaaatatatatttaattacattggatgttaagaaatagtgtttcattacaatgaaaaattttcactattaaactatatagcttattctcaaagtaaccagatattgcaaagctacattacagaaaatacaaggacgaagttacacatgtcaattttgatagtatcctcaaggatactatcctcaaggatatttattctctactttatttaaaacttctttattttttttaaaaactagagtattgtttcatgtccatgtccatttcactttgaaaacctcaagagcaattgattgagtccaaccttttatttctctatatctatctatctgcctgtctgtctgtcttgcactactcaaatacagaattattaatggtaactgattgagatgattttcacatacaagaatactcagccattttacttatattgttcttccattgccaacatgttcatggagttaacaatgctaccattatctaatttgggaaatgtctcactttaaacagaaagtattttggctttggtaatctaattcacatgttagagaattcaaactcttcactgattgtctcaatttggagagcctgcatcatatactcctttcacctttcagcatttagccattgtttccttgttctctaggaatatttctagtactaacttgaagtattttgtcttctaaattgattttcagtgcccaggtacactgcaccccctttctgagtatgcaatgaatatctgtgtatcttttagttttgtcatttgtgtgaaatatggacctttaatgaacttcttattaccattttaccccttgtttctctgctcctaacctgaaaattcacctttgttacttgtgtctgtgatttatttatttatatttgtgtgtgtgtacttgtgtgctatttatgtcattagcattccattgggaaatttttttaaaattgttttccttaaagagatgatgaatggatgttttctctgtgctgttacttctattcactgtgaagaagataattttattcttgacttcactttcttgtagtactttttttgtttaactgacttcatagtgggcatatgtgagtcagcacagtttcattctgaatcagcaacaaatcagaaatctccattaagcaacttgcgtacatgtaccactcttctccaggaacatcagtttacaagggagcttcactttgcacctcttgcttgctcaagacacaatgttttagctggtggtcaagagctgatgcaatttcttctccaggggtctgcttagggctcactcacaggataagtcagattttgtcacagtcctctttggtggccagcttctcctgttttccataaacttttgaacaagctctaagctaaactcagctgatgatatagccttaggcaatggggatgttataatccatggagatggtagagttccccgccgttgtcactagcaaatagcttcctcaatcaaaaggccaccattttataaaactagggatttaacaaaaagttgcaggttaaggaaatatgttccaagggaggttaagatcatgataggaaaaaccacaaagacagccgtccaaactcatggactctggggaacctgaactaggctctctgaaagtgggtgatggttagatgaactgatctgttttgggagaggccctgctagaagcaccaggacctatcccaggtgcatgaactggccttttggcttccctatggtgggataccttgcttggccttgatacagggagtagtaggggcttggacctgcctcaccttgatatggcagactttagtgacttcttcaaggaggccttttcccctctgaagagtggatgggggtggaatggggttatgtcgggaggcaggagaaggggagggagaggaattggggttggaatataaaatgaaaacagaattaaataaaaaaagcaaatatgtcagctatactctgctcgtcttgcttctcagaaatccacttttctggtttgttttcttcctaccctaatttcctgctggttattggttagtgtaccaacaagactgagagaagtagaacaggaataattctaattaaaggtggtatccaaccacacagaatttgccagtcatgacagggctgttgcacacacaaactcacagccttgtgactgcttgcaaatatcagggtgtaaaaaatccctggaggatggaggaaaggctcacatagccccaaccttggcgtcaacatctgtatgttaaactatcattctaaaattaatttctcctgtctcaaataattctcttgagtgatgttttatttcttttgttctgaatttgtatctattttgtattccttaaacaatttcccatttgaagtccttgtgcaacctcaattttgacatcacaccatctttgattcttaacacacaagtattctattctatgtcaggaggggttgagtcagtatcttggggtgtccttgaaaccctggtaatagtgactagagttctgggattactggtcagaaactccatgactaatttgctctatgtttttaatctcactgaattgtgtcccccagatttcatctttttttgatcaagcatatttccacattttactgactcttaacctttcaagacccaggaagaagtatctactgacataggaatactatttttaaaacatttattttcttcgtgtgtgtgtgtgtgtgtgtgtgtgtgtgtgtttgtttatatgtgtatgactgtatgtatatgcatgtttgtgtgtacttatgtgtatatgagtattcttgtgagtatgtattcatggcttgtgtgtctctgtgtgcatgtatgtatatatgctcatgtgtggtatctatgtttgcatatgtttgtgtatgcatgtgtgtacttgtatgtttacgtgcctgtatctgtatatctccatttgtgtatgtgctgctatgtttatgtgcttgtgtctgtgagtgtgtgcaagtgtgtatgtatgtgtatgtctctctgtgtgtctgtgtgggggtgtgttccatggcacagatgtggagttcaggggacagtttacaggagtcagatctgtccttcagccacttatgttgtcagggttggcagcaagtgcctttacccactgatcaatctctctagcccacaggattgtattttgatttagaaagcttcagcattgttccatttgctctaatattctgaccattcacgtatactaattgagatagccatggctgtatagactatttactttggatggactgaaagtgacagccacatataaaagttattactgaagatcgttttcaccacacttctatgtttctaaatttgacatttcaggatgcaccttcctgtccttatcaagaagtaaagtgacaaaggaagttaacccatcagctctgagcctaaaccctaaatgttcagaaagcaacagtagcattgatccactttgcaaaatcccagcatggctgaggatttacacactatctatttgcacttcttctcacctgccgttttcttggtctgaataaatcttcagagcagatggtagaagattgtcaataaaaggcgttgttagcctcagtgtgaatgcactcgcctcagtcaacaccactgtctaaccacctgctcatttattacattttaaacaacctttctggaaaaacagttaaattcttcctttcttgtggagtgaaaaaagggggattttatgcttctgatgcaatagcaggttatatagcatatgttaatcataaatttcattttaaataaactcttattattttctccagctttggatttcatgtttacacagaaaattttgagaaaaatcagaaattcactcctagttcactggacctgaggtagttagaaaagacataaatgctataagaaaaatcacaatattaaaatgttactttaaacattgtatttactatgaataatatttttgtcacccgatgttattatttcagtgtattaagaatatcatttgggtcaatctggtattactataattgataaattattaagggaaaaatcctttgaaaatttatcctttaaatccttcattaaataaattaagaaactaagagtcagatatgttaatgtaattggtagaataatgcaaatacttcatcatggaaaatactcttttaataaatagtttttttatttaaaggtataattatttcacatgtcaaataaagagttttatttttcaaatctaatttttataatattaaagtgaaaaatcagttatacatttggacagagagagaccaaatagaacatcttacctggaatgccaaaaatgaagttaatctatggataccttagttgaataaaggcatgttacttttgtttttgaagcatttgtttaacaatataaagagatgtgctgcatttgtttcaccttgctggcctaaggcacctgattggtctaataacatccaatagctgggcagagaaaggataggtggggctggccagcatagagagaataaataggaggagaaatctaagctatagaagaaaggaagaagaaaatgaagagaaggagagggatgaaccagggccagaagccaggtatccaccagctagcagacagaagtagtgaggataaaatatacagaagaaagaaagtaagagcctcaaggtggaaacctgaaaggtggataaagagatacattctgtaggaaattgttggtgttttgtctctcaatggcccaattgagactgtaccacgtgatccttttgaatggtgtgtctttatctgctacaggagacaggtgcaaactcagtaaggtctctaattctttctcacccaacatccctccaaaagaataatgcagcataaatttaaaaattccttaaatttaaagctctgcttcttcattatgctatctcagagatctttgtaacgctaatccaaggaacacttctggtaagctggtgatttggtatccttgtgtttatccacttaccaacaacagtgggcaccttggaggtgtgtggccaatttgtttttttagtcacacaggtgaattaagttttttttttttttttttttttttttttttttaaaaaaaaaaaggaactatgaccctgagtctggaaacacctcactcttctacaccacacctgcttcatggtcataagagcagcatctgtgtacaatcactgctatgtcacatttcctaaaccaggaaagtcttcctgttttccatttaaaaacaaggagggcaatgtccacttctgcaattttctgaaactaaacacatttaatatttttttcaaacatttggtaagatatccagtaatgagagctgcattttttctaatttcttttaaaaaggtattttctgtttcctgtgatgttcagatacatatgtcattgtcctttgttctcattccccctccactgccataccccacatcccctcttgctatgttgatgatgctcttctccagacagatgctcatctgctttcaagacattgcattgcccgggattgtaccaccctcaccctctgacagacatcctccttccctttgtcagtcccaatttattttgatgtctaacacacacacacacacacacacacacacacacacacacacacacacacacctgttctacatatcagggaggaagggagcaaactttaatttgaaaggcaaagtattcaataatattgaaaagaaacagtgtttgctctttattaatttaaatgtagctgaattccattataggagtataaacaaaggaatgttaaaaaccaaatgtctactagaggagcacctgtcaggagggaaactacaaaaatctgtagttacacatgtgagcagacattatgtaccaagcgaggatctttgcatgaaggcaactgtcccattcaaaactgtggtgagatttgtggaagataagggtaagaaaacacatttcttcagttgttttcactcatttattggatatgttgagaattactaaaagatctttcccaaatgattgacatttgttaagatttgttaagtgctgtacttacacatttaggaaacatgcatgaaaagagaatcaacccagtgatggcaaagtcaaatgagactggccttgaacctaatatgagtttcaggtgtcccagctactcacactttctaggaaaatgcagtaatcccatggatctgccgtgctttgctgatttaattagtcctagtgtgaatcagaagtaagaagatactcattatggagggttgtgagccatcacatggttgctgggaattgaactcaggacctctggaagagcagccagtgaatattttgagaaaaatcagaaattcactcctagttcactggacctgaggtagttagaaaagacataaatgctataagaaaaatcacaatattaaaatggaaatttgtgaatatttaaccagttccaataaatacagaaaacattaatgggacacaggtgtagcaaaatatatatatatattcaatacaattacagaggaggtaagaaaatgacatacagaatctttattaaatattcagttgtgtgtaaggtatgctcatataagttgttatattcaaagaatacttagatcagtggttctcacccttcctaataatgactctttaatatagttcctcatgttgtgatgaccttcaagcagaagattattttcattgctacttcataactgtaaatttgctactattatgaataattttgcaaatatctgatatgcaaccccaaagtgggttgagacccacaggttgagaaccacgtccttagcgttgttattacctcaactgtgtaggattcaaaatcataaaatgatcaagtttttaaggaaaaacagagtagtccgcagtggaactgagaagacaaatacactgattagatttctagtatgtgtgtatatatgtatccatctatagtcaacccgttaatcatcagtcgatcttccaatctacacaccccccttccatccagacatctatgagcagaatgtgccatacatgatatacactttttataatattcagtctagtgttccgatgactcccaagtaattccaggtcccagggagaatgcaagtatcttctggagttgatagattaagacaaattcaccaactagggagtcctgacctggatatttagctctttcaaatatcaattaaaaaatcttattatgtaatattttcttcataatgacacgctattttaagcagagacaccttaatgaaagttgttttaataaggcctttaaagtgaatttggttttcatgcaaagcgtgagacgtgataagcacgggggctggtgttcttctaatcttccatagataatgaaacttagaaatagcacggcactaatcaaaatcagagctactttaaagctgtagccatcgcccttggtgattatacagcctgacaaatgccagtcaagaaaattatgtatcttgaaattgacacagagcagttagagatgccacctgattggaaagctcaaggtggaatcaaatgcagggatgcaggcctgagataaagggcttgctgaaaagagattcaaccaccaggttcttccaacatcagcaccataatctcgagatgaaatgacacaattttcaaatccataataccctttgcacattctagaaaatttcttgtagaaatgttgacagagttgactgtctaatttggtgaatatcagtgagctgtactaattggctaacttcagctatgctttaatggtaatatagtcttgttttaaaaagggaggaacagtttctataacaatttactttcatttattccaccagttaattgcccatcatcatgtagttcattttctgcctgtgcttacatggcacagagacaaaggaaatagatttttcctgttcattttcccatgcaagctttgtcataaggtgcacaatgccgagaacacagagaccaaagcaaagatgaggataaagggcctcagagtatgggaaatgttggaaaaaacagccctttccttctcattcatgactataattattatcacatctcatttcatggtatgggttggtaatattaaaatcattttcaaaagagtaatgatgctgcaaggtcatatgacgtggttagtaatagatactgtgcgcacattttcaaagtacatgtgggcaaatgcagaataagaagtggtttaccattggtgcatgaacctggagagatgatgtatttactactcctgcagagccccaagttatgttactagcaatcctgtagggcataaccacttccaactccagttctaggagatacagtgcttttagcctctgtgggcaccatcacacatttgcatttgaacatatacacatatacactaataggcacatatgattaaaaatgaactaaatcttcaaaaatgtgacttgtgtaagtgtatttatgctgccttgttttgagcctctgtgtccacccatcttccatctggtgagggaaagaattaatgaaagtataatttgaacaaacaatgtctctaaagttactggcttttcatcttctctgtactttgtctttatgaagacttgggagagaatttctgtgaaagggcttggtaagtagaacttcacccaggagctctttgttttcctaacaaagtacaactgttttgtttgcttgtttttgtgactaggttatttcacttagtttaatatccaaaaggctcatccatattataacatgtttccaaaatttttcaaaggtaccataatgtctcactgtgtgcacgcaccacaattaagctggtcatttgtatccatttgtgttgcttctataagttggctattataactaatgcaaatatgaacataagggaacaaactcttctaaaatgttttataaatctcccaacagcatcattatacttcatgtttgctccctacaaatacacacaacatcagtattttaacactgcaaaataatatgcattctctagtcaaaagcataaaacacaaagcaacagaaatgtcaacatgtcccacctcagatctcagagttccgcagacaatatccaaatttctacaaatgttctttaaatgttccagtgaaaagaactcattacttcaccatctctccacatgacagtcttttaaatatttaaagacagttatcatatttctacaaagcttctcttcccagacaacagacacacacaattctctcaaaagttcaaaattgtcattgaaaagatgtctttgacatatttcaaatctagagaacatcacaggcaacactattgcaggttctacaaaactgtcagaacagcaaatcttatgtaggggactttgcaattttataatgagatgtagccttttgaatagtccaagaaaaaatttacaatttttacttgaatttagtttaaacaatctgacatatcacagagcatgttgtgaggtattttctttcaaaaggatttatattgcatttcctgaacaggtgaactgaaatttattttcaagtaccacttgtgtattcttggaggggtatgtaaagactaggctttgtgtgttgctgtctttcatgactattgacctacaattctggagaattcagtagcgttgataacatacctaatttaaaggatcctcttgaagtggataatgtaactattagttgtatcatttagaaaaatcaaagtattattttcaaaataaaaattcaagtgtaaaaattaaagaattaatatatgtatatatttatttggagaatatctatgaatctcaggcttgccttaaactcaaaatccttcaacctcagactccttagtgttgttattataaacatatactattatatcctacttaaatacataaaatgtaatagttgtacatatatattgggtgccaggtagtggtttgaggcacagttgacaatggcagaaagctgctaaaagctagagaatgcattttataatatccccataatacaaattttacactatttgtgactgtacatatggataagctgattgagcctttatgtaatttatctatcactcaaggggctcatgaattgcctccatttcttgactatcatgttcagggctataatggacatgagatgtatatatcacttctggattgatgcattatagattagttctgtacttaatttgtgtgtgtgtgtgtgtgtgtgtgtgtgtgtgtgtgtgtgtgtgtgtgtgtgtgtgtgtgtgtgtgggggtgatagtccatactgttctctgaatcgatgcacattcccagtgtcttagtttaggcaattgttgctgtgaatacattaccaaaacaacttggggaggaaagggttaattttgtttaagcttttatattataggccatcaacaaaggaattcaggtcacgaattcaagcaggaaacgggaggcaagagttaatgcagggaccatgtaggattcctaattactagcttgattctcccagcttgctcaatgactttcatacagactctaggcctagcatcccaggagtgggaccaatcacaattagcttggtcctcttctcaattactgattaggaaaatgccctacaggtctgtctacagtctgagtttatggagacctggtaggcaccacccaaacctggtcacgtttctttgcattagggtggtactgcatgcttgctcaatggtccttgatatattgataagaaaatgaccattcactttcaattttggaataaacagctagctgcctcagggtagaccgagttatgtagcctgccacaggagccaccatcttagtagccagtactctgcaagtaagcagccattggcatagatgcaaaatcttccaccagaaggaaatcttctttgttgagattgtagataacactaaaaccttctagtgatgagaaccttctagtgatgagacttcatatacagctgcacacatttagacataatgcttttcacacagacaagatagcaatttagtagaagtttaaattcataagcacgtggacaatttcacaggacccacaggacagaggcgtaaaaccaatcccccaatattttcaagtatataaatataaaaatagtatttcagaccctacttctaaatctaatgttattactatttctatatttctatcacatctgcagctacttcctctgctgcagtttccaatcctgtaaatcatcataataggcccaaatatggaataacttttcagtacttggaaatgtagtaaacccacagagtaaacactaatcagctgagaaatagggtgatgcctgatcacaacatataagattcatgttgatgttggatttaattgcatggaatctgcatttcctaaattttatacatgtctacagatatttagaacttctgttcaccaaggtggtaagcaaatggctatgtttgcacattacacaatatgacagaacttccaacctatactaaatagtacctagagttattttactgaatctataatacttgctaatataataaaataaacatagctataagactatttacatggaaatatatgctataaatgaataaagagatattcatcataacttttcattgtgctttgaatcgaaccctacgtgcaatagtatgctttacatatattgatatctatgaggtatgatacttatatcttcaataagaccttctaaaaatcaaaatgtagggaattcaaggtagcctctccactattgcttagattcttagttggggtcatccttgttatcactggagatttctctagtgccagatttttcattaagtcaataatggttccctctattaaagtatcctttccttgctctcctctgttcttcaaccaacttgttcttctggatctctcatattctcctcctacatccacttctcctctcccccctccgtccctcccacctccctgcctccctccctccccacatgctcccaatttatcagaatatcttgtccctttccccttctccaggggaccatgtatgtctcccttagcctcttccttgtttcttaacttctggagttaagaatacctggagttgtggactgtaggctggttttcctttgctctatgtctaatatccacttatgagtgagtacataccatgtttttctttgtgtatgtgggttacctcatttaggatggtttcttctagtttcatacatttgcctgtgaatttcaagatttcatttttttttttctatttctgctgagtagaactactatgtaaatataccacattttcattactcattctttggttgaggggcatctaggttgcttataggttctggtattacaaataatgctgctgtgaacatcattgaacagatgtccttgttgtaggaatgtgcttctttggggtatatgcctaagagtggaattgctggatcttgtggtagactgattctcattttcctgaggaaccgccatactgatttccaaagtggctctaagtctttgcactcctaccagcagtggaggagtgttcccatttctccacatcttctccagcataaactggcattggtgtttttgattttagccattctgacatgtataagatggtatctcaggattgtcttgatttgcatttccctgatggctaaggatgttgagcaatttcttaagtgcctttcagctattagggattcctctatcgagaattctctatttagagatctaaattctatattcagagatctgtacccctaaaatacccttcttctataatgagattgaagaccaccttaaatgccatcatagagccttcatcaagtagctgacagaagcagaagcagagattcagagctaagcttgagccagacacatggagtccacttgtagagagggaggagtgatcagaagatgggtcatgactatgctggggaaaccgacaaaaacagctgatctgagcaagaggaagttcaaggaccccattctgtcagctggggaaccaccataggactgaaccaggcctcctgaacatgggtgtcagttgggaagcctgggtctgtggcagtggaaccagtatttttccctgatgtaagaatgggtttggggagcccattccctttggagtgatatactcttggcatagatacctggggaagggcctaggtttccgccccaaatgatgtgacagactttgatggaggtctcaccctccctgaggagtgggtgttggggtgggatggggaactggtggtggtaatgggaaaatgggaaggagagggaactgggattggtatgtaaaataaaattatttcaaatttaaataaaaattaaaaaataaaaaacccaaaatgtagcatttttattttaagaaagtccattatctttactagagaaagaaaagatggatctcaatcataaatgttcttacaagattcagcagattgtaactggacattgtgcacatatatttaaagtatgactcacctcacaattttaacctcattactaaaagtaaagatctcaaactaaagatagaaagtcattgattgttttattttcactatgatttttattcttgtcaaaaaagaaagcattaccaaaccttatcatgttactaagccaggaaatgtaaggcaagatacttaataaacatttgtgttagcacaatttaagatggaagttcagtggaaactcaagaggacattattctatttaaaacgtttgatttctcaagtatttctctcaatgagattaggaaatacatattttttaattcaatgtctggttttaatacacattttaacaccatcaagaatgaagttactttgtattcaggagaaacagtcaaaaatggagatcatatcattaaggcagttaacctagtttcagaaatacaaatagtatgttctttctcatctgagctttctagattttatatagatacataaagtaatatatttatatatggcaagaaattgtaagtgaaattgttcagggtacaaaggtgacaaactaggaaacagggagagacacagggtgtggggatggaagtatataaatacatacactcgtagggaaattttcaaaacaataagaaaatagtggcacacatatcatatcttaatatcaaaatatcttttatttgacttgagtgtgatgtgtagacaccttatagcatttattcatctggttttggtattttcagagaagcaaatgtcatcacactgaactaatgagtaagtatgaaatttatctttccagagttactgttctagtaaaggttccagttacttcaactgagttcatacaagagcctcatgtccctacctttcttctataattgcctcatttcaactatgtaccctcgatggaggagctaaattgtgtttgtgtgtgtgtgtgtgtgtgtgtgtgagtgtgtgtgtgtgtgtgtgtgtgtgtgtgtgtgtgtgtgtgtgtatgagcacacacatgcctagtgtatcacattacttttatgagaaattgatttttcacttagtcctcgaatgatatgtaaataaccctcaagtaaaatatgataaattattttatattttcctaggaaaataatgtgtattttaattttctttctcctcctcttctccttttctatttttatttgcaaatttcatcaatatcttatccttcattcatctctgtgcagtcttccttctcctgccttagccttggactagctaggcttggaatggcaaacctatacattttattattaacttttctgtcatacttgtactctctgctttttcttagtagttttgcacatgctcagaacattatttctatgtcctagcagtcctgcttaagcaacaatcagtaatgtatgacacagtattattgagttctctgtgtgttctaacagccaccaatacactgcatcccttgttctgtagactttatttcattgtcagtatttcatcatccaggatagtccttcttcctcatttctagggaatgaccatgagtttatatatttttatagacaatgattagcattttccacttgtaaatatcttatgtgggcagcaaaaaatcctgtagaaatttattttgtgttttattagaaccaatctctataatttcccatagaggcaaatccagtgagttattttgtagagaaaatgtacactatatatagcttgaagtgtttcaggaaaacaggaaatcataagcctaagaacttaatttgttcttttacaatctctacatgagaataaccttctaatctttaatcaaagcaagaagtgattaaaacaatcatagcttaatgaagccccagtcctttcataagaaacattttgaaattctaacacaccacataagccaatttataagttgcagacaaaattatactcagaggaaaatttggtattgtaataaatacatggatttaatattatattatcacaaacaactcaagcaaaatcaggtacacaatttgcaggagttattgataacaaaaatgtgtaagtacagtggactgaaaaatgaatttagacaagtctggccaaattttcctctgactataattttgcctgcacttataaaggtatcattggacccactagactagaattacagttctttctgagctgggtgctgggaaccgagcccaggtcctctgttggagcagcaggtgctcttgactgttgagccatctctccaggcccctcctcaatgatatcttgtgaatgaagtccaggacttagatgaagcaaataattcctctgaactaaattgactgctattatatgtcacctgtgcaaaatcagcttcaagaaagtgatgccctaatactgtactgagtgttcattatttttaatgtttcacactcagatttccctgtaaccattgtcacctgaggcaggagaataatagttcctggaattgttatttggaactttaattgtcggatttcaaaaggcatatcataatgcctttaacattgatttgacccatgtgtgataaatgcaatttatgttgattaaaatggtcaaagttttttaattaaagtacaattaaattgtttttccttttcccttatctccttctatgccctaactccttccatgcctttttttgttccatcttaaattcatgccatctttttctttaattgttgctgctacatctgtatgtataaatgaataaatatacaaacacaactggctcagtccatttagtgtaacttaaatttataagaattcaggcctggcactggaaacttaccaaacttctcaagtcaagtgaggtaatggatcttagagaattatcatctaccatcacaaaacaatgtaattcttaatcacattctaaatagttatccttcaaccagcaggtaagtttagctacactcctcattaaagaaattgttccatgtgacagaccaatactgaatgccacacgctggtcaaatgcagaaaaaaaatcttgtgactacatttacaatgcaactcatgcaactaaagctcaaggagcattgaagaagaggaacagaattgttatacgagccagaggttgtgtctcccagaaatggccatgattcattaataatatggctgtgtaaacaagacctgaacaagcacaacactaatagatgtgctaacaaggaaggcagacatctcacatggttccatccataaaggaggatctgatgacttcaattttaaaaagaaactaaaattttcatttgattctgttttcaaatgtccccttttcccttttcccttttttcatttctttcattacacatattccagatctatactatttgatatcattttaacacattttcatttatttcttatggacttaatttattcagatattatttatgctgatatcacttcctttctggcactttaaaaattactagtaattttagattgtggccttttcattgactgaagactggttagtagtcatggaaactctgcagagcttatgttgaggatgccttcatctgagaagggcctgcaatctcaaataatttttgctttatttggtagcatatttcttagactatagagacaataaaaatgtcacaggcactcaaaatcatcaaggatgctcaatgagcataacaatctcagtgcataacaattttctctttagtctcagctaccagatattcctctattttgttgtccctgaacagcctttctttccctcttaattctttcaccaaatggactttagagttatctctgttttctgggggctgtgttctggctccattgatcaatactgactgttgccttggcaggatctaaacttgtgcaacagagaaacctctggccatgtctgtaaaagattatctgggtgaactgaccttgggtctttatcaaaaagaaaaagtgaactgagtgccagcattcatctctccttcccacctggggaaataatgtgagccacttcctcaagcctctgccactctgccactgtactttttccaaaatgagctctgctttcagtctgtgagcccaaactagcttttagttcttttgtcaggcattttgtcatagcaccaaggacagtaactaacatatgatctatgtgacttgcaaatgtcctttctccacaatcctctgagtaactgttttgctattaaaattatttaatttagatgtaatgagtttctgtttttctcccaaccttctcactgttgatgaattatttcctatatgtgaatttttttagaatttaatcaattttgttttctgggggtccaatttttcctattcatgtaaatcccatgaggatacaaaacccttattttcttgctcattgtaatgtagccattgttgagtctgggagcataaaagagagtctgaaaatatgttatgtgaatagatggttgaaatcattcgtaaactcagcctattttcaaatcaacagatttcttttataattaaagaaagctatattagattaaaaaataacccgatttgctatttttgccctctctaaggagattgtttaaaaacagacgtgttatgctttgttgcctagaaacctgtgagacagatatttaagccatcaaaccccactctggaatctgctgaaaacattgagccacctgtaatcactgacaatgcacatggtgcatgtgttccttgtaattgcgcacaggcaccataacaaagcagagaggtattgttgtaagattgaaggaatagcactgaaaattctcaactgcatcatcataaataagctcgggattttaggagagtagatgatagcatgaacttattcaattattaagatatcttctaaagtttgctgaagtttaaaaatctcacaagacagaatgatttaatggaaaccacatcagctcaatgcagttcaaagctgccccaacaaacgagttaagccaatttgcaaatgtcaaacatgtccctttaaattggttcattaactcacttttggaaagctgtgtcaagaaccaggagttactggcattgctcattagcagattacctggacagggtaaataagtttagatgaaatcagattgagtagactaccttaaaattcagtgcagcctagcttttccaactgctctttctctggtgggttattgaaccatttccaaccatgcagattttaacaagtatcagggaatatctctgccaatgtgcacaccgaggctccctagcagagacacaggcattttgttacagtttttactaatgattttattgacaacaggaaaaccatgaacaaaaattcaaagagcacactgaaatgattggttgtaaaaattaaatataacaaagatagaatagcactgagagaaaatataaagtaacacaatcacaatttgttgcctatcagaatgtccaagatgacataatttgagatgcataattttagcatgaggcttcttcccagaatctctcattttcatttaatattccatccaaagctctctttttttctgttgttccttttatttgaaagggataaaactcatatttaaatgagatgcaatcatagaagagaagtctattatattaggacttgttaccaccaagaacattctagaactagtatcgttgaaacatacagcaaaatttaagatacagaatttggatttttatatgctaaagtaaataaatattttctgcagactgcagcatggcattgtaatacttaatgaatgtaggtatcttatgtttcctaacttttggtgcagtacttcctagtgatgacctgatggctgaggtctcttgccctctttcctcatctggtaaagtgggcacaaaaatacttgtaatgtgagccaagcacatgaaacatacccaagtgttgggcatctatctaataatgtagctcttctgtcatcagcacacacatctatattctatcagatatttgtcctcaagaacatgatagcttaggatagtttactgttagaatgccctcagtttccataattgtcttactgtttagaaagcattttatactgggaaaaagagatttggacataggaagaaaatctgaatattgtgttcatttgtcttaggatgatagagaaagcctgatacagagataccttcaaagtacacactacttccaattgtgctcctaacccttccaaatttcttcatggcatgggcaatgatcagttctcatttggctatgagaaacactgttagggtgtggaaggaaaatgccactgtcaacttgattactaggaaaacctcaaatattttatggcaacatagaataaaatacagcatatattaatgaaaatacctattatatttcagtaatattcagttatacttatatagtatataccctgtatttacatatatctgttaagttatgtaactgtatatattacatggacaatacatactcacatgagtatccataatcaaaagtctttcatgcagcatttcctactacttcagtttgtatacttctacatactaaaattacataaactttctcagacattccttaaataatatatatttaatattttatatatttctcgttcttattctgaaaagcaaataatgttattgtttccactccccagatacaaaatgtaatttttctatgaccacaaggcagagaagttatgttgttcaagctgacaattccagcacttgagaggctgaaacaggaggattttgccagcttgaagcctttctgggctacagtcgattccatgtgagtcttacagtgagacctttccccaaaacattaaagcaaccaaatagactaaaaggaaagagagaagcctagagagatagcgtttcaatggttaagggtgaccactggacagtcaagaagccaagcagcaagcatccacagagccagttagacatcccatgcacactactaagcccagataaattaattcttctatcccatggatttgaacatacacgactgagattaaagaatgaattcccagagatgcttcctcacctttaagcaaacatgggcaccaacaatgccacttcctccctcccacttccaggactcctggtattaccagtggagctctacacatttgctttagcacaaaactagagctgcaatatcaaggactgtccttgggcacagttcctgtcattgggaaggtctatttaagacaatctgagcactttctttggtgttgttttggaaatataacacagacacatcacttattgcaaatatcttaatttactttgaatatgatattgtagatagggtctttttaaaaatgttgcttgataacatcttccactggataacgggtatcattactgacacagagtcagggggtgacatttctatagctctgaatacaatttttactgattcatatgaaaaatactagggatatttaacagcaaaagaattggttattttctgaagtcacattttaattggcctagtcatgttcttatgctttttaaataataaataagactgaaaatgcctttaatacaaggtacatgatataatttatttctgagattataaatagaggttcagagttttctatctattggagtggcattaacaagaacgaaaagtaataattgaaattatgtatggttttttgagctataatttagtagacaccatattgatcctgtaaattaccacactacagagtctgtctgaacatttaagacatgttatagaaccagcctgccccacagctttgagacattaagataaactcacagtgatcagtccctttttcactatgaagcaatgaactgactgtaaaattcttacagtagctgtgagaactaaagatgaatttagcattgcctggaacctaggaaggaacatatcataatagttttagaatatgaccaaggagtatttttgagtgtggactattctctgtcaatctgtttctaataggcttcatattttttttttcatttaagtctagggaaggtgactgctaagtcatgaggttactcaacagacctaagtagagacctgtgcaataacaaatgtctatgacagaagctagctagatcttgcatctactatgactattatgtgggtgaaggatccagtgggaaactttcaactctaagcaggcctctgtgtcactgcagacttagatggctccttgagcagaaggatcctccctagcattacccattgccttagttggggtttctattgctgtgaagacaccatgactgtggtaactgctataaatgaaatcatttaattgggctggattacagtttcagagatttaatccattatcatcatggtggacacatgacaacatgcaggaagacatggtgctagagaaggagttgatagttttacatcttaatccataggcaataggaagtgaactgtgtaactgggcatagcttaagcataagagacatcaaacttatccctaaggtgacacatttcctccaacaaggccatacttactccaataagctacacagggtaaatacacttgccccatcaagctgggggaccaacctcagagcccacatggtaggagaaaaaaactgatttatgtgtatttaactttgaactctgtgaactgtagtacaacatataacaaatgaataatgtaataaaaaattaaaaaaggaagcccactgtgcaatagcctgttgcacagatattttaacactattgagacatgcaggacctatcacaatggtattctcagtatgtttcagattttatgtgaaacaaatattcatatgaatttgtaactcctatcaccacagtattaggaacaacaggaaaatatttctgcatcaatttatcatgttactgactttggaacttataaaaatgtttttcacagaaataaagctctgtgttctcagaatgaaatgaatattgataatattggagaaagatcatacatagaaatatctgcactcctaggcaaatgtcaagagatctacaaggttgtgttattcttttgtttaaaaagaagaaaagagaaatgctgagacacgagacatgttgaccataagtttattatgaggcctggcagagtagggacactaagaagaggaaaggaacagggtaaatggctgaccgccatggacggttgccatagacagaccgagagagagcataggtgggagacagagtagagagaaagcagggagaggaagcagagcagaaacagagagcataaatggtcagggacctgtcttttaaaggagtcctctgcaccctcgtgcagacttagttcccatggaaccttgggctgaccagggtactgcctgttccaccaggtaacaggggcaggccagcataatgcctgaacctttcaggttgacttcaactaacaatctaagcaatagtcaagaggctaccttaaatgcccttcccctacaatgagatagatgactaccctataggacatcctagagccttcatccaatagctgatggaagcagaagcagacatccacagctaaacactcagctgaactctggaatccagttgcagagagggaggagtgatgagcaaagggatcaagaccaggctggagaaaattatagaaacagctgacctgaacaagggggagcccatggacactagacagatagctgggaaaccatcataggactgttccagatcccctgaacaagaatgtcagtttggaggtttgattaatctatggggcctccggtagtggatcagtatttattatccctagtacacgaatggactttgggagcgtgttgtgacccggcatgtctcagctctaagccacaactgccatgaggttccacctgagtggtggtgcatgtacctggaaactcctagcaacatagcagctataaagaccaaacacaggcatcttgtcatctttagcgagctctcagtttcatgttgtaaaactagagtcttttgtttatttgccatcttttctgctgtttctgaatggtcctgccatgaccaggagggaaccatatctctccttgttctcctctctcctctggttgcttgcccctcactcctgtcctccctagttacttacaccccttggacctctgcccaggggcagacctattcagatgtttaggcacaatagagatgcaaactaggaggtgtattccccttaggccttggtaaacaatagtagccctacaggcaattaacaatacaatggtgagccagagttttctggtgctccatgtttactgaaacagaaggctcgcccccaaaatatttcataaacagaattatttggtcccccacaggagcccactccacatagagggatactctctcagcctagacacatggggagggtctaggccctactacaaatgataaggcagacattgaagatcctccatggcctcaccctccctggggagcagaaagaggatggaatagtgaagggacctgctcccctttcggcggccataacagcccaaacacgtgcttgccataaacctgccttggtcacttagaggtcagatgcctgtctcgtgacaaggaaccaatcagaagttagctggtggcgctatgctttannnnnnnnnnnnnnnnnnnnnnnnnnnnnnnnnnnnnnnnnnnnnnnnnnnnnnnnnnnnnnnnnnnnnnnnnnnnnnnnnnnnnnnnnnnnnnnnnnnnnnnnnnnnnnnnnnnnnnnnnnnnnnnnnnnnnnnnnnnnnnnnnnnnnnnnnnnnnnnnnnnnnnnnnnnnnnnnnnnnnnnnnnnnnnnnnnnnnnnnnnnnnnnnnnnnnnnnnnnnnnnnnnnnnnnnnnnnnatgtcctataagatctcttgggaggccctcggagccatcttttgctagccatccgccatggcgggtgggtgaaagacctgagctaacatggggttagctcgttaaattacaataaagcctcatgcagtttgcatcaagctctcgaatccgcctggtgattggggtgaccgcgaatgtggcctgggaccccggatacctgagttttccgggggtctaacatttgggggctcatccgtgatttgcgaccacccctcatctgagtggattcgatcttggaggtaagatgattcgagcttgtaacttatatgttcaatgttatgttcaatgttctgtatgtctcttgctgttctgttggtttggtgccatgacttgaatttgatctgtacctatgcaggacttgtacttgtatttacttgtatttgatatttgtataattcggacctcagggggaaatagacttatttcgagaccctgaagtcccaccctggacgaaagtccgagggttatttgaattgaaccatagggtaagcagacatgcaggcccagaaatagacgtatttctggaactcttggttccgccctggacaaaagtccaagggttgtttgtaattttggtttggggcaccatttctttaccgaggtttgtgctgtctaatgtctgtccacgtttcatatttgtgttgtgtgtttgttaagcatctctttctgtccctactgcccatgcacatggcatgcatgggtcaggggtcttttcttgatgctctgagcatgtggcaccacctcaactgtgatcggcagatgtgcccggaggacagactgctgcaccgaagacacccaggaggtatgaacggaggccaaggacttggatcctcctcagttatcggtgattgtaaccacagggttctgccgcccgtcttcccggtgccattgccttataagtggcaccagtggatttggttggcgtctgctctttcctgtctattttgtattatcatcattggttttcaattcaggatccaccatgccaccccctttctatccccaccttcaggtctgtgaggcatgccaagtggggctgtttctgccccagctgccgtcctgccatgggtcctggcttgccttgggagtttccctgctctgagggaacatggctgcaaggccgccatctgcctggctgcccggccttttctgtgctccacactcatggtatgcaggggggctgcaggggtctttttcccacctctgcattggccgagggtctggggttaccagcagcacccctaccccaggtctctctgccttgagcacatggagctcgagcgtatgaacttatcaggcctgatccagacttcttaaaaaaaaaataggccttaaagttattaaaaactgtaaaagggactttgataaaaatttttatgttgactgagaaatgaggaaaaatgtaggagacttaagtaataaagagtgaaaggaaaaaaggaaatttgtctaagaatgtctaagaaagtcagagaaataaactaaaagtatataaaaaaggttatagagagataaagcaagttgtcaaaggtcagaaaaaagactgttcaaaagagaaaaaaaaaatgtaaactgtgctatggtttctcatgtctacaagtagtaaattttaaatatgtacatgttaacaactgtcctttaagaagttcagggtcaaatatgaagcataaacaaattgttcaactctattgtgagtctgctgtttttcaaacaaatatgtcattattcttaccttcaataaaagaagtaaaagaagccatatcaatattttaggattacatatcttacattgttactccaattgatagatcagcataaatataaatgtaggaggtaatcattaattattcaggtaaaaaacaaagaaaacagaaatgggcttaagtaggggcacttagcaagtttctaacaaagtgggagagagaaataaaaagcccaggtactctctggcagccagcatcttggggttttagcacttggacggataattaactctgacaggttaaattaacatgaacataaaacagaggaaatctatctttgtgagtctctctgccaggaaacacaagcctgtaattgctgtgatacagctcttcagcatgaagccagtccactgcttatgtcattgattgatttgatagttcaagagtctactccagtcctatgtgcctggggattactcttttcacaactgtagattctcttgaactctgtgcgtgtagatataaataaatgccactctgaatctacacatatgctcttattaatttctttattttatttcatttggcatttggggatagcaaggggcttgtcagaactcagtgccctacaggctggcctctcttctattaggtagtctggggagatgtcagagatcccatcttaagcagaatgatccacaccaccatgccttatcatcacaagactcaccaaaatcaatcctaccttctttaacttgcttcttgtcaaatgtttgcttggaaagacagtagaagtccattccactaagaatgtgatatggattagcccctttaatcccatacgaacttttacttgaaaaaaattgcagttcagagacattaagtacattacataaaaccaaaccgctaaaggaaaagaaaaaaaggataaagaaaattttatctggagacttgtgagaaataggtctaatttgtgaacttccatgctcttgtttaaacttgcactcatgtaacactggactctcagccctgtttgtgtatgtgtgtatgtctgtatgtgtgtatacacctgatagaggaaatcaaagctcttcctgaaaacccagagttcacagacaaaactgtatcctgaatccatgaattcttttgaaagttaaataaatgaatccatgagaaatgctaatccctttataatgtttcctactgacttaatgggctgcaatggtgggtttggtgccctttcatcgaaaagaagatgaagcccttttaaaggtttaattgttggggttagaagctgatttgcttttatctgatcaatattactctgaccaagtatcaattaagctaagaaggctcctgctattgaataaaggaagggctttaattaaatcctattctctagctttcataatgacacagagaatcagtttttgctgtatttttgaactaactgtgaataggcagtaacttaggactgaaaatccaagacttcagacagattggcatttacataagagggacacactgtaaagtggactgtgcttcttcttgttcactatatatattctaagactgcttcaacatttatatcttcaagcacattcacccttaaacagcttcatcttcatttttttcatgttactctatggcactggctctcaaccttcctaatgtggtgaccctttaatacagtggcttatactgtggtgatgcccccaacattagattattttcattaatatttgatcattgtgattttggtaatgttataattcataatgtaaacatttttggagatagaggtttgctaaatgtgtcttaatccacaagtttctgttttctagttcctaggatttgtactttccacctttttttcctttcatatctcatgtagattagaacataaaacacaacactttaaaatatgtcctttgttcatcacagccctgcactggataattgcagatgccctagaaataccaaagggatcttattttgctatgttcaggttgcctacactccaatgtgtctctgatgagatgggtttatcccatcatctttgctagttcatccagatagccacatctcaacattaactggtgtatataattgcatttgccctccaattgtttcattgtatgggatatattcatgactctcgcttttgttgtatgtttgtataacaaagcatattatgtagacacagacattgactgcacagagaggaccaagaggtgagtgaccagcctcccatctagaccaaacagcctataggtcatagaccccaagacaaaaccctaggctctcccccaatgcatctcagccacactaaactaacccgtcagtgggaaaagctcctaaagacaagctacaccagcaagtccccctcaagaatatgcaatctacaagtcctattcctcctcccaaattcacacaccaccagagaactcagaggctccctgaggcacagacagggactgcactgagctgacctagagcagctccctgagacacaggcagctaccatactgatcagtccaagagaggctctctgaaacacagacactgactgaatggatcagaccaggagacaaagacattgtgtgcaccaactggaggaaaagatggacagatgtcaatgcaagattacattcaacaactgaaagagcaatagggcaccactagaacccagaggtcctacaacaggaagacctgaagaacccaacgaagaagaaaacaaatttaaaaataactttatgaagattatagaaatccttaaggaggaaatacaaaattccctgaaagaaatagaggaaaaggcaaacaaaaatggagaaaatcactggtctcttaaagaaagccaagaaaacaacaacaaaatcaaacaagtaaaggaaacagttcaagacttgaaaattgaaagagtgacaataaagaaaacacaaaccaagggatttctggacatggaactacagatgcaagcataacccacagaatgcaagagattgaagagagactctcagacattgaagatatgatagaggaaatagattctagatagaggaaataggtgaaagaaaacattaaagccaacaaagtcataacacaaaacatccaggaaatctgggcaccatgaaaagaccaaacctaagaataatagtgatagaagaaaatgtagaataccaactcaaaggcacagaaaatatattaaataaattcatagaagaaaacaatcccaatctaaataaggaaatgctaatgaagatggaacaagtttatagaacaccaaatagactggacccttgctacataataatcaaaacacaaaatatacaaaatagaggaagaatattacaagctgtaaagaaaaaagtccaagtaacatgtaaaggaagaaccaacagaatagcagcggacttctcaatggaaactatgaaagtcagaaggtcctggatagatgttatgtagagactaagagaccatggattccaatgcagagtactttcccagaaaaattttcagtcaccatacatggagaaaacaagatattccatggcaaaaccagatttatagaatacctattcacaaatccagccttacagaaagccctagaaagaaggaaagctccaaacccaggatgttagctgtatgcacaaaagcacaggtaatagatgattccatgccagcaaaccttaaaaaaggaaaacacactcaccaccacaaaaaataacaaaaatcaccaataactgttcattattatctgttaaagtcaatgaactcaaaaatcccctataagaagacacaagctaaccagaatgaataggaaaacagtatccattcctctgcttcatacaagaaacccacttcaacttcaaagacagatattacctcagagtaaaggggtgggaatttttttccaatcaaatggatctgagaagcaatctggtgtagctatccaactattgaacaaaataggccaaactaaaggtaatcaagagataatgaaggacatttcatgctcatcacaggaaaattccaccaatatgatgtatctattgtgaacatatatgactcaaatacatggtcatacacatttttaaaagaaacatttctgaagcttatattgcacatcaaaccttcacactaatagttggagacttcaacaccacactctcactaatggacaggtctaccagacagaaaattaacagagaaataagggatcgcacagatgttatgactcaaatgggcttaacagacatctatagaatattccatgcaaacacaaaagagtattctttcttctcagcacctcatgaaactttttctaaaatttaccacatacttgattacaaagcaagtcccaacacataccaaaaaattggaataataacctgtacattatcagattactttgcttaaagttagacttcaacaacgacacaaattgtagaaagcttgcaaactaattgataccaattaatgctcaactgaatcactcctgggtcaaagaagaaataaagaaagaaattaaggactttctagaattcaatgaaatttaatgcacaacatacccaaatgtatggaactctatgaaagcagcactaagagggaagttcatagcactaaatgcatacttaaagaagttggagaaatcccatattaacaaattaacagaatacatgagctctagaacaaatagtaaaaaaactcaagcaggagaagtagaaaacaggaaatgatcaaattgagagctaaaataagaaacacaaataaacagaacaatatagagaatcaatgaaaaaaagagttggttcttagagaaaaataaaaagatagacacaccattatccaaactaaccaaagggcagagagaatatgcaaattaacaaaatcagtaatgaaaagaggaacataacaaaaaatactctggatactcagagactcattagatcatacttcaaaaacctttactccataaaatcggaaaatttaaaagaaatggacaattttctggataggttccacatggtacaattaatcaagaccagatagacaatttaaatagacagatagccgctaaggaaatagaagcagttattaaaattctcccaaccaagaaaagcccaggatcagaaggtgtaggcacagaattctatcagaatttcaaagaagagctaactccaatactcctcaaattgttccatacaatagaaacagaaggttccttgccaaactcctttaatgaggctacagtaaccctgatacccaagtcacacaaccatgcaactaagaaagagaactacagaacaatcttcctcatgaacattgatgaaaaattactcaataaaatactgactaaacaaatccaagaacagacaaaaaaaaaaaaaaaccatcatatccaagtaagcctcatctatcgtataaacaaactgaaagaaaaaataacacattatgatgcctccagaaattcttttattgaatagggttgttttggctatcatgggtcttttgtttttccatattaagttgacaattggtttttcaagatctgtgaagaactgtgctggaattttgatggggattgcattgaatctgtagattgattgcttttggcaagattgccagttttactatgttgatcctacctatccaagaacaggggagatccttccattttctggtatcttctttaatttttttctctaaagactcaaaattcttatgatacaggtctttcccttttttggttagcttaacctcagggtattttatgttgtttgtggcaattgtaatgggtgatgtttctctgatttctttctcagcacatttatcatccatatatattagggctactgattttttgagttaatcttgtattctgccaatttgttgaaggtgtttatcagctaaaggaattatatcatctgcaaacagtgaaagcttgacttcttcctttccaatttgtatccccttgatctacttttgctgtcttattgctctaactagaacttcaggacaatattgaagagatatggagagaagggacagccttgtcttgttcctgatttcagaggaatagctttgagtttctctccatttagtttgatgttagctgctggcttactgtatattgtttttattatgttcaggtatgttcctgttatccctgatcactccaggtcttgtatcatgaagggatgttggatttttcctgatttcaagctctattatagagccatagtgctgaaaacagtttggtattggcacaaaaacacacaggtagaacaatggaattgaattgaaaaccctgatattaaccagcacacctatgaacgcctgaattttgacaaagaagccaaagctatacaatagaatgaagaaagcatctttgacaaatggtgctggcataattggatgctggcatgtagtagactgcagatagatccatgtctatcaccgtgaacaaaacttaagtccaaatggatcaaagacctcaacataaatccagccacactgaacttattagaagaaaaactaggaaataccctcgaatgaattggtacagaagagcatgtcctaaacataacaccagtagcacagacactgagatccacaattaataaatgggacctcctgaaactgagaaatttctgtaaggaaaaggacacagtcaacaagacaaaacaacagcacacagattgggaaaggatgttcaccaaccccacatctgacagagggctgatctacaaaatttacaaagaactcaagaagctagtctccaaaataccaaataatccaattaaaaagtagggtacagaactaaatagacaattctcaatagaggatctaaaatggctgaaagacacataagaaagtgctcaacatccttagccatcagggaaatgcaaatcaaaacaagtctgagataccatcttcctcctgtcagaatggctaaaatcaaaaaacaccaatgacagattatgctgtagaggatgtggagaaaggagaacactcctccactgctggtgggaatgacaacttgtacagcccctttggaaatcagtatggtgactccccaagaaaatgggaatcagagaaagtgggaatcagtctaccacaagatacagcaattacactcttaggcatatacccaaagaagcacatctgttcaactatgttcataacagcattatttgtaataaccagaacctggaaacaacctagatgcccctcaactgaataatggatagagaaaatgtggtgcatttacacaatagaatactactcagtggggaaaaaaaaagcaatggaatattgaaattcgaaggcaaatggatggaattagaagaaatcattttgagcgaggtaaaccagtcacaaaaagacaggcattgtatgtactcactcatatgtgcattttagacttagagtaaagtattgccagcctgcagcccaggctcctggagaggctggtaaacaaggaggaggctaagggagacataacatggccccctggagaagaggaaagggacaagatctcctgagcaaattgggagcatggggggaggggagcgggaactaggagaatgagaaggggggaagaggaggggggaggaagacatgatgggacaaggagtttgagttgggggaagaacagaagagagcaagataagagataatataagatagggagacatcataatttcaaagaaaaatcaggcactagggaaatgtctggagttatcaaagatgacaccaactaacaatctaaacaacagaggagaagctcccttaaataccctctcctgataatgagattgatgactaattcatatggcattgtacagccttcattcagcagctggtgtaagtaaaagcagacacccacagctaaaccttgaactgaactgatctagatgcagagaaggaggactgatgagcaaaggggcccatgccatagtggtataacccacagaaatagctgacctgaacatgggagaactctgggtccccagactgataggtgggaaaccagcatgggactgatccagaccccctgagtgtgggtgtcagtgaggagaccttggaaatccatggaaactcctgtagtagatcagtatttatccctagcataggtatggactttgggaacccattgcacatagagggatactccctgagccaagacacacagaggagggcctaggccctatgcaaagaatatgacagactctgaagaccccctatggaagaccttgcccctccctagggtagggatgggtagggttttaatgggggatggtggcaggtgatgaagggaaggagagggaactgggtgtgacatgtaatacaaccttgtttctaactaattcaaatttttaaaaaatggaaaagaatgtcatcttgcaaggatgctatatgttacaacttaaaaataaaaacaacttactttgaaactaactttaactaaatatatcaatgggatagttgttacagcaatcatagtgggtgttagaatatatacatttaaaaaccttttaaaaattaaattggaatgtacaattcttttaaaaagtctatacctacagaatgtataattttaaaagtataaatgaattttgagatagcatgtttaaggtgtagcatcaattcaaaactggtttcctaatattttaataaatattaagttatttagtgtagccctttctatacaatatagattggcaaacagaacatctaggtacttaatttcaaagcccacaactataaagagaaattactatgcttatatgagactttaattttttaaaactgcatgtaacaagtaccaaagactgtgcaaaatgtgtacggcatgagtaaccaacatactgctttctgttgtgnnnnnnnnnnnnnnnnnnnnnnnnnnnnnnnnnnnnnnnnctatgccaatttattgtaaaaattgagtaagtggctccataaatgtaaatgttttgttaaaatattataattgtctcaggctattataattgattttaaagatgaaaaaactaagaaattaaagacaaaaagaataagaggtagacagttctctgttagctcaagcccagactgactaaacgaaattgatccagttttaaaagaaacagctcacacaaaggtgatctcagcacctgggatcacaggtctttaatttaccatgctgcataaccctcttatatacaaatgataaactggttgagaaagaaatcacagaaatgttaccctttacaatagccacaaatataaaataacttggggtaactcctgcatgacaagaactttacgtgcctaaagaaagaaattggaaaagatatcagaaaatggaaagatatcccattctcttggattggtagagtaacataataaaaatggcaatcttgcaaaaagcattctacagattcaatgcaattcccatcaaaatcccaatataatacttacagaccttcaaagaacaatattcaacttaatattaaaaaaaacttactccttttagaatggctaaaatcaaaaacaccaatgataatttatgctggagaggatgtagagaaaggggaacactcctcgactgctggtgggagtgccaacttgtacagccactttggaaatcagtatggtgactcctcaggaaaatgggaatcagtctaccacaagatccagcaatcccactcttaggcatataccaaatagaagcacattcatacaacaaggacatatattcaatgatgttcatagcagcactatttgtaatagccagatactggaagcaacctagatgcccctcaactgaagaatggattgagaagatgtggtacatttacacaatggagtactactcagcagagaaaaacccaatggaatcttgaaaattgcaggaaaatggatggaacaaaagaaaccattctgagtgaggtaacccaatcacaaaaagacaaatgtggtatgtactcactcatatgtggattttagacatagtgcaaaggattaccagcctacaatctacactgccagaaaagctagtaaacaaggagggccctaagagagatatacatggtcccctggagaaagagaaagggacaagatcacctgagcaaatcaggagcaaggtaggaggggggagggaggtggaaaatgaccaggggataagaggaagggtgaggaggacatgagggagtagaaaggttgagtcaggggaagaatagaagaaaacaagaaaggaaaaaccataatagagggatacattttaggtctacagaaaaatcaggcactaggtaaaggtctggagttatatgaggatgacaccatctaacaatctaagcaatagaggagaggctaccttaaatgtcctcccctgataatgagactgatgactgtcctatatgccatcctttagccttcatccagcagcttgtggaagtagaatcagacactcacagttaatcactgaactgaactggaatccaattgcagaaaagaacaattgatgaacaaagtagtccagacaaggctggtgaaacccacagaaacagctgacctgaacaagtgggagctcttggtccccaggctgattgatagctgggatacaagcatgggactgattcacatcccaggaatgtgggtctcaatgaagagatctcggaaatctatgggatctcctgtattagttcattacttatctctagcataggtgtggactttggggtccaatccacacagagggatactccctgagccaagacacatgagggtgggcctagtccctatcccaaaggatatgatagactctgatgacccccctatggaaggcctcaccctccctgtggagcagaaaggacatgtgataggtagggttttagttcaggaggggtggtagaggaggatgagagggagtgggaactaagaggaacatgtaaaacaatcttgtttctaattcaaataaaaaaagatggaaaaaaaacagaatagctaaaacaatcctgtacaataaaggaacataaggcagcatcattatccttgatgtcaaactctactatggagatataggaataaaaacaccttcgatgattggcaattgaataaagaccctgacattaatgcacacacttgcctggcgttggtggcacacacatttaatcccagcacttgggaggcagaggcagtctgatctctatgagtttgaggccagcctggtctacagagcaagtggcaggataggctccagagctacacagagaaactctgtctcgaaaaaccaaaaaaaaaaaaaaaacagaacaaaaaaatccacacacttgtgaaacctgatttttttttttttacaaagaagccaaattgtacaatggaaaaaggaaagtgtcatcaataaatggtgctggcagaactggatgtcaacatgccgaagatgccacaaactgatgttcaagtggacaatgacttaaaaaataaatacagctgtattgaaactgatagaagagaaagtgggaagtagccttgaacacattagcacaggataccacttcctgaacataacaccagtagcactggcactgagagcaacaacaaatgcaggagacctcctgacactgaaaagcttctgtaaggcaaaggatgctgtcaataggacaaaatatcagcctacaaaatgggaaaagatcttcaccaaccctacatctgacagagggctgatctccaaagtatatagagaactcaagaaactagacatcaaaatacaaaataatccaattgaaaattgggtacagtgctaaccagagaattctcaccagaagaatctcaaatgacacaaaggatatttaaggaatttctcagtatccttaatcatcagggaaatacaaatcaaagcaactgtgagataccatcttatgccttccagaatggctaagatcaaaaatactaaggacagctaatgctgtagaggatgctggtgggactgcaaacttgtacagccagtttggaaatcagtatgaaggtttctcagaaaattgtgaatcaatctttctcaagaccctgaaataccactcttgggtatatacccaaaggatgctgattcttaccactaggaaacttgctccacaatgttcatagcagcattatttgtaatagccagaaccttgataaaacctagaggaccttcaagcaaggaatggataaggaaaatgtaatggattattactcacctgtaagagaaatgacatcatgaaatttgcaggcaaatggaaggaactggaaaaacaataatcagtgaggaaacttaaactcagaaagataaacatggtatgtactcactcataagtggatattgaatgtaaaggaaaagatatccagactataattatccagagaagctagataacaagtgagaccctaagaggaatgaatggatcctcctgggaagggaagttagatgagatctcctgagtaaactgggacaagaggcaggggcggtaaaggggaggacagggggaatgagaacatgcaggaatgggatgttagagggggggaaggggcagattgtaagatcagtgaaagagatatcttgatagagagagccactatttggttagggagaaacctggtgctagtgtaattctcaagaatccacaaagatgatcccagctaagactcctagcaattgtggaaaggatgcctgaactagccttcgcctgctattagattggttgaaaaccccatagatcatcaatgagcattcattagtaattgatagaaccagaagcacagatccacaaccaaacactaggccaagctctgggaatccagtcaaagagagggaggatggaatatatgagtaagtgaggtcaagatcatgatggataaatctacagagacagttgaatcaagctcatggaaacacatgaactctatatcgacagctgtggagactccatgggcccaaacttggccctccatatgtggttgacagttgggaaacttggactatctcacaggcccctggcagtagggccctgatacaaacatgatacatgagttatctttttggaggccatttcctgtggtgggatgctatgctcagccttaaaatgcatgggagaggggtttggttctgtctcatgagagcccttaccctcaaggaggagtggatgggggattggaggagtcaaggaggatgggaagagggttgggaggaagaactgaggttggaatgtaaaattaaacataaaaaataaataattataaaaacaaagaagacaacataccacattctctcaaaatgtccatatgttagtttactttggtaaaattgaaattcaacaatttaacagtaattttattcatcactctacaatgggtatcaaatttagagcttagggannnnnnnnnnnnnnnnnnnnnnnnntctctctctgtgtgtgtgtgtgtgtgtgtgtgtgtgtgtgtgtgtgtgtgtgtgtgtgtgttttgcactgcctgggtatcacctttcatgtatcaacttccgtgtatcctactctataactttcgatattttgttttctttactgagcgtgaagactgttgttttagccagacaaatgactaacaagctcttaagacccatctgtttctctccacactaccaagaatacagacatgaggagcatcagcaaggattctgggaatctaagctcaggttctcatggttgctgcatattgcacaaattacaccatctctccatttccctagagattctattttaatgtttagttcattcaaaatggtagtaaattgtattatggggaaaagtagaaagcattactgccttactaataattttataacacataaatatttgaatttcaaacatgagtgtgctttaattaatcaaagtaacaaagttactcctgaattgcttacaataataagccaaagtgaaccatcaattaattttagacattgggcaaggaagtccttccagaagacatcaaatatgtcacccttcctactctaagctataacacattgggtaattctgtctggagatttaatctcctgatttgttatctaactttttttgtcctcagtcactgtcatacactaagccaaataattagtgtcaaatgtcaataccataattctaagttaaaaatcaatgttgtggtgctgttcccagtggaaaaagtaaggataataatgatgaaacactatgcttcattgctaatcacctactaaaatgaatgacttcattagaatcatttccagtttcatttctaaaatatgcaccattgttcttgtcatgatagaactatatgaggcaaaattatttttctccaatattcttcttgttccattttctccctttactttaaatttacatcttctttttcaaaattagaatttggttgaaaatggcagagctagtatataatttccattaactgggaaatcctacattttcattgtggaagcttattatatcaatgcatgttttgatcttagaaaatatgagtattcaatagaggctattgcaaaattcagtggtggagcacaggtactgaactaataaaagagtggattaaatgctaatcacagcatgtatagatagattgtagacagatgatgatatctagattgaaagataagcagattgatgatacatagatacactttatatataatgtatgaattcatgtatgtgtgtgtggtatgtgtgtgtgcatgcacacaaatagccaccaaagttagttaacaagcaatcattgctacattttagtttctagaagcctgtggaattaactgatctaacctacattcatgtattataattaatatgataaattagcatacaataatactcattgtacaagaaaagaaacaagaagagtaaattttatctgactgcagaaattgtcctaatcaatgcttgctttgttcctaaaatacagattctttgttcaggataccttagtcatgagaaagggtttccaacagatctaattttaagtataaacagcttctctttttctctctttaaaagaagcaataagccatcgtgcttgttcatggtgacaaatcacagaaaaatgcacctaagtatgagaacagaaaatacgtggtctcacttgaaaaacttgccaattgaaaatttccaaagaaacataaaaacgtacagcattggatgtcaaaggcctttttgtttgtttgtttgtttgttttatttttgaagacagagattctctgtgtagctttggagtctgtcctggaactcgctctgtagaccagtctggcctcaagatccatgtgcctctgcctcctgagtgctggaattaaagcaaatgccaccaccgccaggcaaagatttatttatttttatgtatgtaagtgctctctctatatgcatgcctttatgccagaaaaagacatcacatcccattatagatggttgtgagtcaccatgtggttgctgggaattgaactcaggacatctggaaaagcagccattgctgttaaccaatgagccatatctccagctctgggacttgtaagtataaaatccttccatataacaaccctgagactaataagttctgtgacatgaaaatcaaggcatcttatcaagtacattttacatggacagacaaaagtcataatatgaagttcttccatattcccccattttaaactttaatccattttattttatttttatgactgtgtatgtatgtatacatggtacaggcacatgtgcatgtatggaggccagaggacagcctctacttacatttgtagaagatagtcaaccttcattgagaccaggtctctcattggcatgaagcttatcaaagagatattattgactggactgtaaaccaagagaatctctgtctccttattatctttgggattataaacacaccagactacaaaacctgatgcccagtgtcttggcatgggagctaggactcaattaccaggcagctttcctgagaaccatgcagtccctcatctacattctccttccttcttcacactaagtgtttatttaactttatcagttcttgttataagcacagcttttatggctgagtcatctctccagcaccttttatgaagagaaaggatgtatagatggggggagggaaaaggggagttttggtggagggactgagatgaagagcaggagggaaggagggagaaagggagggagggaaggaagagaaaatgtgatcaggctgggaaaaattaattaattaaaaactctatcagtttttgtgatgtgcttcagaaagaaaaacagaatcaaagaatctgttatcttcacttatctcataacatacatgcacagtaatcatttaacaattttaatgatactgtttattctgacattgttaattaggaggagtccccaaggtttctggctatattcactggtagaaaggtagagtgacatttctctggttttaggtttaatccacagaagtgtaaagatgaacaaaaaagaggattcccaaagcacagtgagaggaggaatgctcatgtttaagtacaactagattgaaatcatctaggagacacacttctgaacaaggctgtgaggatgtttctagaaatgtttgactcaggagataagacctagcttagtatgtgtagacatcccataggctgatgtctcaactgagtataaagggaaaatgggaaaaaacaaacaaaacttcaccattcacccctctctgcctcctgactacagataccaggtacctgccacctcaagctccagatgccagatctaatcctgtaaccatgactgtccagcctgccaacataacttttctgctataataaattgcactcttaatccacaagtgcaaatacacctttcctccttatattgtttcttcatgtattttgtcaagcaatgttaaaattaatataaaaacagaataaaatcaggatgattcttaacataatttaaacaaccctgatataaactctcatttgtgtgacataataagatctaaatactgtgaaagaaattattctgagaaattgatgcctcttgtaacagaagacaagcagattaactttgccaaatttttggtagattttttttttgtttttgcttttgtttctctttttcaagacatggtttctctctaattctggagcctgtcctgaaactctcactgtagacaaggctggcctcaaactcacagatatccacctgcctctgtctcccgagtgctgagattaaagtggaccaccaccacctcattggtagaatctttagtttaacttcacagtttaaattttgccttagttaatatgagaatgttagagaagaaatgatggaaggagatacttaatcagtaataacatagtccattttcaaaacaacacaacttttccttagaatctaatcttttcttgaattttccccaagtttcttattaagggatagctatagagagctgtgattattctaattatgaaatctccatgatcaggtttaccagaaagaagcacctgctgtcaagtctgatgacctgagtttgatcccagggactcatggtagaaggagacaatctagtcttgaaaggaatcacctgacctccacacatgcactgtgtacacaagcaccttctccattcccccacacacaggcaagaaaataaaaaaataaaataaaaaagaatactggagattaggtacctttcctaagaccatagagctagaaattgtcaaatgctatattgaaatgcagaaatgtcataaggcttcacacaacttttagaattatcatggtggccaaagtacttggcttatatagaaaatgaatcttaactttaaaagataattcaggaaacttcaaagggaataggactgtagatgaaggctatttgggtgctagccagatggatggatagtactagaaacttctcaaaatgtgctgaacatcaactgttgtgatttggcctatggagactctatattacaataatttagtgtttcatattccttctccagttgtagcataagatattaaattaagagttaattaaaactttaccttatcatgaaaagtttttatgttgatatgttctgtgaagattatttaaaaaataggtatctggattcaaaagttcacattctccatgcaagaagatctcatgtaacaaaacaattagtctgctctcagaaaatagatttttcaaaaatttccaagatattgataattatagggaaatattattagaaaactacagtagcacacaaaggaattctaaataatattagtttgtgtttagattataaaatccaataattccatgtgaactatattgtttatataaacatatagtcttattttaagtacttgataataacagtacccatcaagctaaatcatttgatttcaggacatttggagtgaatatatttttgatgacatggaaaattctttcccattgttatacacacataatatgcttataggatcagttatttagtatttcaattttgataatatattttatattatcaacaagacttgtgaaataattgtaattaagacagctacagagcctttactgtccagatggcagcgatggtcaaacacaaattagctttacataaagcaaactagctgtagttcttactgtttataatgcaagctagcagtgtgcaacctaaactaactgttcatcatgcaaataagctgtttatagtgtaaactaactacttagaatttcctaccccaaacaaaagctcttcatctggatggtatgtatatgtggcaatgccacagaaaaatgtagtaactaaatagtttcgagtatttattacattaataacaaagacagatcgttaaaaatccaaatatttggcatttgcataatggtaaaccatctttatgtctagatacttaatgaatgacatagtccaccgacactgtaggtagacagggaacagctgttgttcaacctactttgtattgtatctcttgctttataattttttgcagaagtaatatgtaataattttgatagtttatgtcctgcacaaaattcgtaaaagaagaaaataccacttgtctatatggaaacatgaaattataatatataaatattaattcatttaatttgttccaaaactaatacagagatttacttattgcaaaaaaagaaaaactactcagcatcaatatcaaattccttttgtttggaaagaaacattggagaaatacaagaaaacccaactaagccatacagaaataaaaattactgtgttcatgatttttatcttgctaaaatacataatattttgagcgctgattataaactcaccaagttattaatcaacacctctctgttttgctattaataaagtaatatatgttttactgtgctctgctgatttcccaaatatccatgtgtatatttaatgccacttggcaaaatgaaaactgttctatatttgtatacctctctacataattgtgtcttgtacattaatttgtttatatatcagtgaatttctattatgcagtctaaaacattcaaaaaataaccatttgaaaaaacattcattgatttgtatattatacaacgtattttatgcagatttctatattccttttcattcaaaatagtattatagttgctgaatgaccctcattgacagttcaaattttgtctggccttgcttttctaggaagatgcacttgaatctggtgccttagaccactcggccaccctgacatggccttgcttttctaagataattacctgaatatttttacacagacctccagaagttctgtttcctatatcattcatccatgttcaaatttcagtttcaccttggccgtacacaggtgactgattgcatagatgttgtccaatgtaaatacattatagaaaaaagttttttttgcaaaacattctgattgatttttcaaatctcttcttcttggatcaatgtttttattgttttctgtcagaattttaactactgttaaacctcattaagaaaataatttctcattcaaaatactgtgttgttcatataaaatagaattactcatttgaatactatatatatttaattactaaaattataaagattatatatacataattttaatagagtgaattcctcatttacattttgtgaagcttattttgttctattataatttggggatactttttcttctcttatatattatatctaggccatagctgaattttcccctctctcctcctgtcctaatctccccatttcccttcttaaaagggcagtcttcctaggaatgacaactgaacatcacatatcaagttaagcaagactagacaccttccctatattaaggctagacaaggcaacctagtagaaggaaaagtgtcctaaaagcaggcagaagagtcagggacagctccttctcccagtgctaggatacccacaagaagaaaaagctacccaactgtcacatgtattcggagggcctaggtcagtcccatgcaagttccttgattgttcagtctctgtgaggccctatgagttcaggtgtggtgtcttcaatccctctggattcttcctctccctcttcttcaggattctctaagctccacgtaatgtttggctatgggtctctgcatctgtttccatcagttgcttgatgaagcccctctgaccacaattatgttaggtttctctctattagtgtagtagaatatcattttattgacttttgtttggttttgctagttgtacttggttctatcataggtctctgggatttcttgactttggttccaggccttcaaggcagtgttagtaatgggttccctctcatggcatgggtctcaagctggaccagccattggttgtccagcccacaatttctgaaccacctttatttaccccaatacatcatgcagacagaagaaattatatgtcaaaggttaacgctgggttggtgtcccatccctccactggaagactttcctggttacaggagatggcatattcaggttctttattcactgttgctaggagtcttagctaggatcactctttgacattcttgggaatttccattgagctaggtttctagcttgtccctgacatgctccccaattccagttctctgcccctctatccttcccacacctgatccctcctgttcctgtccccacccacccccagtctacctgtgacaactatgcaattccttgttacctaacctctatctacttctgagtgagtatataccatgtttgtcctactgggtctggattccctcactcaggctgattttcttctagatccatatatttgcctgcaaatttcatgattttttaacagctgagtaatactccattgcataatgatcaccggtcattactatcactcaagatcaatggacttaattcccattaaaaagacacaaaatataagaatgtgtgagaaaacatgatccatccttctgctgcatacaagaaatacacatttcagcatcaaaggtatacattacctcatagtaaagaagtggaaaaagactttctacacaaatggagccatgaacctagctggtgtagctcttctaatatttaacaaaataggtttcaaaccaacattaaaagagataaggaaagacacttcatgatcatcaatagaaaaatccacttgagatgaaatctcaagtgttaacatctatgtcctaaataaagtgtacctgaatttgtaataacaagaaaaaaaactttactaaagctcagatcacattctggagcccaaacattaaaaatgagaggcttcaacaccccactatcatcaattgatatgttgtctagacaaaaacaaaacagaaataatagagctaacagacattatgactcacatgaacctaacagacattgatagaacatttcacctcaaaaaaaaatataccttcttctcagcacctcatggaattttctccaaaacctaccacatactgggttacaaatcaagtctcattagatacaagaaaaatgaaataacaccctgtatcctatcagaccaccatggattgaagatggatatcaacaacaacaaaaacaatagaaagcctacatgctcatggccaatgaacagctttctactgaatgattactatgtcagtattggttgatgaataaaacactgtttgcccagtagaggcaggaagataggtgggactaggagacaaggagaattctgaaaaaggtaggcagaagagatgtcatgcagagaggagatgacacaccaggttatctctgctaagataagaccatgtagaaatacatagattagtagttactggttaataattaagacagagctagccaataagtacctctagccatcggacaacagttttataactaacatagtgtccatgtgcttatttggggctgagaagggtggcaggatcaggaggaacaagaaaactccagcaatatacatatgtatttgtgtgtgcttgtgtatacacgcatatatgcacagattgtaggtttgtgtttctctctctctctctctctctctctctctctctctctgtgtgtgtgtgtgtgtgtgtgtgtgtgtgtgtgtgtgtgtgtgtgtgtgtttgtgtctgtgtgtgcatgtgcatgcatgcgtgtatgcgcacttgggcatacataccacatcacaggtgtggaagtcagagaacaacatgaaaaacatcagtgctcatgttctatcttgtgaggatttatgtagtgatatatttttatgatttaataaggccactgaagatcagaatgcaaagctagccacagccatagaatctgggcagtggtggcacacacctttaatccaggattcaggagacagaggcagaatgatctctgtgtgttcaaggccactcagggctacatgagaatgaatcaatttaaaagagaaacagagattttgcctttaatcccagcactagagagaatagaaggagcttagtgcagtctcagcagtctgatttttgggtggagagcactgcagtctaggcagtctgaggaacagtgtacaatcagaggacaaattcacccctttggtctgaggattgttagaggtcagaactctcaagtatcttggctgctttgcttctcttatcttcagcttgaaccctaatatctgactctgggttttatagtttgtgttacagaattaagtcaggttttcagttttggtgtcatgtaccttttatccactgatctatcttgtcagccttgtaatgatatctcatatatagaaataaattatattttgactgaggcaatttttgtgcagttaaaattggttgaaaagaaacagaaaattttatctcttggaggtagtgaaagatagggtacaaatgcagccaaattcttactccctgtatctcatttataaatggaaaagtaaattctaagtaatttcagaaaaataaaatttactagtacaagttaattttttcctattttactcaaacagaaatggttccaatggaaggccagatttctcaactcagcacaatgccagggttatgcaatttaaaacgataaggatgtgactatatgtaactgactagcttcattgagattttatttctctcttttgttggcatcaaaaacagcataaattaatatttctttttggctacccatatatcctctcagacttggaaacctgggagcatatttcacattacgctgtattcttaattagccagctccatcctcttattgaagcatttttaaatacccacatatacagaaaggtagctgacaccacttgactcataatgtgtgaataacacacagaattgagtagtatttataattcatctcctggaaaagtttatctgccttctttatatactggaacatcaacaaaattatcagttcatatagtttcggtaaaattcaagtttagagtagattttaatagactttattattaatataaaatttaaaactttaattagaaggaattctaaaatactgcaaattgtatcacattttacttgttgtttctcccaactaaactgaactgcaaatacaaaatattgaatatgtaatgggatttgtattattgtaggaaaggaggaattttgatgccaggaaggacaaatggtttgtgttgtatcactaatgatttggtactagagatatgaatctagccaacacaaatcagaatgagtacatttctgctatcataatatcatgcataccatggacagtggtcttggatttaaatgtatgagttcttaggaacagttaaatctataaatgtaatagaagtgtatcagagcactagacccacaaacttagatgaaattttatcagaaacatatccaaattgaaagtaaaacatacccaacacaaggaaataacaaacatttcccattttcttagatttggaaatgaagttgcatgtagttttattagaatggacactgctgtcaaagttataataagtactgtacacacactatttgaaatacatcaatagatgaataatttatcacatctaagtattttaggatttaataactttatttatttcctgggattgcactggcattggatatttatcatcatccaatgaatttataatatggagtaacgactaagtgaactcagcattacagagcaattcaaaagtgttctctgtagagtgtagtagtctgccatatagacagtgaagttgggtgattgattatgggaacagaaccatcattatttgcagttccatatactatatccatgccaagtcaatgtcaacactgcttctcaatgaaaatatcacagtgatgcaagaccacactgtgctccaatactcaggaactaagacctttagagtaattaagtcacaacattctacaaggaagatggctgcattagcatgcttctctgctacatgaaacatcttttcttgacacatacattattaagcctatccaaatggagagcaaataactgccttagttaggctatacttagctagggtttactatttatagagatttggatcacactgcccatgcttggaaatttttttatcacaactcaaaaaacttgaatagagtggaagtttcccatgtttcacacatgcgttattttctcttgggttagatactactgttgtaaatattaggtctgatatattagttatttttaccccagttactttacatatacaaaagaaacaaattttccactactctgtaatactttgaattttgaagaatccagtaatctctaaagaattagaacaaccctggcatgcaattcgtgctcagtgatttgttataataattacaatgttgtgactttcagtgcttttggttaataaagtttgccttcctttgccaattaattggtcacagttattgaattcctactatgcgttcttttttataattattaaaatgagaacatgaagatcttgatatgtcagttacaaccacctgcatcttcttatttgagtataaggagggacagagttaaataaaccaccctttctgggacgtcattctggttctttgctctagctatccacactgctgtcctgtatcccacatatcacattcatcaacagagaagtgaagctcttcacacttaaaaaaaacaccaccaaacagaggacagaaagaacatgtatgcttacaagtgaaatctaaattttatgcttctgttgtctactgctacatcctctcactgctcacacacagtggcaggaaacgttattagctccaggaaattatcaaaagagcctttgaaaggcaccgcctaggttatgaaagaggatcaataattcagaaaattatatataaatacttgagtatactattgaaatgtgtcgttttggcattttgatttttttagatttaatgaaagcacatttaaaacaccttccaggggactggaaagagagctatgcaactaagagtgtgagctgcttatttagaagacactggttcagttcctgacactcacataggacatctcatggccacctatatctacagcaggatcacagagtttctggattctaggtgcacctgtacccacagggaataaacacacacacacacacacacacacacacacacacacacacacacacacacacaccttaagatacaataaaacattaagaaataaattatctttcagactcaaatttaacagaaattaatgtcacattgctgttactatgtttatactctaatttaatacagaaatagtctaattcttttgagaaattactaaaaatactcaaaatttaaaatattaattcaatgaattctaagcatttggtactttatctttcgatatcttatccatggagagtgtagtttcttatttatgacaactcttgcttttatcaagagttttatcatttgtcaaaatcagttttttaacaccaaatttcaggaacagttttgcttcagtagcatttctgtgctaagtctttttccataaggacctttgagatctgtgggcttacactgtacatttcaatacattagctgttgttggtatgcattaccatcattgctgtgtgtaaagtctttgaagacatatttagagacatacagaacttccattttgatatcatggctacttcccaagaacctgtaactggaattacctgaactgccatactatttaattatagctaactgtcctatgacaatataaatctgaacttattattaaactgtaagccttctgtcattaacttgtaaatctcaggcactagagccaacttgatcatgcagtcagcctgccagttccaaagagtctggtgaccaatagccataactttgccagtctctgccagatattgtataatgaaagtaaatgatgtgtggagagtataatcaatattactgggatgtctataaggatgatgaatgactggttttggcagagtcaactgctttgaatagaatgtaaaacatgttccttcgatggtgccaatttcctagatagtattgtcatgaaaagagatgacctagagtcaagtaaactgataatcaacacagctcttgggcaatacataaataatatgtgttcaatttatcgagttgatgagtacaaagatgacctaaagtcacaatactctttgtcatggatccagaaacaacagttccacgcttaaaataagagttttcaatctggtcaattttgttccccagaaaatattttttcagttatacattgtgccatactactaggaaacttgcaaacagaggtagagaattctcattatctttcaagaacacagcttcctgtatattctcctacaaagacttatgcgacccaaaatgttaatgtggatagtgataacccaagttatagtgataacccaaacaaaatttaactttgtctagtgaaatggctcagttgggaaaggcacttgctgttgaccacaattcaatgcttaggacagacatggtgtaaagagaaaatagaatactgcaagttgtcctatatatgctacacaatcatggtggcacatatttccctccccataatacacacataagatgaaatttgaacttcagataatcaacttcaatgggataaagtcaggctattgtcttctatctggtgttcaaagatgttttctcatcactgctgtccaatgcttacataaatatttatacaataaaaataaaaatcacacacacatagagaaaggaacataattgtagatgcatcttatggcatgaggcttattcaagtttctatcagagttaatagctatttgaagatcatcactaaaaataaaggcatgtacttttaacattaacatatatgtgaaatagttaagaactttgaatgtatataataaagttaacatttgaataataaaaatataactattttttataattgtctttgcagatattctgtaatgatgatgtttaaacaaaaattatctaggtgtctaatttcttattcacagttaatcattcaatcagtttttgatgagtgtgacctaagagctcaacactagcttctcacttttctaaaagcctgtgttgaaaatcaagactcgaagaacactgagggggatgtgctccacactacagtgagatccacgtaagccccatcagacttcagcagggcaacaatttccacatgtttatgagttcacgaatcacttgaaggtacatcttgcaaaatgatgagtaccaaagaatgcagtttaagagaagtgaataggaccctcgagtgcatatttttaaacaggccttagggtaatgtaactggtttccacaatagtttcagaaatattggcttacttttagtgttccaaaattgtaatccacaaatggctcaagagggaaagactgaaagcttgggtattatacaaagtattgttcactccttagttcaaaacacatctgccaagaatggcagtattaaggtcacagttataaataaaacagagaaactgttaaaatttacactacagtgtaaagaaactgaaacagaaaaaaaaaaaaccgataaactttacactacagtgaaagagacaaacaatatattattaataccatgcagaatgtatattaatagttgtgatagtgaatgaactcaagatttgtttaatataatttaagaaattcttgtaattaaattttcttcaccatatggctctctgtgaggactcatgattctgtcatgcagtattgaaatgtttttttttcttctttttaaatttacattagaaacaatattgttttacatgtcaatcccagttccctctcctcccctcctctcctccccccactgatcccctatcccatcccctttttgttccccaggaaggtaaggccttacggccataccaccctgaacattcccaatctcatctataggggatcttcaaagtctgtcatatcatttggagcaaggcctaggccttccctcatgtgtctaggctgagagagtatccctctatgtggaatgggttccccaaatccattcatatcctagggataaatactgatccagtaccagaggccccatagattgaccaggcctcctaattgacacccacattcaggaggtctggttcaatcctttgctgatttcccagcttacattttggggttcatgagcttctccttgtgtaggtcagctgtttctgtgggtttctccatcctggtattgacacctttgctcatctccgctccctgtctgaaacttggttttaggagtttggctcagtgtttagctgtgggtgtctgcttctgtttccatcagctacaggatgaaggctttaggatggcatataagttaatatcaatttcattaccagggaagggcatttaaggtagaccctccactattgcttagattattagttggggtcattcctgtagatctctggacattttcctagtgccagatctgttcaaacatataatggttccctctattatggtaactcttttcttgctctctcctattttttccctgactcaatcttcctactctctggtatccacctctcccctcctcttctccccttctttttttcctaacttgctttcccttcccccatgctcctaattggctcaggagatattgtccctttccccttttctaggggatcatgtatgtatgtctctcttagggccctccttatttcttaccttctctgttggtgtggactataggctggtaatcctttcctctatgtctacaatccatatatgagtgagtacataccatgtttgtcttttggtgactgggttacctcgctcaaaatggtttcttctagttacatccatttgcctccaaatttcaatattccattgctttttttttcaacagagtagtactccattgtgtaaatgtaccacattttctgtatccattcttcagttcaggggcatctaggttgcttccaggttctggccattacaaataatgctgctatgaacatagttgaaccaatgtccttgtttatagatgtgcatcattgggtatattcctaagagtggatcttgtggtagactgattcccattttcttgaggaactgccatactaatttttaaagtggctgtacaagttttcactcccaccagcagtggaggagtgttgaaatgttaatgtatatcagactaaggagccccgtgttttgcatcaaatgacatcatatatttgtctctaattatacatatattttcatttctaaaattatatgcttttcattttgattatcattgttccctgttaaaaatcatagataattaattataattttagaaggtttcttgtaaccttactcttacctaaaaattattaagttcatctgcttcaatgatgaagataagatgtagggcatctatgttaatactttttttgtttgtgcccactataagactctagactgaaagagtcaataagcatgactaaaacaaaatcaattaaatgaagtaatgtacagatttgaaaccaagagaatgtaaatttaaacatttattgattatatactttcttgaaaatttttgtacttgattgtaaatggtgtttaaagagatcataaaacaacctcattagactagatcaggtgctttcagggtggtatggtggtagacaagagaagattgcatagtcccttgaagaaggggatgggaacaagaacccttgaccaaagtgggagcctgggagaccgggaaaggaaggagtgccttcatcctgttgctgttcaaagcaaaaacagacacccacagctaagaactgaaccatactactggaattcagttgtggtgagggaggagggatgagcaaaggagccacaagacggggctggagaaacagtggacccgaactactgatagcctggagatccttgtcataaagctggggaaacagcatttgaccaaaccaagccccctgaatgtggatgtcaactgggaggctaaaagagtctatagggtcctctaacagtggagccagtctttatccctaaagtacaaatgcacattgggtgcccattccctatggagggatactattgcagtccagatacagcaaggagggcctatgccctcccccaaaagatatgacagactttgaaggtccctgttgtggggggtctcactatccctgggcaggagttggggctgagttggggggggttggttgggaacatgggtagatgggagggtgagggaatggggggatggatatgtaaatatgagtagtgattaaagaatttaaataaaaattaaaaaacaacctgattatatttactcataaattctttctcatatttgtgaaaagaacttggaaaatagaaaaaaaataacccaaataaactagacaaaccatattggaaacaacatcattttattcaccacattcatgagaataaacataattacaaaactatgtgggtcaacatttcaattagtattaaaaccaaaagcagaaaaaaattgccttttttctgggtgttaaacttcagtgatttggcttctcattttaatcctagagaactaatttttagaccaattctcaatcattgagtggctcatccccagtcattatgtggttcagcaatcccagtgaagcagagcagagttctcacagtcaaagcacaaagccttgtttctacagggctctcaaatgaaatcacaccagaaggaagaggttgcctgatcagagagtgagcattcatctctgtggatctgcaaacactgcctggtattttgtgtaagatgtggagaaattgcaagaaaggaaatgaactcctgaaggtatagaccaacagggtagggaatggtatgaaactagcaaaggggtggaacaaagaagggtgaattctcttattgacaaatgtgcattacaggatacaagatttgccattcaaaatttcagcaaatctggcattctgtttatttacttattgatagtcaagaatgaaaaaaagtaattattaacttaaaaatatcttaggttttgtattttaccccattcctatactttaaaggagtttgtttttcattactgatgaacacaaactttccccttaactctgtatgtatggctgcaaggataaggtgctgacagtaaactttgtaagccaacagcttgtatgctgagatactgtcatttacattggaactagacagaaataatgggtcccatagtttcactggtcaataattctgcttgtcaattgtttttaagtatttagtgaaacagaactgaaaataaactgaatacatttaattatttttttaaataataaaattgtgtgtgtatgtttgtgtgtgtgtgtgtgtgtgtgtgtgtgtgtgtgtgtgtgtgtgtgtgtgtgtgtttgtgttcgcacgtgcacacacatggtgactacagaagccagaacaggttgttcagtcccctgcagctgatttgacaggtggtgctgagatgctcactatgtggatgctgggaactgagcttaaatgctgagccatctgtttagacccaatattcaaatcttgtttacatgattttacagtttaggattgagatccacaaaagaagtactaataatccctaaagaatattaccaaagctaagttccagatattatttcatttttccctaaaaagtactgaagagggtgtggtaggaagagagtgaggggagaggggacctgtggtttttctagccattcagacagcatgttctcagacaggtgataagtcagtcagccaatgatctgaatcgtatcttcttgaatagagcaagaacaaacacttcccaggtatcagataatagtggttcccttctcttcaacttgtggatatttttgcatatttttaataattttatcttctaactcttctatattttttagattgggctttctatgccattcaggctgcaacaagatctctgtcttcaaatgactcctacctcaacctgcaagtggccaggagggcaaaagcaccattgtctgcccctggggtccaaaactttttagtgccaacattatgtggaatagaaaggcaactcttggcaaaataaagactgttctatatgaaactttgacatgtgaacaacaaggatttcagaaagatttagaaaactgtattaggggaggaaggatggctcaggcaatgacagaagtcccacgtttaattgtcagtacccacaaagtggaagacaaaactgacacctacaaattgtcctttgtactcagcaagcatgcttataacccatgtaaccacatactgataaatgaattaatgtaaaaaaaactatatataatgtactctttgtgattgaaaacactgatttgggcattcatatgacattattaaacatgattccactaggaataaaaattccagattggtaaaaagaaaacagaagtgtcactaatgaatctaagagctaagagataactatgattgttttatgtatttccctagtttctaatataaccgttcaggcttctaatttcatagtggttgacataatttgatgaaactgctaagagctgtaaaaacagacaatagtggttattagatgcatatcttactgtttagaaagtcctgattggcatataaaattgctttcctctatgaatttccccatcaacattataaaagaaacttatatgtaaaaatacaagtaactttaaatacacaaaatgttatgactgtcagaacacattctgtttcttggttaggcacaaatccttgctaacagcattggccatagtgaagtcatgttttaacaaatacatgataatttaaaatttaagaaaatagaatatatttttcagttaattaatcctgacaaaatctcaagaaagttcccagcccctgccaatctctgtgctatgtcagccccaatggtttgagtgttctgaaaactgagaaaacaatgtgtatgcaggtaagtgtacacaactatgagcctgtgtttgaagacttgacacatacttccttccttggtttctgtccaccttacttttagatggcatctctcattggtatgggaatggggcctactgattgtctagcctggcggaacagcaaggtgaacatcagggacttgtctgtctcctcacgctgcccatgactgtagttggaggtataagctgcattgccttgcaagtatattgggagtagggactccaccactgatcttcaagcttgcacagtaattacccactgaatcatctccctaagttgaaagtgaaaattatattaaaattatgtgactaatctgattggtgataagaatgttcctataaaaatatacagataagttattaaaggttacaaattagcgccacagagaaaaaaatagagaaatatattacttcaaaaccttttattagaatattgacttttaaagtctttgtttaggtgtaagatcatggtagctttggtttacctgtcaagttgctgagttattcaaatgatctataattccaagaagtaaagggtggtaaattatactctttcagtatagtctgcatataacttttaatttttcttatttttattttaatcagttttctaaatataaaggtatttcacttgatgtccccacactacacacttgttagaatatattgtgatcaattataacctttctaagaaatatgttattcttatttgggaaagcagtgaaaagttgcaaaatatattttagcatagtaacaagataattagactctttagtcacaaactgttctcttgccaagttaggcaacattccaaaaaccacatggcttccacattccgtgatgtgattatagaattttcactcacttaaaaagacatgaatgtattgaagtattccttcaaaatcttttccttaggcttgcaactatgtaagtgtttcaagacttgagtcccataccaagtaatgctagatgattctagaacatgatttcaatgaatatggttgttgaaggaatatatgcttaatttctgttttgttcttgttcagttatttttttaattatgtgattttcagaggctacgaaggtgaaggagaacagtgacttgagaacagttatgtaacagcatcactgaagaaaagtccaccagagaggtcatggccagatgatagctatgcgtgtgcagtccaagaagaatgtgaagagacaccacagaggagtcagagaaagataaggagataaaaatgctaacttccctgatcagtacatgttgcatcaattatataagttataccactgtacttctgaactatgttcaagtataaatcttaaacaattcctcatggtttaaaaagtcaagttctaagttccttgtttttctcagaacccagttctttcccaaaggttcctaatagttgcaccacagacattaagccaaactggacacctcttccaaatgccttaagaagttctggttcattgaaaatcatggtaaacttgataatgtctaaattttaatgagagaaataaaatgaaaattggaaaatatttgtgaataatcagtagtgatgtagaaaacacatttgaatacaacaattacccaattgacacatgcagttgctccagggagtcttccacactctcccaacatgtggagttcttgactttggaattgcccttgtaacttatgttagagccagaataccacacatatggcatgacagtcttgatgtgccctcaaatatggtgactttcctctgctgcttgctcttattacacaaagactaccacatgagtgagtctgaactcaactgcggagaacgtatgtaggaaaaccaaaagactgtgctggctgcttgacaaacacaaactatttcagtgggccacttaacattgtgtctctaatcctaatcattataaggatatgcacccatgagtgacacagcgaaacaagccacactgttgtggagtggtataaaatagtgctcctatgaagttgatatccagcttccccactctccagccttgtctatatttaaaatttctatttggaaggggttgtgctatgcaatgataagtaacagataaactgcaaaataaaaattatacattataaatttctaacttaaatggtggaattagagttagaagagaactagtgcatgtttagatgaggtgagttgtatatatatatattttttttactgtaattcggatgtaaatgtcaaaacagacatcctcaattgtgtctacattaagtaaagaactaaaactggggggcaagaataggtatattttgttttgcataagtcctcttatataacactaaaaacaccaatatcactatgtaagagcaataaatattaacaatatcactgtgcaagagcactgaaaactaccaatatcactaaataagagaactgacaactaccaatatcactatgtaggagcacctaaaactaccactatcactatgtaagagtgcctaaacctactggtatcactatgtaagagcacctaaaactaccaatattgctatgtaacagcaccaatgtttatgatcactatcacagtttctcatcttaatgtaatcaaagcataaggaagatcccttgcatctgtgggattatggattaggaagccctaacaccaaccctaagtgtatatatttaaaaatatttgggagcccaggattcctcagaccatctccacccaaaacacacacacacacacacacacacacacacacacacacacacacacacacttacttctgcttgaatattaaaaattaaagtttagtttaagatatatttttaaaatatgcataaattttgattgagtagtcccaaataaaataacaaacttttatcaagacacttaaaaatctccatctattttagacattatatgtttatggcagcattgtttggaacagatcacttagaaaaatgaatgtcattaaagaccagtataatggaaaattattatactattaaacagcccattaacaatgcatgttaatgatctgtgtcaatatccatgataatagctaaattgaagtagtcacaatattggtagagcaaaaattaagagtgtaaaaacagtgtaccgggggaggtacattctccccactacatttctgggtatcacagcagggtgacagtgtgtgtattaaagtctcctatggtgcaagcatagaatatttgattttgtatcaatagtgacatgagtcttataaatgacaatggtgaaatcatactttatggcattaaaaaaatctagtcatttgttttggaaagtaataaataactgtcacacaaattccaaaatagcaatactgttactctatatacttcatcgagaagaggctaataaatactttaagagagtcatgtaatgaaaagctaaaccaaaatgtgagcttatatggtccaggtaagttttcttgcttttctatgtatctctatgaagatacttttcaagacatatgagttttaaatgtcaaaaaaaattatttttaaaataatataacactaatatctatccactagtgttcatggttttcctatcagataaatagacaaatcttttaaacgcattggtgtattgcttctagatattgagaacttggaaatatacaacttatacctatgacctggatagaaaattaactattcattctcaaagtagagagaaaaataactattaaagagacaagtgagaaggaaaataaaaacacacaatggagaaaaaatgagaagaaaaagaggagggaggaagagagagagcaggtaaaagtaagaggtagaagagggactgaatatttaaactggaaaattaatttaggtattttagactttgggcatggctgtgttttttatatcagggcatactactgcccaatagtcattgtctgtgatgattgagaatatattttgacaacagtgtatatcttcttctgtttagattattttgctgtctagattaaaagcatattaattctgaagactaagtagagttcctcctgcccattaaactctcagtccatgtggcttctccatatgtcgatcccactcctcatctgtggctgtcattggctgacaagcctggcgtctccaacaccctgaaagtcccatcacacaatggtctcccctttacagcttgaagcactactttttcagagtttgtctggttctgtcacacaggggacaagatcaagctctgatcaggtccccacaaatatgggctaaaatggcttatgaatgccaaggcatctgaactcagaaagtgtttctctttgtatctgtacagatcagggcaaactggagctctagttttaaagccaaaactttaaatgagctcacaccctcataatgctgtcctgtgataggtggggacaggcaagtctgggaaagttaccatggcatttccctagtgtctcagagcgaaattcccagtggtaataacaaaagctgtgccgacgccttctgcctttgtttctggatatgctacgtctctggcacaacttcataatttatgttctctcttccttgtggagcatgcttcaattactattctgaaaatctcagataaattctttgaaaagctgttgcatgaatgtagtcttgtggattttcaagaacccttccttccctctggaacattttgagtatagtattcacagtcagctcttactggctttccggtctttcccaccagaccttgatgctaagctgagtttatagatttcggtgtcttttctagtgtgaccctgcacactttgcaaatgcccaccattgtaatacatcattttatttcaattgaaataagttatgttacctatgattaaaatttaaatgagtaatgttttaaaaagccactgaacagtttggatacaattgaactttttgtttctgtgtttgtgaacactgattcaggtagattacagaaatatgcataaaatgtttttaggtttcaagtccttttaaaatttgcttgtgcctgtgtgcttctcacctcctgtttaatctttgacatatacatgctacagtttctgtcaatcattacctaccacacagtagtacagcacagcttttcccatttgaatgtaatttctaagataatgatcagcctcttccacaccttcccctgactctcccagtctctgaaaggcactactctgctcttccctgaaatttcagctttgggacatctttaaataaccctgccatttatgtaaatttaccttctaaaaatataaaaattcatgccccattttttctcattttcaacagaatgggagcattcaatttggatgtgtacttttcttctattaaagcaggccacagtgacatacagtgaccgtggctgtgatgatgggaatgctggtagcagaacttgtattggcactgtggcctgaaactgatcctgtagccaagccctgaaaaatggtccctatttttggaaatgagttctttcaatgtgccctagtggaaacccttcaggcttttatgatttcctctaaacatttaaattcatgtcccgattatgcattctgactaacaattattggtttctttccaggaaataaaatatgcgttacgccatttccattcttattggcctcatgcggtctcctgctttctttatgatttgtaacttagtttatctttcaagtggtaaaagtaattttagtatgtttttgaaccttttattgaggtaaaaatatgaattaagtactgaaataaataaaataagtatgggataatgaatgataatcatgcacattaaaaattatggtattatggtatcacaaattggtatgtcatatttcatttatcttccatttatcctgtaagcttttgttaaactgaataaatagcagcattattctaaatgtgttatttagaattcagtattcagtgaagcttttagataaaatagccaatattaaattatgatcatcttattcacttatttactaaatataacatgaaaatgtcaaattagctcaggtgtttaattacatgacaaaaggaccactttataattgaagaaaactatacaatacttaatgtgctactattatgtgtgtatacatgtgtggccacagtgcaaaagtggaactcaaaggccaatgtattggagtatgctttcaacttccctttgtagattcatggaattgggctgagctcatctcttggaaatcatggccttctcccagtgagccatctagtcagctcccaaataacatttataaaatactagttatataaaattatgtgtcttctgtagaatgtactaaatgtactaaaagagagatccaagtgatatcacaatacataatactggctgttcttgcagaggactcaggttttattcccaacacccaccattgcctctatctctacttccagggggctctgatgccccttctggactctgcaggcaatgcatgcatgtgttgatcagaaatctatacaggtctataattaaaaattaaatattgacagatagttgccacacatatactatactatttgaaaatcatatacaagttattgaaaaatataaacattactaaaaaagtagaaatgtgagatgtataagtgtatgaaagcaatagttgctgcagaatagacataaaggccaggataaaatatatggggtttctctttgggaggatattgtgtatcaaatgttggcaatgtgctcaccatgtagccaaggatgaccttgaacttttgaacttcatatatctactttctagttctgggaatgcatgcccccactaccaaatatgaattatgcagtgatggagatccaattaatggatgctagacaaacgctctggcatctgaggtacatgtgcagacttgatggttatagcctggtgtctcgtgactctgcacaggaaaaagttatgaactgtcagtcaccatcactcaccatttggacattgagtagttcccactgaaaacagatgggacctgtgatacctcatggcatctcatacagacactatcttggagaaagtgagattttcctgtcaagagtcgcttgattagctttattatgtcatatttaaacaagaattattgaagttttaagtttacagttatatccagtgctctgcaatttccctatacagcaatctaaatacacgatgtgcacagcagcacaagtgccaaagcatcattagttaattgcatagttttaaaattatcataattttaggactgaagaaagcacaaggaaaaaagagacataacacattttttctttttaaattctgcaaagcagtttcagtaattctcatttaaattttaccaaggaatataatcccattttctaaaaccctttatttaataatacttggattttttaaacataaagtcctgtttccccgaagtcaagatgacaggaatgctgacgttctgatcattttctacttggaattcatttgatgaagagacattttcataggttataatgaatcaatgcgcttagaaaaactgtcttgtaatgaatgtgtgagggaactggaactatttagtcacagagctgagctttcatggaagacataaatagctgctccaaatataggtgggtttgcaatagggcaggtcctcctctcacatcaatcatcaatcaagacattgaaccacaagcttgcacaaaggcccatttgatggggtggtttctcagttggtttcctgcttccaaaatgactctagcttgtatcaagttgacatagaactaatcagcgcagtttaaggttttcttctttctccagtcctctttttttgtttgtttgttttgctttgctgtttttccagacagggtttcattgtgtagccctgactgtcagggaactagtcctatagacaatgttggtctgagtcattcacagtgatctgcctgcttttgactccagagtgttgggataaaaggcaggtaacacccccacccagcatatcttccaaagttctatggtagttcatgtaactaatactgtcctgattggcacttgactctgtttcacagatggttacccgaggaagggtacatcagtgatgagaacatggatgaagttagtcaataggttaaagagctacagttggcaatagtgagtcccagtgttcttcccttgtgtaggggagaggcaaagtgaatcagcaacaatgtgtcattttttgaatgatagtggaaagacagatgtttgaatgttctcattactaataaatgaaaaatagagatttgacatagaaaatacaacattgttttggaattatgcaaggtatggtcaggctttgcttaattctagaaatacacattaaattctctctacaactccaactttgggaactttgcttaaacttccctatgttcttttaagggtgtttgaggtaatacacaacctgagagaagctaggaagtaaggaaaacctaaaagaaacatacatggacccctgagaagtggaaagggacaagatctcctgaataaattggaaccacaggggtgggggagaaagaagagaggagaaggggagaggggaggagaacatgagggatcagcaaggcccagttggggaaacaacatggaagaagagcaaggaaagatataccttaattgagggagccattatgggcttaaggagaaatctggcactagggaaatctccaggaatccacagagatgaccccaactaagcatctaagcaatagtggagaggcttcttaaatgcccttcccctataatgaaattgttcactaccttaaatgtcatcatagatctgatagaagcagaagcagagattcataactatgcattaagccaaactcctggaatacaattgttgagagggaggacagatttgcaaaggggacaagatgatgctttggaaacccacagaaagagttcacctgagaaagtgtgagctcacagaccctagtctgacagactgaactaggacccctgaatgtgggtggcatttggggggtctgggcagtctatgaggcctctggtagtagaaccagtatttatccctagtgcatgaatgggctttgggagcctattcctatggagccatactctctcatcctagatacatgagggatggactaggtcctgccccaaatgatgtgacagacttagatgattccccaggggagacctcaccctccctggggagtagttggaggtgggatgggggtttgtggggggaatgggaggaacagggaactgggattggtatgtaaaataagattggttttaatttgaataaaaattaataaataaacttgatatttacttgtttaaaggagtggggttgagagtcaaaaaggtacacaggttgcatctgtgctgatttttaaagtttaaggaaagtgtgtatcaaatgaaaacaaacccaaagatgactttttacattattatgtgaattggtaatgacttgtaattgactgaaattgcctatttctatgaggctaatattggtgagctagtgttttctggatttgtcctcctctgtctctgaaattataactgttgaaaagggtcagctacttcactttccttcctgacagacacaatggagaagctagactagaataaatcacaattggacaaagcaggctgaatgggcagctttcactaatcccaggacacaactctgcagtccttgacatggatttaagggcaatgatggtaggctcttcattggatttgggactagtttcaagttcacacctccttctatggacaaggaaggtaaatataaaaggaaattgagtttcagagaaaccagggtcttcactcacatatgtgaaggtaactgagtctcagctactgggaggcaagctggaataggaatgtcatttttccttcttcacattaaacatctactgattaattcttcattttatccagattgttgctgttaaagaattcttgaatacatcacaaaaggtaatgttaattattactaattaacagcaatcaagacaggatacaaacacttaaactgaccagatccaggcagtggtagtgagagcctttaatcccaacacttgggaagcagaggcaggcagatctcagtttgttccaggacagccagaactgttacacagagaaaccctgtctcaaaaaccaaaacaaaagaaaaccaaaatccaaacacaaaaaacaaacaaacaaaaacaaaaaaagaagctgactagaaagcttattccataacttggaatacaaatcatttaccacttaaatgtaatataaagaaagcaattatatacttaatgaaataagtctaacaaacctttggaactccaccgtaaattaatatccaaacacagcaatgatatggaatattggcttataatacaatagataaatattaagctttaaaaagcttcctatagtctatttgaaaattcatctcaatagtttaattttatgaataatgaaataatggagaataaattattagactatatatatatatattattatattaataatataattattattatattaataatagttattatattattcaaactactttatgttcacaagtgttttatctatgtgtacatatgagctagaaaatgtccgatactctggagctggagttccaggtgtttgtgagccactatgcgaagctaggacagacctttagttctctgcaagaacaacaatcatcaaccactaagttgtctctgtagtcccaatgtccagcattttatcaaatgggtatgatctatagtatcttttactaacagtaatttatatgattacaatcattcatcataactttaaaactttggttaacaaatttttgttttaatttcaatttttgtaaatctaagtaaatatattgtctttgaattataggaaataagatgaaatttatttttcctttatatcttagaggaatgtactttcttaatagtatttttagataattattatccatttatggatcatatattacactaaagcataaccataatttctaatttttataaaaggaaaataatgataacgtgaagtatgtttttatagcaaccaacaaaataaggctaattctaattctaaggatttacaaactatgaaaattagtctaaatttcataatgtgggaagaacagtgttgaaataaatgatatctatttcatttaattttttttttcaaggcagggtttctctgtggctttggacactgtctggaactagctcttgtagaccatgctgatctggaactcacagagatctgcctgcctctgcctcctgagtactgtcatttaaaaattttaaggagtacttgaactaacctgcaacccttggccatggaatgataaaaaaacaatgatcttaattttttaaaaaaatacttattaagtttagtcttatgtgtatgaatgctatgtctgcatgtttatatatgtaatgtgtacatgcagtgcccacagaagtcagagcagggagtcagaacagaactcctggagagggactacaggtggatatgagatattatgagcagcaaatgctcttagccactgagccatctgtccagccccaatgtagtaagtttttttatttaatatcctttttattgtattaaaatttaaagaattgaatacattaatactacatttacaccattacaacccctcccacagacctccctacttcttcctaaaccattagtctttataaaagaataaaataagacattagattacaacctgcaaagacatcccatttttatgaccatctaagatattcatctttgttggcatgtatgtgacatttatgttaccattgagacaccaaaccagattcaggtaacagtactagtatgtgtaaacagattttctttcccagcttttacacagcaaccaagcacattctttagtaagaattgaatttcagagaaaacttaatttctctgtctgttgtctgtatcttcaagacaacacaggaaaatccaattattaactcatgttaattctccattcttaaataagaaagatatccctcaaaaactgcatttaaaagcttggaaaatttaaagtggtctgtggataggaaattatcagcaaacttgatatgagaatttatttggacactggaattacagtgacattgagtctgataaggaccatcacctaacagctgtttgtctattcccaaagataattgtagatcttagttccttgattttaaaattaatcaagttgcttcttaatttccccttttgtagtcagagtctcaaaatgtggcctaaccatgtcatgaactcactgtgtagatcaggctgtctggccctctgtttcccctagtctaatggagttctgggacagaaaatgagaaactgtggctttaaaacatgcatgatttaatgtgcattatttattacactctactgatttccatagcaattgttcaactgttttcctgcctctaagcttcatgttctatactctattctgtagcattcttcacattacatgtagtgataagcctttaaaacctaatgcatggggctagaagatggatcagcagatcactgaactagaggatccaacttcacttctcagcacccatgtgcacagactccaaccattgttatttccaactccatggactctgacatctcctcatcaggtttctaccagcactgcattcatgtgcccacatcctacatacaaacacacacatacacacacacacacacacacacacaatgaacaagaggaattcatattaaaaaattttatactacgtgtaaaaccaaactcagacaaatcatgtcatatcatatgctactcaaaatcatatcatcactgtctgtatcacacagaaaaggaatcccatcttaatcttaccctgtgaaagctgaattggcaggacatttcagaattcattccctctacattaaagccaaattatagtgtcttatgctggttaggacaagcaagcttatgtcctagggactgtatgacatctcatctgctgggaagacctttgtccagatctattcatggatgaaatgcctaccttcagatgctcaaggtcatcaacatgaagagctatatcctatgatagagtcacttcatttaaacttcattggaattttcataattttgtggcattgtctacttcctcccttggttttattattttatatactatattggttgttatcataatagcgtcactgatgatactgatgaacttgtatttcccagcatgacatattcaaaaggcccattttctgttcactgttacatccttaacaatgccaactattcaatcaatttcttcaaaagataaatgaatgtcagtgacactgaactgagaaatctaggttcagaagcaatgtttagtttattaacaatggaacttacatgatatcttttacacaaacacaagcattctgaagacctctttggtgattttccagacaaaactaatatgctaatatacttatcagtgcaccatgtttcaataaagcatatgatttccaacaaaggatttcatatgtcttagaagttcacaatctatgaaagaaacaataaataataaaagaaatgatcatgtattatatttaagaagtcacattttaaaagttaatgcaccaattcatcctaaatattatccaaatggtgtcaatttgttgcatacaactataaatgcagtttagaagtgagttcttattctgcagaatctcatgagttgatatataggtgcccatcattaaagaagaatagtgaaatagatttttgtgtacatcatcatcattgccccaaactccaagtgtttatggtttcaataggatataggtgtgaccataactgcttatcctactgctagtgtctactgagcaatactttctcttcatattcaaacacgttcaacttgggataataaattacagttatttggacacagatctgaaggtcagtgggaagatctggggaaggtgtagtcgttatagccatgatcctgggaacaagacactctatgacttgtttctaaaatactttgaaatttaaaggtcaaagagtcttaaaaagctagccaaaaggcagagaagacaaaccaattaagtcagaggaaatcaaagcaaagttggtgtcacagaggccaagggaagagcatgtttcaaagaactccatgaatgatactggtagcaaaggggaaatgaagacagagggcttgccagagtatgaagcaacagaaagatcattactgacattaacaatagatctaccgcaggaaccatagcaaatggaaagaatggagctgcagaaaagaaatatgtgttcttaagaggttcgctttgaaaggttgtaaaggaataggactgcaaaggggttagcaacacgagtattttaagccaggttaagtctcagcatgcaagtgctgaagcaagtgattcaatagaatgtgacaataagtggtgcttagaaaggagacagcaattataggattgatgcctacagaaaggaaagggagaaaattaacagagattacatttgtcaagaaacttgtggattttgtttctgacattttaaaaattaattttaacatgatacataaagactaatgaatgtacagaattatgagtgctgtacaatttatttaatgtcaatgggatatgaatacatatgtacacatacatgcatgcatatgtatagtggaggtttgaataagaaagacccccatagtgtcatatgtttgaatgcttggttgccacatagtagaagtattctaaagtattatgcggattagcggtgtggccctggaggaagagtgtcactgggggtgggatttgaggtttcaaaagcctttgcttggcccagtctgtctctatctcagtctcagtctctgtctctgtctttgcctatggatcagcaactgctgcagtacctttttgcatgctaccatgctcccagccatgtgataatggactaaacctctgaaactgtaagcaagccaagatttaaatgttttctctcataagagttttcctgatcatagtatgtcgtcacagcaataaaacactgacaaagaacacttacaatacagacattcaaaatcttctaccattcataacaaacactgcctaaatgctgtcaatacttaactttactgtggagagcaaagtggaacttcttactttttaacttaactaattctaattcccaactccttcctctagcctctggcaaccatcattctactctgaattcttagcaggttaacttccttttgaatgtacgtggaaactgagacagggttacaaactatgtctggatcattccatttagatcatctccagttccatctatactatcaagaatgtcagagtcccataaactttcctggactaaacaacttctattgtatgtgtgactgttctctttgcttagtatggcatatgctgtagaaaacatgggcatggctctaaccagcttccttgtagaaggaataattccaggagcaagtgagagcatatttcatcttaaaatcccacagaaatcccctagtgggcttattgttttctaaaatcagcattatcttcatctgggaaaaatgaagtgccattggtatacagaaatgaataaaagtgggagccaggtgtttgagtaggatagaacagtgttggtcagatcacatctgctggtaaaactattagcattacatgagagaacttattagaaatgtagatggtcagatatctcattagatttttatactttacatttttttattcgttcaaattaggaacaagcttgtttcacatgtcaatcccttctccctctccctctctctctccctctccctcccctcaccaacaaccctcctacccgactccgacctacccccaaccccatccaccctccactccccaggcagggtagggccctccacaggggctccataaagtccaccacatcatcctgggttaggcctaggccctttcccatgtgtccagggcaagagtgcatcccttcacatgggatgggctctcaaagccccttcatataccagggaaaaatactaattcaccaccagggtccccctagagtgcaaaggcctcctcattgacatccatgttcaggggtctatatcagtcctgtactggcctcccagacagcgtctggggtcaatgtgttcccccttgttcaggccagctgtttctgtgggtttcaccagcctggtaccgaccccttcactctggtcaattatctcattagattattataccttacatttttacaagtggcttgtgcacctctcagctctaagaggcacttaggctaaatgaagagaacaaattgacaggttaggatgtgatggaactatgcaaattaggtggggccatgattttactgtggcattagttgggtatagccttcagaggtcatctcattaatgatactttatctgtctctacttcaaagtcatctgtgcttctccagtgggtgtcctactgtcagtgaatggcacctcaattccctgccagtgttgattatgttcagtatctcagaccagtgaaatctttcatggagtcctgtggttgtttccactgacatctatcccacatatctctgcaggtctttgtcatctggacccttgacaaatctccattatctctacctgggtgcttttgagagactcctcctcattctcttcattaggtctatagtgctatctcctcctccatattctaagactcataaagtactaagtggagcattccaaactttcaacagcctctccacaagcacagctgagatataactacaggaatttaggatgtttcacactgagaagttcagacaggagttgtaaattggaggatttgaaatccacatgtaaacacttgaagcaaaaataatcactaagattttcagaggcccattgagcatctacagggataggcattggaagtttgttacctccattttaaaataataacattcaggattgcttccagttaatcataaactctgaagtcataaacactagagttatgaaggaaagaatgatttgagaataaatccaaagtatgggcttactttctcattatggtgattgtccagaggagagatgggctctgctttatttcctgatgtttgttttttcaagcaaggtctcccatagccctggctgacctcagacttttccagcaactcacattgaacaccttatcggcaaccatgtccagcatgatgggacaatggtgtgtgctaccatgagcagcttaaatgctttccttgtagttttcttttgtagatttactttggctgtctggtccctgtttttctcttttatttcagcctgcaaagctcaaacaaatctctcctctgacagtcctttctttctctgtcatttcggggtgcatgcctctccactacaggcttatttcaggtgtagggagcctgtttaattgccagttcctctgctcagtgatgcccagatctctgcatttccattttcataatcagtaaacaccagtggagaggctgacacagagaatgatgcaaaaatggttggtgaataaattatcgatgacaaatccatctttatatcagcccaggcttccagatttgtttgcaaaataaaaccacaggatgtactgattctcagcactcaaggaaaatattcaaggaatgtttgggattatgtgaacaggagatttacatagctctttgcctcatattttagaaaaataatccttaattggatagaatttagttattataaaaaccatggtaaaattcaaaggctatctctaagtacatcataagccatatgcaaatatcactgagaatctcaatcagcctgcagatattttaatgctttcttttggatttttctaaactgttttgtaggtatttattaaatccagaggtttagtggttgattattctgtatcatttattgtccctctttgattcacagcacaattattctttttaatcaagaatatttttacttggaaaacagctatgcctcaaggaaaatattttatgcagtaaatattaatgatcgatagactaactggaaagaattcatgtaatttctgaataccatggatgtttaatatttactagtttagttatttagccagatccacagcacaaccattctccaattaagtattactatttttaaaatataatatgctaagacatctattaaatgttggactgctcacatatctccctctccaatgtcttccaaatgacataaatgcacttttaaagagcaggtacaatggagagggtaaaatgacaagatgtcaacacagttggaagacaggagatctccagacaagtgggaaagtgaattcagactgacggatcttgagagtaagcagaaggtgggaggctaacaagtcaattagtttagatgtcacaatgacatgatgcttagaggctcttggaagttcaccagctgatgctacctgtactgagactagaaaggaacaaatgaaaagcttccagaatctgacacttatcctttttccacagtccataatgttaagtaagcaaaatttctttgcctaccctcaggactatattcagagcagagggaccttctctaaacaatagcttaatccagccatggatcatgcaatacagacatagttcaatacagaaatgaagcataatacaacatggaaattaggaatatctttatatataaaagaacaattcctgcaatcttttttagatagattcccagaattcaaagacagctctaattgtaccatagctcaggcagatgtgtgtttcctctagtcacaggtcaaagcagccattgggaaccaagaggcatattaacaccatgctatccatggataattcacagcgctaatagatggtaggtcatatggaaatacacagtgcttccaatgagtgcttcaaacacattattttacaacatggaacttgccattactagaagattctgaatgaaatgaatacagatctcaattaataaaaaataagaaaaaatgattgtgcaaaggatcacttaaagaaaacagaaactatggataacatcatctgaaataaaccaatagagaatgaatgatgtcaagaagtagctactataataatattaaaatcaattcataatctgtgattaaaacctgaaaatacaaggttgccatttttattatgttgatgctacctatgcaagagcatgggagatcttttgattttctggtttctttatatatggtcccccagagaaggggaaagggacaaaatctcctgagcaaattaggagcatgagggaaggggagagggagctagaagaatgagagggggagaaaaggagaagtgaggaggacataaaggagcaggaaggttgtgtagggagaaaatagagagagcaaaataagagataccatcagagagagagcaaatataggttgaaagagaaatcaggcatgaggtaaatgtccagagatctacaaggatgacaccaactaactatctaagcaacagtggagaggctaccttaaatgccctcccctgataatgagattgataactaacttacatgccatcctagagccttcatctatcagctgatggaagtagaagcagacacccacactaaacactgaactgaactggaatccagttgcagagaaggaggagtgatgagcaaagtggacaagaccagactggtgaaaccaacataaacagctgacctgaacaagggagagctcttggtccccaggttgatcactgggaaactagcatggaattaatccagagcccatgaatgtgggtgtcagtgaagaggcctcagaaatctatggtgcctcttatagtagatcagtatgtatcccaaacatagaaatgggctttgggagcccatttcacatagagggatactccctcagcctagacacatgggggaaggcctaggccctatcccacaggttatgacagactctgaaaaaaccccattgaagaccttactctccctggggagcagaaatggtatgggataggtagggtgctagtggaggccaggggatgatagggggtcagtgggggacaggggaggaggggagggagaaggaactgggattgacaggtaaaataagcttgtttctgatttaaaatttaaaaatggaggggaaaacccctgaaaatatgaaaatgaaaatagtagcaaatctggatgaagaatccaaaatctacagagataaaatatatgaaaatgcaggatatgaaaatatgacatcagaataaaacaactacagaaaaatgttggaaaacataacttttcaaaactataaatgacaattttctccaaattataaagtagaaattcttaaacaagatatttagaccagtacttcatcctccaaatgtcacacatggcacgctcatgtcacactctctgaaagtcatcaaagaatgtggtaaatgtcaaaaaaaatggtgtgtgtgggtatcttctaaggtagaactcagcctgtccccattctgccatgcaacccagctttggacaaacaacattacaaatcaaaacaaatgaaagaaccattttcatataaatattctttcataggaagattgttcctaaagcaggtgttcaacacaataaatgagaaaaaaaggattaatagaaaatagagcccaatgaaggacagttttcacataggaaaaagtaaaaaccaataaacaaatgaaatccaagaacaacaatggaagggcatcacatcctgagcaggctctcagatctgtgggatggacagagggaaaactgtgcaggaggactgagcagaggaggaaagggtgggtgcaagtcaatgggtgtggcagcggaggaggggagggagagggacctgagattgacatgtaaaataattttctttctaataaaaaaaaaaaaaacagaagtggagctgaaggatcagcagctaagtcaactatagaaaaagtttctaagtcaagtgttgacaaatacattatggttacattagagtaagaacgtgaatgtttcaaaactcacaaatgatgagattttactgtttcagatgttattagatactttagtgagtaacaatagaaaaattacaaaaaataaggcaagggttaagaaaatgagaaaagtagaaacttgatggaaggttggaaattcctttgacttgtaaagggaaatattgttttttcagacttagcaccaactagtatgatgaattgcatttattgtacactcatgttagtagatctttggactgcaattagttagaatgtttgtttgattgtgttgttttttactagtggaattgctttacgttttctccccctataacttgatgttagttaaagccttcgtaaactgtctaaatcatgtttatatatgtcttttgtatccttaatctctccaagacttttttcatgaaggggtgttggatgtggtcaaaggccttttaagcatctaatgaaatgatcagttcatttataaggtgaattatattgactgattttcgtatactgagccaagcctacacatctgggatgaagcctacttgatcatagtggaaaatattttaatgtgttcttggatttggtttacaagtattttatgaaatatttttgcatctaacttcgtggaggaatctggtctgtaattctctttcttgattgttatctcaaagaaaacctagtgcaaaaatagtagttgctagcagtctttaaagcatgtggtctcgctcagctgaataatctttgggttggaaaagaatacattgaaaattcttcaaaacaatatttgtcacttgtttaaaaagtctccagtatacttgagagttcaacatatgaagctatggtcttattactaataaccacagaatgtgcattattatgatttgttttgctataatatcgtatcttctgttatttataattatctacatatctgtgtgatgtaaaatattgaatatgtgccttagtttcatgttatgatggtaaaaatactctctttcaaatcagtaagacttaagaatgaatctgatagagaatttactgttttgaagcatatgattaatgataaattaggacattaatcccagccatagaataacatcagaatattgtgtgcttctctttacctttaagtttatttagttaacattgtttcatttgaaaaatttttccatatttataatggacttcgaatttcttatgtatttaatattgtatatagcatccactaatggaaaattaaggcattttaaaatttgattaatttaaaacacaggcttctattctacaacattactagcaatgttgatttcctatgtaaagtgcctagtcatacaatgaggacaccctgtaggtagtatctgaaaaggaccacagtgaataaagaaattattcatgtgtgttgcagtaagagcagaaactggggcttaaaaggaagacaaagggttaatggcacttaaaaggaagataaagggttttagagcactgaggagaatgaatacaagtgcttagggttgggtatgaaagaaccaagctagatgaataaggggacagacagggctctgagcctgtgacagcaggctaacttgccctcctaagtctttcaggaacatatgcaaagatctagtgtcctttagtgtagctttgcttctaatgcagctattctgggagactaaggctagatattctcaacaggcatcctcccaagagaccactctcatcatcccatagaaaaggaaccaaataagtggaaaccaagaaacaatgcattcatatctccatggaggtgatagagttaactctctctcatcagagagaggggtagtcatgccaatgtggaaacaaatgcagcctagttgcattaatggcactagagaacctgaaagtagctcagtggccagagtgactagtgggctagccattgtcagcaactatcaaacctcaagtttagatagagtgggacttcaaacacacctcactgggtgagcagcacataatcagggcacagccacatccatggttgggacaattgggcatacataaggcatgtggccctccactggctaggtctatgacaccccaaagaatttatcagtcttaacagagattgcctcagcttaacaaatcttggacacttcgcttacacccatgacagtcctggtttcttacttcactgtcttgagacaatgagcttagagccagtgttccatttgacctttggtgacaattgaatgcctagcacccaaggaccataggtcaagcacaatttcccccaaaatggttccattttactaaaaaaatcctgcaaaaatatgatttatactgataattcatgaataattaaaatattttatcctcaattttctttcaatcaacttctttaagaaaataattacatctcatattttcattgtcattgtttaaagaatttattgttccactgaattatatttgattgatgtctttataatgtccataggtgtggattccattttccacatgaagttgcaactgttaatttgtaaattgaaagttttctggattagccaaaccaagatgacacaaaacctgatagctattaaaagtaaatacatgtgggactcagtatggtttcacaaccagtacattggaaatagcttacattctcctattctggggagcatactgtaaatgaaatagcatttgaaaatggattgtaggtttactaaagaccatggttattagtataatgatttagaaaggatcatggcttttttgaacggatatgtcttttgggtattaatgtcctataagcagaaaaatgtccacacccacctcaggacactttttttttattgtaaaagcataaggtctttgtaagcaaagcatatttcaaataaccacggaaagggttctgcaatatattttctgtctctattggaaagtttcagcttacaacacacacacctctaaatccatctggtattacctccctcccacataaaaggcaattgtttgctttgctttgccagccctcaggttgcaaagcctgcttgtgcatgccttccttctgatggcttgctttatttcttcacaggcactgatcattcagggatcaaatctgtcagctaacaatttgccattaaacattctgtcaatagattgttctttttatagcttgttacattttaaaatgtgattgagctaattaaacacaactgtgaaattaagcagaaatttaattaacattcttagatggtttggggaaggacatattatcgccaaaaatgtacttgaaataaatcaaaccacacctaatgcattgacctaaggcctcagtgttactgtctggaaaatatgtttagtttttatatattttattgtttttaaatatttgtcacaaaatgctaaggtatacacagccaaatcataggctgcaaggatgtaaattgtttttatcaggttcggagaatgttgaataatacgtaaattcttttgttgaaaatatttgttcctctcttgttagaagcagacttctggtttggatttttttaataattcaaaaattgttagtagagtaaatacaaacataatgtatttgctcattgtaaatacaaatatattgtacaactcatctaatgtaaagataatgtaattaaaacagaagaaaaataaaggaaaacatattagagacatattagaaatttaagtgttgcaggccgtttcctaagaccagggagctggatctgttgaagtgttcttctgcattaaaacacagttggtcctgatgtggtactgccacctttgaggattccctagctgatgccatgttagttagtggttttgtgtgctccagttctctttgagctgttgttttaatcactgagcacagtatggcacattcttcttcagcagtattgctaattcatgtttgtgtcaagtttagataattcatactaactaggttaatcataaagtctttgggtatttattttatgattttccttgttagactagtagccataaacagaattttaaagtataaagtatgataaatactttgttaaactatgtgcatatcaaaatacgacatcaaatgatacccaacaaatacacatttctttcagtcattaaactttttcaagtcattatatcttttatttccaactttttaaatttgaatgagaaacaggattgttttacatgacaatcccagttcccttctcccactcatccttccctacctccctccaactaaaaccttatctgtcacatatcttttttgctccccctggatggtgaggccttccatagggtgccataagagtctttcatatcctttgggatagggcctaggaacacccccatgtgtcttggctcagggaatattcctctatatggaatgggctcccaaagtccacacctatgctagggataaataccgggcttctacaggaggtcccatagatttctgtggtttcctcacagaaatccatgttcctgtggtctggatcagccccatgctattattccagagatcagactggggagcaagagttcccccatgttcaggtcagctgtttctgtgtgtttcaccagcctggtctggacctctgtgctcttcactggtccttctctgcatctgggttcaggttcagttctgtgattagttatgggtgtctgcttctactttcaccagctgcttgatgaaggcatataagtcagtcatcaatctcataatcaggggagggcatttaaggtagcctctcctccgttgctgagatagttagctggtgtcatctttgtagatctccagacatttccctagtgcctgatttctctgtaaaccaaaaatgtctccctctattatgatatctccatgcttgttatcatgtattcttcccctgactcatactttctgctctctcatatcctcggcaaccctcgtcttctccccttttcattctcctagctccctccctcctcttcccatgctcccaatttgctcagaaggtcttggacctctccccttctccaggggaccatgtatgtctctcttagggacctccttgtttattagcttctttggcagtgtggattgtaggctggtaatccttactctatttctaaaatccacatatgagtgagtacataccatgtttgtctttttgcaattgggttacctctctcagaatggtttcttctagatccatccattttcctgcaaatttcaaggttccattgtttattttctgctgagtagtactccattgtgtaaatgtaccacattttctctatccattctctcggttgaggggcttccagtttctggctattacaaatattgctgctatgaacattgttgaacatatgcccttgttgtatgaatgtgcttcttttgggtatgtgcctaagagtggaattgctggatattgtggtagactgattcctaccacacggaggagtcaccatactgatttccaaagtggctgtacaagttggcactcccaccagcagtggagaactgttcccctttctccacatcttctccaacatgaactgtcattggtggttttgattttggccattctgacaggagtaagatgatatctcagagttgttttgatttgcatttccctgatggctaaggatgttgaacactttctgatgtgtctttcagccattttagattcctctattgagaattgtctatttagttctgtaccccactttttaatggggttgtttggtgtttgggggactagcttcttgagttctttgtatattttggagatcagccctctgtcagatgtggcgttggtgaatatcttttcccagtctgtgggctgctgttttgtcttgctgactgtgtcctttgctttacagaagcttctcagtttcaggaggtcccatttatcaattgttgacctcagtgtctgtgtggacattacatctattataacaaattatttcatatattaaaaattctaatgagtatattcataaatggcaacttgtctgctggttttgcatttcccagtgctttgctgatctgtccaaagtagaaaccctaaccctaaccctaacccctgaattaaaaggcagtgaatggaatgctatcattacactgaattatatagaacagttgaacttaaataaatgtttaaagttgctattccaagttaattttcaatttgatttaagatattttcatacaagcgatacctttagtcatttggatatgcaaatctggaaggttatgaatgaacccttggaaggcggatacaaatgagttccagnnnnnnnnnnnnnnnnnnnnnnnnnnnnnnnnnnnnnnnnnnnnnnnnnnnnnnnnnnnnnnnnttgaagacatctaatataaacagaaacacacacagagcaataaaatccgggtagaaatgaataaaatttatggtccatgtttaacctcatatttaaaaataaaattctaaatcttgtagcttttattattttacatttttaattgaacaattacctgaacaatatataattctgtatatgaagaaatatttcaattctgaagttattttggtcaaattattatatattttatataatttatatattatatgttactagaatatattcttataatattatattttcatattttaaatatgtaataataacaaactatatagatcccacatctttgcacaaaattctgacccagcatatatctccacacagacaattatattttggaaataaacagaccaatatcagagaaaaccctcaagaagtacatgaatattaatgaacacactgtaacagtcattggatagagagagaagcagacactacagagaatcattaggacaatcttcaggttaacacacttaagaggtaataaaaataatttaagaaggtgcagaaagcttgaaatggatgaaaccatgttaagttatatataaatagaatgatagtaccccaaattctgaattaaaatggataaatttgcaatctgaaaatgtaaaacaacagattacaaaaactattactaaaataaaaagaatacaatatatacaaaagctagagtgttttatacttaataagaatatcaaggcaactagaaaaatacagcattggaaaaaagtaaaaagttggagagaaaaacacaattgtttttttgtgatcagtgatgctgacaactacattccacccatgttatctccagagagactaagataataatttctaaactttgtaataaagaagtatactaaaagcttcccttgggatactacaaggggtgggaggtaactcaaggcattggacttgattcccattgtatgtgaggggacttctttcttacataaaagaagaaacaagtgtttcattctaatattttaatgttatctatatggaaagtaaaacattggtagatcaagatatctctcccttttcgattctcccacatttatatctatgtgttatatctttttttatatctatgtgttaaccgtttggatgggtaacctacgaggagctattcccttgaaggaaaaggaaatctacttcccctagtagccatcccctccagtaacttcaagtaggagtgtagtcttttgagcccctctccaatccatattgtacatttagatgtctaaagctatgtgtgcccatatataaaatgggaattttgttctcgtgaacaggacagttttcagtggagggaatctgagagtgattctgcaaagcaggtaagaaaatgctgaggaagacatagactattagaccagatccaatcctagcagctaaaggaagcattagcctgactctgtattatcagaacaaacagcttcctctagattctagagtctacagaaagaagatggataaatgatgcacccctccaacccctgccccacagacatgaattctattgaacaaaagaaaaatacagtaccaagaattgtctcttttgtggggattttgatactcttaagtaattagaacaacctgactatctcagagctgttctccatttcagtctggtagctgtgtggtcagatataattctacattaacttaaagctgcagaaatgtcagcctatacgttggcattctgagtttaaatttcatttgtttttaagataagcaaccttttatttaaaaataagctattttaaatttggaatgattgaggctggtggtattagatgagcataccttttaatgaaagtgaattcacatgattctggaaccaatgttttccagaaagtcttcagtcaggtgagaatatccagtacaatgagctcgagaatgcactagatcatagaagccagccaggaaccacccagaaggaaggcagcatgcagtgtggaccttggcatgaactctgcagctactacagtcaggtctgctcagacctcttttttcaggagactgagccacacactaaaggctgtagagaaatgttctcttatagactcagctcaatttttaacactcttccatttcacactccatggagtctatccatagagatgcggataggatggaaattagtcatgattttctgatcaaatggcaaaagcaagaatacaattatcccttttcccatatgctaaatttccttggagaggatgttcaattgtccagcaagtagggtggaagtgaatcaatgccagggaactaaataacctatcagtatttctctgacacactattattacataaatattaggctctatacttccttatatccatccatttttactttatctttctccatctcttctcacctctctctatctttttatttctagagataccctaaatctgaatttacaattaaacctttgtgactatttccaaataagcaagatttctaaataccaaacaacagtcaatggtacctatgccattaagatgtgattaaaatatgtactaccgagtttacagttactaagacagggtattattttttactttatttttacattttattatacatattatgttttaaaaatgcatgtaagatcacaaaatacttaactcaaaaattaacaaagaagaatttgactaatttactaatttttttatattataaagaatgtagctgattttatttatattttacttacatctcaaggttaattttcttcacttttggtaacagaatccaaaacaaaacctaattctcttgtgtatgaaatcttatcttcacaattagctgcactctgagctacttgcaaattttctgtgacctatgttcttaaaggacatttatatctccattgttaaaatgaattgatttaaaagtaattttaacttacattttctatgaaactgccaggcatgaataaaggctaattgcattggattgttaatagctgactcaaaaaaccccaggctcctacacaagctttgagaaattggtggagtccactttgcccaagtgtttgagtaaacaaaatccactgatcaaataataaaaagcactttttttgaatccatataaatattccaaagacaataatcttgaatgcaatatgaattattggacctgtgtcagctaatttggcatttctaattgtaaataatgttcttgtatgacattaatttctcattattggtcttacaaacaagcccggaagcttaaataaatgtgcttctttactgctcactgggctcagcctcactggaatcaaatcaaggtgtctgtccttgaggcttgtgtttctttctagggattcaatgaattaatacccttgctttctcttcttctagtggccatctatgttcaatttcatgccccattccagcatgaggaattctctgtgcctttcttctgggtctacatcttcctctagatagctgtctttctgtttcctactctcatttttggatgtcaaactgaatccatcagatctatcataataccagcaataggcagtgattggcaaaccaaactccatctacaatgttgatgctctttgtatatatgtgtaggaaatgtattcccttgtttttttttacagttaggatatatgctttgcctataacactaacttacattttcatttgataattagatttttgattttggacaaaagggatatgattctaaggttaagaagcaagagaactatgaggaaggacgttgcttctgggatcattctaggttcaggaactccattcctcctgcactgtcattagcaccatgcacagtgaacagctgtggtgcccgtggaaggcaattcttttactggttgtccctgctgggatctcatgttgacttggattttcaggtttgcttctgctagctgagcaggctttcttacctactctgttcatgaggcagctggaactaattgtcatcatagcacacacacacagttacagcactcattaaaaggtctgggtgaaacttactggtagaatccttacttagcaagcacaagattgctgtgggcttgattttcagcatcaatgaactcaaacaaaatatcagaaaagccaaaaatgatggacttacaactctcattttttctcccaaagagggatgtaacagcaatgtctctgaagccttgctcattgataactctgtattaaagataaatgagtccaatgtgtacttcatatatgttgatcttacaaaggttagttcacaaaaacggggttacacagcacaatatacccgagaaagtttcctaaatgtggatggtagttacaatactcaactcagagcttccatgacaatatgttactgtagacagttctggccctgttatggagaagtgtgtctgtcttcagactgtgaatttttagccacagcagaatgaaatatgcccagtcactggaaggaacagggaagcaacaagaagaatgtagggtgatatctgtatcatgatgacatggataaagctgacagtcatggtcatactggttttatttattttgggttatcatctatgcttcttaagtttgacttttaactcaaaccttcagccaaaatttaaggtggatcaagttgtaactcaccccttctcatccatgtgtacagtgtttccaacataactctatagcctgtctagtgacaatgattatccccacctcaaggtgtgcagcaaatatcaggaaacaccttttttcagagaaagcttgagataggatgttgtgtgatccaagagcccattactgaaatgatacagtgtgatttctgcctgtttgggggtgtttaggctgaacagtcaatcttaaaagtctaaaagactgaaaacacttggagtgatgcttatcaccaagctggacacaaacccagactggataaaatcaccttattagtcactcatttatagctgacttgaacacgagaagataggaggtgcacctattgctgtagtaagccatgggttctaccaaccaccagaaataaatgtagaggtcttacataattttctagctatatttttctttcataatttcactttgacggaaattctaaatataaatgactgtttgtaccatgttaaatataatacaataataaaaatatttacactgtataaagatgtgtcactgtgattagtttactaaagaactgaatggcattagcttgggaagaagagattaggtggaaatacttggaacagagagagctctgggaagaagaaaggaggaattactatctggatgcagaggattcagaatgagtaaaatagagaagaagtaatgagtgtgtggaaggatgtaactttacaaatatgggttaattaagttataagagcttgttagaaacaagccttagctaaggctaaactgtcataattaagaataaatctttgtgggattttgttttctgtgtgtgtgtgtgtgtgtgtgtgtgagagagagagagagagagagagagagagagagagagagagagctggcagcccaaagaaaaatctgcacacacacacacacacacacacacacacacacacacacacagtaggattgaacttgtgctgagttttgtgtggcagtcagagaagaactgtctccacagattagatctatggttaggatgtatttctcttcacttactaactagaatccatatatagaattccctgaagaaaactgtgctgttgtgtttcctgttcaggctccataaccaatattttggatctaggatctcacaaaaattatgtatgaaaggaaatgcagcccttttggtactcctgactgcatcatacctctccttagaatcctcaccaataccattcttagcaaaatgtcaccattttctcatcctcatgttaatttatacttgtagggacatttgctgaacacaaagataccttggaagttattcagaatacaaggtggtataatttaaactgcaactcacaggacatgagcctccctttgatttattttcaaatagcaccttacaatgtcccctagaatgagttggagttggccacccttctacctcagcatcattactgcttaacttcctggagcatgctgcctgtctggcttagtcacactattcttatcttttcatatcctttagcaacagttccagcaaaacaagactatcaactggagggacacacacttattttctcaacaagaaaatactgatatcctcagtgggggattagttaaaaaataaaatagtctctatcatcgcttcctctctgttgaaagattgcatttttctttagcacgcaaataattgtaactttatatttgtaaagcttttaaaaaccgatacttctttttcaatgttttgctcattttgtttcttctttagatatatcagtcattgctactacagcaacagaacagtgttaagcatgagccaagaatttataactctgttacttaaaagttttgctcctcagagcttgcctgtaatagtgctcttattttgctatgctctttgggtcacactactgaaaacattctgaaacccaccccaccctctctctccttttattttactgaaaaggtcaaactcatcacagtagtcaaaattgcccaagtacttaacctgataaggtcagggaccttctctgtgaatgcacttcaagtgactggattgcttacaattctgcatctaccgccaatgaagggtagagtggatgcttccaatttccattcatccaggggaattatgaagttaaaaacaaagtaaatgattgcattagtgcaagacagtcagggaacaaatgaatgcataaggactgcagggtcctgagaagaccttcttccttctgtctatggttacatgcatgtaaagaaaaacaaaggctgccatggggctgtttaggtgctcacctgaccttccatttcaggatgtttctgacatggaaattagaaagttgatgcagaagctgcagtgccagttttcaccagctggttattttatttctctcatacaatacattaacagttacctccactttagaataagaaaaggtattgatgaagtgagtggtatttgtctctgtgctatccagtcgtcaagtggtagactcgggaaattgattcatacaccgaactcaaggtccttttcattctaaagaacaagaaggacaagcttcaatgtgaccatgacagaaaaacaagtgggcttttaaaagagggaggaatttgtagttcagtatttgcagctatatagtaaaaaatatcgctgttgatggataatttacatatgcatctgcatgtgtatttgcatgcgtatatctgaatgtgtatttatgtcttagtatttatacaaatatatgtgtttatgcatgtattcgtgtctatatatgtgcatgtgtatgtgtgcaactcaatatgtttatttatatgtgtttatatccatcgatttgcatgcatatgtatagatgtgtgtatatgtatgcatgcaagtatatagttgtgcatgtgcaattatatatttgtgtttatagtgtgtatgctccctacatatgaaaaacaatggtgtacaaagaaaattagaaaatatcacatttaaatttttatcacattaattgttattgagtacatacataaaaccataagtaagttgaattttgacaagtcgatattctttatcaaattgtatgctaatatatggttggtgggagaaaatgaatttcaatagttatcttaagaatttcagctctttgggatctcttgacctgaggactgcaggcaggtcgactagtcctaggtggaacaagccatccagagtctgctgacattgtggtgctactcctgcctccagccacaaggagagggagtgtctcagacctgcttgcacccagcttgaaacccatcacagtattggacctgtttgaacccactggaagagaaccttggaccctataaagagattgatgactaccttaaacaccatcctagagcctttatccagaagctgatggaaacagaaggagacacacacagcaaaacactgagctgaactcctggaatccagttgcagagagggaggaatgatgagcaaaggagtcaagaccaggctggagaaacccacagaaacagctgacctaaacaagggggagttcgtggaacccagcataggactgacccagattcttctctgaacctgggtgtcagttaggactgggcagtctatggggcctctggtaatggatcaatatttatccctagtacaggaatggactttgggagcccactccacatagagtctagattcaagtggggggcctagaccctgttacaaatgatgtgacagacactgatgatccccatggaagcagaaaggggattagatagggggttgcttgggggcaggggaggaagggagggagacagaactgggaaggcatgtaaaagaggattatttataatttacataagaaaaagaattgcacacataatttatgaaatatttgttttgtgtgcatatatgccttaagagctatttaaatgtctgcttttcatgtgttgagacagaaatataatctaaacgtgatcaaaaagtgttggggatcatgctcacactctttttctgagatatattaacaatttgtgacctggtaaatgcatattcaattttgaaatatgaaacaattgcctttctataaacattgtgttaatagaggcacttgtcacattcccacagttttcacactatataactactaagtattttttctttcctttttttctaccagatttgtaacctaggctaaacttggactccagagggagaacctggattcctgatctaaatgcattgacttctcaaattctatgtttgtgccagcttttgtgttgtaatgctaggaattgaaccaagggccttgtgaatgcttggcaagtactctatttactgagctacatacccagtgcctaaaccatatctcttctatactgcaatttaaatttaatcccctcctatctgttgtttctgtgacaatacaaacaaggcagaagtaaataaaagaatcatgaatgcacgagcctttagtgaagtcataatatattgtaagcagctttgaattctagtttgtttgaatggccataaacccataagtaaactgtcaatatgaaccaacatttcatcaagatgaattggtaatagtaatggtaaagggaagtatttcaatattactagttaggaaataatgacatataattattgatattcaatttgttggaaataaaagaaaatctctctcttttcaggaacttaatatgtaagacatcttaaatgtattggtaaaattgtgaatatttattgctgcctgggtggtcagcccccaagaaccacagggttcaaagggaaatctatagcattggtgcttactagacttttctatctagttagtgaaattcactcacactctctcttgatggtttccttctttactttctattctttctctagttctttctactttttttcataaagcttatgtaacccaacaaaatttttcaggcaatataggattttcaatgtgctcctcccctgacacggacactggcaaataatcatagatttagatttatggtcaaacatggatgaaacacctgtctaagaacccatcctatgggaaagggacatgcagataagacctttaatattcaggttctttagtttttgttggttttcatgcaaaccattaaatgagagcactgtgaccatacagtaacaaacatgagtcattcagacactacattgggccaaaattcatataacttacatagttttgacttctcctggagccaccaccagtgaggaagagtggggtggagttagattaggggagaaaaaaggttgtgggaggaaggatgggagggagaatagtggttgcagtgtaaaatgagatttaagaaaataaattacaaaaaagaaattctatgtgaaataagtctaaatttacacatcaccagatagctgtataacaataactgtacatctagagatgttttccttttgactacatgctagaagttatggtctggagagatagatcagtggttaagaccctggactggtcctagaacccatttattggttcacaaatgcctgtaactccagttccaggcgatacacactcttttggttaccagggacatttcactcatgatgcacataatacatgtaggtaaacacttctacatataaaattttaaatattaaccttaaaaagttattgagtatatctcattatgtttttcagacttcttgctatagcatatacttttcagctatttataaacgtatgttttctatcttagcaaactgaactttaataataatttaaaaaatctcttactatactgtgaattctgggggtggctttgtatttatggttttactgtcagtgatatactacaaaatcattctcgtttatagtattacataaaagcctctgcaaattttcactggtaactcacaatttaattattgtgtttttaatgatcattttttacattttgtattctaatgctttgtcatcataaactctcctgctattatcacctgctattattggaattcacttatttcgggtcacctatcaagttattgtccttgtttcataatttcaatttcagtcgaaaattttatgtgtgcttgggtgatttctttgagttttttctaccttgcaaattcctcatttcttccctagacttctgtggaatatttcttacatgttaatttaataaaatattctggatttaattattcttctaactgcatgcacactttaaaaattgtggaatgacaacatggctcagtgaattatggcacctgctggccggacaacctgaattctaccaccagagcctacacagtaggagagaaccaagtcttataagttgtctcttgacctccacaagccttctattatgtcaacatacaaaataaaatgaaaaatgcacatttttggcaagtttatagttcactactttattaagtattatttgaatttttattgattttaaaacactttgattgtaatccccacccccaaatggcctttattcttcacttttataggatatcagtgctttgaccttttttccaaagcatttatgaaaagttttaatggtgaacgtatcctcagcatatcaataattctgtgtcacagatgccaatatagttcctttgtgaaggtgtttgcagtttcattatctttggtattgaatggtgataggtttttgtaacacacacacagacacacacacacagacacacagacacacagacacacacacacacacacacacacacacacacacacacacacacacacacacaaaagatatagagaaagatattggggttcaagctttaagttgaagttctaccaaactgaaatgacaatcctgtttccatgaacctcagaggcaaaagctctatgttcttatctcttcctgccttatattcttttctccacctagccatatcactcatgtctccaccgccctagtgctgggattaaaggcatgaactctgttacacttcactcttgtttagtccagggcagccttaaactcagagagatccatatgcctgtcttctgagtcctaggattaaaggtatgtgccaccactgcctggctctatggcttgctagtatggctgctgagattaatgttttgtatcaccattacctgatctctatgactttgtctagctttgcattctgaaccctcaggcaagcttcaataaaccataaataatatatcaccataggctcggtctttcacattgtgagggaaatacatatgttcaggaaaagcctggatttccaattttatccatgactctttttatcagagttcaggtgatggtctcaatggcagggtgcattctcaaatgatcagtagtatctcttctgctgtggcatttctgctctcatgtttagacattggtcatcatttctaaactccctatcacgaagatcaggcttagcttcctggttggcaaggactatgtcctttcctaatgtcactacacaatacacatgatctacaaccaaaaatcatacaatgtataatccccattactactttggtccttggttttctgctctttttgttcctcttgctttgaaactgggtctcacatagcatagaatgattctttggaacatttggtttcagcctctcacatggaaagactgatgtcatgtgccctgcttagctttatgcttattttctgctttgatttctgtcaatctagctctctcatctttcctttgattgtatttgcttatgttctccctttacttcatagtagaaatttaatttccatcccaattttatggtcatattggagacagagcccctagtattgattccagtcttactaatgagaaacatgaacttcataaaaaagtccctatattcaggaatcccatagcaaaagttttcaaactggttattttagaattaaactttgctcacacatacatactgtctgccctcctccaaatacaggcacataattatacactgatagaaactaaacaaatgaaaaaagaaaaattgtaatatatacctagcagggtatatattcatgtctatataattagtttattttgctcaagtgctacacatgggttttatgtaatacaaaagtgatataaatgaatagacaaaaaataaattaaaataaataagtgcctacaacatacttgcatggtcatttaaagagggtttagcatttatattttaccatatgaacatttgtttatgacacaggcaaattaatattattgttaactgaaatcacaagaaaatataccaataaatactaatttgccattctgttttcagtagttataccaaacaaggaactttctttaatataataaaatgctaccatatggtacacttatgtaagaccccccttcaacttcacaaacttagcctcaccacttatttagtacaaaattatatactgcttttaatatatgtctatattaattcataaaaagattaaaagatacttattttaaaatttcaaaatataattgtatcagagttaataatcttaaaatccattgtcattatagtaattaaatttttttccattgacagttatgaggatgttgtataatttatatgcatttgtgaaggtttcaaaactctttctattcaaacttttatagataaaagagtactgaatgttatcttaattttcttaaataagttggcttttcttgtagtcaaattatatgctccgtactggaaattgttcaatgtacaattgatgacttgttcttttgctgttaggtggaatgttatacactatttgttggaattattttacacaaattcttaagtctaatgtttatttatatgttatccttccatttccgctagtaacccattttgaactcttccaaaatttgcataaacctattttaaaatacaaactttaccttgatcctaaagtcagaaatgatagtagtacatatatacatatgtcaatagtcttgatgaacacagatgaagaaaaatactcaacaacctaaaaagcatcatttccaaggataacacaacataagtaagtcacatgaaacatagaaaaatctagaatatgaagtaatgcattgatagagttaaggacacaaccatgaattcatctcattagatgcagaagtgtcattagatgaaattgattgttttacatgatgaaaaccctctacaaatttggtttagaagcatggtttcatgatgaccaggacatgagaacaatggatctctactcccatactcattggtaagaagtagaaagctttcctactgagatctacaagacaaggatgagtgtgcccaccataacaatgtagcaccagatgccatgatgcggaaatcagcaacacaaggaaaaaactggtttccaattagtaacaagaaaacaaattgtttgggacagcaaggcttgctatgaagaaattccttaacacttactttatcaaaacctgtcagaactaatggaacaattcaataatattgtaggatataaaattaaggcaaaactgcatgcatatatatcaagctcatttacaaaagaccagataaaaaacacttcaggatagatttgtgaccagtatactaatagcaatgacagagataagaagcctcaagaaaggctaagtaattgtggacaaacaagcaaatcccatcatgagactttgaagaaaactaaaaatctctagaaattttaaaagtaacacaagaatatatggtggaaaagctttttgacattgatcttagtgattaataatttggctatgaacccaccgataaaggcaaacatggaaaaaatagacaaatggaataacaccaacctacaaagttttgtggaactctgagactgttagtaaaattaatcttgaattagctgataaaaattagccatagaaattttagataatccaggaaatgatagggaggggcttagcaagatttgcatgccatatatgtggatactacttagacttaagtaggaagagaattcacatcttagtagtaatgcatggaggacattcagttcattgaaataagcaaacaattagtgacacctacaacagttcacttacatgaaacccaaaaaaatgccaacacatagaaataaagaggagaacattcaacatacagtgtttggggttagagaagtttggtaacacacttgctaaattatttaaaaattcaattagctataaaagaaataacatgtagagatccattatacaacagaaggagaaaagttgcctagtgaaagtgtatactcagcaccattactgtagacagagttcttaccaaaaaggtggtgagaacctctatgttaccaaaataagatacatgtgggaaagaacacaatgaagccatttcatagagtatgcagttttcaacactacattttttaaaagaaaaggatagatattttaaaattacaaacagaatcatcatgataaatcattaatatcaggatcacatctatggaatcattgatatccataaaattttcaaagaaaattgttcgggaactgaaacaattaaatgaaggataacgcagaatgtgatgcttctgagaaagaaagttttgcactctcacagagaggttgaaagagcgtgcatgccatcctcatgccttgcnnnnnnnnnncctcatgtcttgctcctgtgtgacagagcatgcaagttaacaaattgctgtgcttgcagaactgataagaagggcattccagacacatgggggacactggaacaccagggggtctaaccatctccatcagaatcagagacccattcacccttcaatcagcagcctcatttttggcatgtaatacacacacacacacacacacacacacacacacacacacacacacacacacacacacacacacacacacacggaccacggactcacacatatattcacacacacatactactcatttcaaatatgaagtaatgtgtattcacaatgtttcaatcaagtataattaacattaataaaagcatagagtcaacccatttgttcatcagaggcctggctggaaaaattgcatatatttaaaacaatatagaatgatagcaagatctagaacacatgagtgctctgatgggaaaggaaattgaggcatgaaaacctctgttttgtgtggaagaaccaggggtaacagaccacttccatatgtggctcataatggaataaattaataaagggaaacgtataatgaagtacacctcattggatatgctggtaggaatttaagtggcaaattagattttatagttgtgcaattaactctaagaaaataatctatctttcccttctcttttttaacagtatgagacattgtctacattgataggagttcctgtcttttgatgtattaataaatctatgctttcatgaattattttaaaagtaatcccatttcccacttattttatctcccctggttatcaacgtaagacaaacacatcctttgaggtcccgaccttcaactaacattgatgtttatatcatatgccctaacatccagacacagaaatgttccttttggagttaacacattcacagctttaacatgtattttagttgatgagagtaggaaagattccattcaaatttcacaatgatcttaattaagggcataggagaagagctttttcttgaatttcactcactgtggtcttgtgcagaaaggcaatcttgtatgaggaaaatttgaatattaccctcgagttcaaatggtttaagccattttattattattattattattattattattattattaataataataattctacaaaattagtcccctttctaagtaatttacacaactgtcattggctcaccttatggagatcccatcttcaccatcacatttctgtttgagggctttatcagctccctggtcagtaattaataagcatttgttctaggaatgagctaaggaatctcaggttgttggttcctcctcatcagtgtgactttgttagtctcgcccacctcaccccttcccttgtccaacccctccctattgaaggggtcttttttaaaataccattgcactattttgtgtctccaagtttggggcaacctaggttttatatttacacttatttccttccttagtcttatgtattctttaggtaagtgtacaagtgtctaatttctataccatctttgtttcagagctgtctatattgcataatactgtttgattactatagctatagactttgaatcagaatttgaaactcaaatttattgagtctcttatccgtgagcttgttgcaaatataattttttctttattatactaagtacagtgtcttctcaccactgttaattttttttaaactcttgtatttgttatggggagttagcattgtaggtgaagtgcttactttaccagtgtaaggacgtatattaaaatatacaggactatgtaaagctggccacaatagcccatgccttcatctctgccttctcgtggaagataaggggtagagaccaaagaataaccagatgctcctgagcttgctagcttggtacaagcagaaaactacaacaaataaagtaagcaaataaatgaaaaaaggcaactgaacaaacaaggaagaaggtaggatttcgggtgtttatgaacgtcccagcacagtagcaggaattgaatatgactcccctggaagagcagcaagaacacttaatagttgacattcaatgagcctggaaaatgctcttagtttttaattaatcttaaggaatgaacacatgcatatccaacaaatagttttatattactgaaatgaaatgtgatgtgaattgtcatacaatgtcttgatgacttaatagaagaactcaccttaataaaaaataaactgaaactcactagagaataagcatgataactttggtttctaattttatttcagtcatgcttatacatttttgagggcaccagggattggaggtgctctacacaacctacaacagagaaaccatgactgaaggctctgggtacgtggcttgctatcatagtactgcacctgtaaaatactaatctgtttgagcagctgtatttttatacataatttattagtgaattgttattgaaaaagaggcgtctgtgtgagaagccactctgccagctaatccccaaaggagtctttacttagaactattactttagtgaacaaaagactcttgtatggcatgaatgtactgtacaggattcagccgtacactgttcctcttcattatcaagtcgctttatggcaataatgaaagtgcctctaactgaaatttgacactctatgtatagtatgccatttcaaatgctcactttaaaaattgtactatggaaaatattgaaaatttaatggaagaaaaatgtgctcatatttcaaaagatatgtaccctctgtctgtcaccaaatattctcactactataacctaaaggtaaagatgccttcagtaagaggtgtgctgagacacagaattttattctctgactacaggaactatagttactattatattatattcctattatattaaataacccaaacaaaattgagatgagtttgactttccaaagttgtatggatttgggtaccatctaaatttatatccaatcccatgctaaaactgcatatataatgacattggtacacaaactaccaactctataatatccagccaggatgattcagaataaaagatacagtctctacctgagtctcaaaatagaacagtgatgtggatataaagcccaatgtgactggtaccatgcaagaagcaaatgtagcgtttttatgatttagggatgtgattggatctaagcaataagacatattgtgattgttacgcttctgctacagccattagtataaagaatataactgaggtgcagaggtctgggaaacatgattgttaaattatattaactaggggatgattcagtagtcaaatgaggacaagaattcagaatccagcacccaagtccaacctctcagaactgtgtgtaattccagctacaaactcatgtaagctgtagtggcttccacattcttgtgctcatacactcacattgacatgcagacccaaactaaatttaaaagatgttatcaactttataggaatagctttagaaaattagtcgacctgcctgcaggatgtaactagaagaaaccattctgaacaaggtaacccagtcacaaaaagacaaacatggtatgtcctcactcatatgtagattttagacatggagtaacagactaccagtctacaatccatactgccagagaagcaggaccctaagagacacaaacatggtcccctggagaagcagaaaaggaaaagatctgagcaaattgggagcatggcgggaggggagagggaactaggagaatgagaaggagagaagaggaggggtgaggaagacatgatggggaagggaagttgagttgaggggagaacagaagagagcaagataagagatcatataatagagagagacattataggtttaaagagaaatcaggcactagggaaatatctggagagctacaaagatgacagcaactaacaatctaagcagcagaggagaggctatcttaaatgtcctctcctgataatgagattgatgattaattcatatgacatcatatagccttcatccaacagctggtggaagtagaagcagacacccacatctaacccttgaaaagaactggaagaaaattagtaaacctggcttcattttaatatttatttgaaacataattatcgtaatacaatagttgagagatggtagagacatacatgtgtgtaatgagttaagcaaattcatgaacacacgattgctatgtaggtccaggggcttgctttcttctgctctggcccctcattatctacacagataatgtcaaattcttcaccttatattttattggctgacacaagtttagcattaaaatatataatactccatgtgttattttctgcaccaaagcatatattacccagacatttaacaaagtatatgtaaaactaatatatctctttaagaacctgccttatctcctgatgcctgtttaataacctgacctatgagggctgtttttttctattacatttttccttctcgacaatcatgcttccatgttctcaacacccacacacaaaatgcaatcagcatcctgactcattcattccctaacactgagaattttgcataagaaaaaaaaatatttgaagaggatcatttgaaaatgattctatagagacagatgggccacaccatttggaatttacactttttctctttgaaatgtggattcatattggataatttcttctttcatttgtccagtcccccaaagataattattaagttgttctaccatgtattagaaatgatttcaactgttaacactcaagagaacttatacagtgaagggaaccaattaaataaataggagtcagatggcaatatgttcatttatagtaaacaatacatgggcagagaagatgctacttttaaagaaggtgagaaagaacaggaggaaatcttgggcactgagaagtgagatttgtccttgccctattttggattgttttacagtgggaagttatgagtggataaaatgcaggtagatagagaaaacaagtaaaagaaagaaaaaaagaaaaatgattagagtaaaagtgacaataaatcaaggttaaattctgcaaatgatgagtgatgcaactcttagataaactggaagagttgggaaatttgaacagagtgacaatctgatttaagatgactgtgattaaaatatttagggtagtgacttgtgagttagaagtgtaagatgtgagatcaatgagaaatgaatgctaaaactagagaaatagtgggacccaggcaagattgatagtagagaaagtgatgggaaataagactgtatatattgaatgtgtgtttaaggtttattgtatgtacatctgtttgtggaagcaagtgccagatgaggaggagtgatgagggcactgggtaccctggaacaggagatacacatgactgggaactaccatgtaggttctgggagccaaactgggttttcttctgctctaaagtgcagagcattatcttcagctccacagttacaatgtattttaatgtaggaaagtaacaagttgttagtgaaaacaatgtacaggaaaagaacaagtcaataatcactgtaaactttcaggaattcttagtagtcagattgcagtaagcatccctaatgttgaggaagacagtaagagatgaaaccaagaagaaaacaaaaagttgagtttaattgtgaatatgtggatacctaggttcctatcaagtgtgcaaatggtgagattatacagtaaattgaatatgcatacctatttttcatgagccatgcagcctaggctcagatcagcatatgatgacctgaccaatgggattcctggagcaaggcacctgtgaatagggattctcccttggcaaagatcaaaaggccacaggaaagcaaaatatgggcagcttgcaggctcttttctctctcattttattgttcattctttgtgtggttgtcagtcacacatgcaatacctgtaattttccctggcaattctgtttttttcaaatgttttcccttaagattcagcagggggctaatgcatctcaaatctcttgctgggattacaaactacaactcctaatcctaggaacttttctgactcaatagagacaattaggtacatatgggacacacacacacacacacacacacacacacacacacacactggtaccatgcaagaagcaaatgtagcgtttttatgatttagggatgtgattggatctaagcaataagacatattgtgattgttacgcttctgctacagccattagtataaagaatataactgaggtgcagaggtctttaaccatatctcacagttctggaaatgagagtaatgagagtaaggcatggatgggaacacagaacagggaaaagccctcaagaatacaaagaatgcttactgctggtaatacgtaatatcctgggtaccatgcatatatcatcaaaggtatgatcagatatgctctaaaaggaaaagttgtgatgcaaaatatgggatgaatagatccatctttaccattcacaggagcttgtattggggaaaaaagtatggtatagtagaatgggaaaacagtggctcatcaaattctgccttttatagaagatcaaaacatgatcctcttgtagaaaagggaaccatatgaaagcatatcttgcagacatggagaattatttgggtttgaataatgctgtctttaaagcattgtatcgatgtctgttactttttaattttataaatgcaggtagctgccagatgatgaaactgaagctagaacagaatgtgtctagcttgatatttagttaagcttgcaaaaatgctgaactctatgtctagaacaagtttatgtagggggtgggaaagtatatttggggatgcattaagggggacaatgggaatctttacactgtttatggtgcatctcttaaaaatgatatatttcttaatagtaaaaatagaaggcaataataaagctgttcatgtaagcttggtagaaaaaaactgttaaagtataaataaagattgctaaaggtacttgggaatacttgggtgcaatgcacctaagaaacatatttcttccttttcacaatgttcctctctaccccagggcctgaactctaaccgaggctagaccccaacaatcttaagaagtgacatattttggattcatttatgatattagttttatccagagacagattaaacaaatatgaggaatccaaggagattgcactgtaagactttattgttaaggaatctggaatggagccatttaaacagagagataaatactaaaaggagttgatgaaagtttgactgtcaagggtcgcttaaaccaagttgataaaacttgaaaaaaagagatattttccaataatttccacacagcttgagtatagttttgaagagtgtgccatgtgaccctgacatcatgaaacagctccagcttgcaattcttccccatcttttcctgaaatatttggaattgtttggaaagtgccattagtcctttctaaaatttaattgggctcaataaaaccttttagtttatccaatagtatagagccaaatctgactgcatgggagaggtttgggcttccaatttttataagatagaaacagcctgtgctggcaggcttccttttagtctgtggccttagctgctagagaatcacagggacctcaactatggtctgttcctacatcataaatgcctcctctgcaaaggagacctccaaacaaacaaaaaaatactttctatgtccttctaacagtaaattctaaagcctgctaagaactagatttggtctgctcatggaatggctaaagcttctttttgtgtgtctgaaccctccatatgtgctcatctttcatttgctccatgtctcctgcaaattgtgtttttttttccaatgccactgttgtttttaatagcactcccttatactgtaatgtgctataagagcataatgttcataattatgaaaaactcagattttacacacatttcttctaataactatattttaaaagagaaatttaaatttccaaatagacaccaggaaaagcacaatgatgtcattataacaaaatataacagtcaggaaattatgcaatgactagaattaatgagttaattaaatacataatttcacatgtaatggaaattaaagttactaatacaggaatggcaatggaaagattttgcaaagtatctgaatattaaattatccccatcatagtattttatgtttggaatgtaactgaacaattacacagtgctttcttttactataaaatcatctttgaatgacgaggccttaattatggacatgtggaatgtgatgttgccataaggaaagaaagagtttggtcttttacaaagactatatgtgtattttggatattctgataaattatgttcaaaaggcaaagtgaaagtgaaattcaaaaaagaatctatgtggatggagagtaatgtgtcaggcctgagaccaagaacaccttacagaaatcattacattaaaaatatgtaatcaaagaacctcataatcatatacacacagagtgagagagcagagagagagagagagagagagagagagagagagagaagagagagaaagagagaagacaggagaggacagactcattaatccttggtactactgaccttttgtttcatgcaatctttgagagtgagctctaaaatgaacctcccttgtatctcttaaatctatcaagaatttggaccttctatgtatctgttgcatttatccagaaattctaatgccaccattcaaagtgatgacaaactaatgtcaatgacaacacctgaccaaaatcaaatagtaaagggatatttgcaaataaaattccacacttgctctccattccttgacacaattgaaatattttgacatcccattttttgttgattattattattattattattattattattattaaatttaaagtaaaaacaatcttattttacatacagatcccagttccctcttcctcttgtcctctcaacccccaacaactccccatcccacaaccccattaactcctcagggaaggtgaggcctcccatgggagatcatcaaagtccgtcacatcatttggagcaggacctggaccctgtcccctgtagttaggctgaaagagtatccctctatagggaatgggctccaaaagcccattcatgcactagggataaatactagttcatctgccagaggccccatagactgccctgctccccagctgacatccaggttcaggaggcctagtgccatctcatgctggttccccagctgtgagactagggtctatgagctcccacttgctcaggtcagctgtttctgtgggttttaccagcatcatcttgacccctttggtcatcactcctccctttctacaactggattccaggaatttggatcagtgcttagctgtgaatctctgcttctgcttccatcagctactggatgaaggctctaggatggcatttaaggtactcatcaatcttattataggggaagggcatttaaggtagcctctccactattgcttagattttagttgggggtcatccttgtggattcctgggaatttccctagtgccaggtttttcattatgtccataaccgttgcctctattaaggtatcttttaccttgctctccttctttgttcttctcacaactggaccttcctgatccatcatgttcttctcccctctccccttctcacctcctctgtctcttctctcctcccctcctccccccatgcttccaatttactcagaatctcttgtccatttccccttctccaggggaaagtgtatgtctctcttaatttcctccttgtttcctagcttctctggagttttggattgtaggctggtgatcctttgctctttgtctaatatccacttatgagtgagtacatgacatgtttgtctttgattctgttttgtttttttttacatttttgtactacctatcacataacatagtaatgtagaagtattgtgtgtaattttcatattcatattaaagatatgaatgactataaagggggccttaaatgatagagtattctggaggagtttttatatattacctgtgagtcttactcctagttattttatcacactcagtattacagattttaatttgaagaagcccttaacttttgttctagaacaaatccagttgaaataatttctgtctttgtctgagaatatctttaccccttctctatttctaaaggataactttccctgacagattatttctgagtggcaaattattttctcttcattaaataaaaatcatacatctttcttccagatagagagtttttgtgagatatttttttctcaagtgaattggggcacatctatgtgttatttgttgtttttcccaacagccgtaaaaaaattcttctttattgttcccctttgagagtgttattttaagatgtttcagagtagattcacttgagttaagtctgactgttgacatttcaccctcctgtcattgaatatctgtatccttctctatgtttgaaacttttctagtattatggacttgagccacctgagcatttactgtcaatactgtacaaattttccacatgacttttcacatctgtgagtattttcagatattttctgaaatttttgcttccagagatcatttcaatagtttaaatatcttttgttcgtccactactgtttcttaaacttgataaatcatgaatttgtcagctcaaatatttctgtgtgagtttttaatattgctttcacctctttgccaaatttttatgatagaatatttagccatttctcacatttttaaagttcattgagttttctcagcaatctgtcttaagtattttttttctgtaagcttcccatcatcaattccatctggtcagtttaccttcagttaggtcatgatttgtagaaaaccccaattgctatgggatttgccatctggaaggtaaaggagtgggctttgaatcaagtcttgctagtttgattttatttgtggatgtctttctagaatttaaattggctgctcattttctggtcaaatccactatgtcaggacttgaggattccgatggctgctatttcccaatttaatcttgttggtgtgttgtcacattagtgacatggggcaattcaagtccatgactatcatccaataattatataaattaggtagaatactacagaatacagaccatgatgcattacatgaatgagaataatggaatcataactttcctctatggtgtttttacttctctattttgaagattaagtgttagtatatgcttttatattttattttacaacatcattttaaggggtggatggtgacatgcttttgcttctgcatgatgccctcacaaagactgactatgattcgtgagaaaattgggttttaaaacaggttgacttgtctgtgtgcacctgcaaaatgctctggtgacagctgccaagagcctgcagccttctttggattaaggagcaaaataaaattgaatgcacatcttcccagcctgacttaatggctaataaatcacttgtaatagaaaacaagaaatggcctgttctcttttgcagcctagaattacatactttttaatgatatcttttgctctgtctcaacttctctcaataaagaggttcattatagcctttgtagtattgagaatccactatttccaaatcagagctatacaactgagaggaaacaatcttacagataatttaaaacaactgacttacacattgtgaaactctggctgtgggggaaaatgtgatatatccaaggtcacacagctctagatttacaaaagcaagatctcatcaacctgccaaaattgtcttgtgtcaattaaatgtcatcggttcattaatcagaacttcctggtcaatggaaaaattttagataaataagaactgttgtcaagtttagtttcagatgtatcagtctctactatttagcattactatttatgtttcttcacattccattgtttgctttttcattgggttgctgcttttttcaaaagtcagaacctcttccaaaaatcaccccctccactctttaagaaactgaagctgcttgaattgttcatgcttaaatttctaacttgatgttttccactacacagaggtatggttctcagcactattccaggagcctttctttggttattgatttcccagtacctcccagaaaatgcacaacagcccacaggagttccaatatgaatcatttatttcaaatcaattcatttaagaggcatgtaaaaatattgccgctgcatgtgtttatggagtatcagtaagacacgtcttcatggagttcaccagatcttttttcttttgtatctggttttgttcatattttccaatgttctcttaattatgtagccatttctttaccaagctcacacttcactgccctcctgatgctagagcatgggaatatagagatgaataaaatatatacccttctctacaagctcaaagagttagtctgttctccctgctgttcagttgttcagtgacacttttgtatcaattccccacgttgggacacaaaccaggaatacaagtcttctgttgcaatgattacctcatccttctgctagagtgatcaccctatcactctcctgcagtgatgacctaatttttctgctccagtgatcacctcatccttcccgaaagactccattctttaagtatcagcctcaaaagaataaaattctgcggtatgactgtttggaaagctctttcaatttggggactggagagatggttcagaggttaagagcactgactgctcttccatatgtcctgagttcaattcccagcaaccacatggtggctcacaaccatccattatgagacccgttgccctcttctggtgtgcagatatacatggaagcataatgttgtatacataataaataaataaatgaataaataaaatcttttaaaaaagttctttccatttggtagtcaactgttcagggaacatcatgctgcatgagaggcaggcctcacagagcttcagttacctcaaaagaggccaccagctcgctccacattggagccatagcttttcatttggtgtcagtgctgtgttcataagaaaaggctttcagattccctataaacacctatctcaatgtggtccttatccagtaatggcttgctgatccttaaacattaatagtagaatattccaccagcttttattcaagttgccattacatttttttactgccagtctcattctatgttgtctaatattacatggaaaatataagttattttcttgtcacaaccctttacagcatagttaggactaagtctaaatgtccataaacggctgccatgcttaaaactgaaattaagcagttgacctgacctagtgatatcacagagaccatagttgtaaagctggggagccagctttggatggaaccaagccctctgaatgagggtaccagccaggaggccaaggcagtccattaacagaggagactacgcttatccctagagcacaaatagactttgggagcccattccctgtggaaggattctattgcagcccagatatggaaggaaagactggaccatctcccaaatgatgtgaaggatttgatggtccccaatggagggtgtcactatccctggggagtttgtaggggtatgaggacagcatgggaggatgggaggtcaagggaatgggggatgaatataaataagagcacttctaaaataaaaaatgtttaataagaaatattcttaaaataattttattttcaaataagaatgttgattattctaatttttaaattagattttaatttattaagtgtgcgtacatatgtatgcatgtgtcatggccttgggattgtcagtagacaattcataagattttttttccccttttcacatgtgggtaaggactgaactcaggccaccaggcttgttagaagacacttttttttggaacacctttccagctttagaattttgttttaacatttcatgttgaaaatgccccatatagctactgatatgtaatccttgttgcagtttatctgaatcaagctacattttgagattatgctacaacagaaaaaaattggaatgaaactatgctggattttgaacatttttaaagatccatatacattatgtattaatcctaaagaaaatgataaattcatagggaattctccaacagctgctacttatgtaatccaatagacaattagactcataaaagtcaacacagggcatagaaataactcattttatgagtttccataatagaaatacttaactgcagcatttatttgatgcttgcatagttatctgccagcatatgagtttgtgagatcatcatgcatatagccattgtgtccctcaaataccttagtttctaaaacttaattttaataacctgcacagcttatatttatatttggaattccagaacaaacaaccatagctgcttcataagagtctctgctcccaattagctcaggagttcctgccccttcccattcttggggtccatttatcccttagagttcttcatgtttcctagtttctttggtgaagaggattgtaggcttgtaatcctttgctctgtgtctaaaattcatatatgagtgagtatataccatgtttgtcattttgtgactgggttacctcactcaggatggtttcttctacttccatccatttgcctgcaaatttcaagaatccattgctttttattgctgagtagtactccattgtataaatgtagcacattttctctatccattcttcagttgaggggcatctaggttgtttccaggttctgaatattacaaacaatgctgctatgaacatggttgaacatatgtccttgttgtatgaatacgaactatttgggtatatacccaagaggggaatggctggatcttgaggtagactgatccccttttttcagagcaaccgccatactgatttccagagtggtctcacaagtttgcactccctctagcaatggaggagggttcctttttctccacatcctctccagcatagattgtcattggtatttttgattttagccattctgacaggtgtgaagtggtatctcagagttgttttgagttgcatttctctgatggccaaggattttgaacacgttcttaagtgtctttcagccaataggggagagggagctgccacattaagagcaggagaagaagaggagaggagaggaaatggaggagcagaaatattgagtcgggggaagaatagaggagagagagcaggatgagagataccatatgagagggagcccctataggtctgagaagagatctggaaccagggagatctccagtgacctacaaggatgacacaatctgacaatccaggcaatggtggagaggataacccaaaagcccttcccctaaaatgagactgatgactactctttatgccatcctagagccctcatccagtggctgatggaagcagagacagacatccacagatatacactgacctgaaatctggaatttagttgaagaaatggaggaatgaagattgaaggggtctataccaggttggagaaacctacagaaacagttggcctgaacaaaggggagcacatcgaccccagatgctgtctgggaggccagtacaagactgatccagacccctgaacatggatgtcagtaaggagacctctgcactccagggaggctctgaaagtggattagtatttttccctggtgtaagaagggactttgagagtccattaaagagtttctgctcaaaacacccaccagcaataagaactaatagttgtgtaactctttcttcttcctatatagctctaggaagaaccatgttctagaaaaaaaaaaaaacaatttatcaaatctgataaagtattttagaaattacagcaacaaagaagatgtaaatcaacaaaatgctaagagtgagtgaaacatagaagaatatgctgtgcaggctttaatttacttttagtaagtggttcatccttaaatgtccctgtgaactccagacattgaaaacaggagccaaatacctgccacatgcttccattacgacaatggagagcaatgccttgtcaaaacaagttgagcttcataaacaatgaattctctttgaaagtgataaatttgggctacagaaattgcagttgttagtgtttgtataaacacccacagaacatggaaaaggaattctctacagctgttccttgcagggttttattcaatgaaaattgatgaaatcaaagcaaatgaaaagatctagggacatgcaaacccctctgctcataatagaatggaaaagaaagaaaaatattctgttcatttcctcacatccccaacaattttaactttcttattatttattatttgtgtctttcacatcatgcatctcaatcccattcatttctcccccgctttgtactcacaccctgctgctgcaaccaccacaaaaataaaataaaatttaagagaaaaaaaaggaaaagggacaaatcaatctccccagggaagctgcagtgttacacagtgagtcaggaagtaatccctattatccatatatctttacttgcaagtgctcattgcaaagagtcattgttctggtttgaggcctgtggtttctgctgtactatcaatgctgggccctcattggccctcatttctgtggcagagacaatgaataatgggttgacctaagctgtgtgactcgggaatgaccccaggataatttgacacataaacctcagtgatttcagagtgttcttcagttatatctggataaagtttgaagtcagaagactactagtaagttgacaaagattaaaataagatcagatgtgttctcttaagttttatggttgggaaataccacaatgtgaggaaccacaaaagaggattaggaagattgaaaagcactgataaattaggaccctaattgttcacaaagtcatttttttcatttttgatgttgattcaagaattaaaatttatatattaagatgaatgaattgagcatttattattaatacaataaaatttaaagattgggttcatcaaatattagtattgtcatctcaacactgtctcagccaaggtgatgtgtctaagccaattttcaaattcctacctccccttttacaacaggatgtggaatttgtgagctaacaggttcccaagaagagcactgtctttatgcagaaggatgtcccttctctctgtgaactccctcataccctgacaagagtccagaattgaactgagcccagtaaacattgaatcagagtgggacaatgcaaaagtccttggttctccaaggccatggaaccagggaaccaggctgtctgcactatatactctctgtaatgctttgcattgttgaaaaccaacccatttcttattatgtataacaatgaagtaaaatcaagggaacttttctcctttattcctctaacaccctgaaaataaaagtaaatattactttaacacataccttcccctctacaaactactataagaactacttgagtcccaatgtaaaatcaactaatagttggcaaagtataactatgttaatagagtattacaaaggggtgtgggctgttgtatatgatccaccaaatagtagcaatatttagtgatgactagcaattaggatgcattaaattgtgtctgaaatattgcttatttaatggtttattgttttcagaatgatagcctccataaacaaaagagcttaactttcatctgcatttaccaaatccttattaatgtcttaacaagatgggaaacaatcacaaactatcagatttacaaccccattaaccactgattggtaaataaatgctaatttgtgtgctgcagtaaattttaatctagtaccctaaacacattcattaaaccattaatgtaaatgagatcctttgaagaatttttgtcaatgtattactctacaactatgcaagaaatattgaaaaactgaagcatatagtgttcaggagcctatgggagtttttcaaagggagactggtgctctctataaatataaccacaggtttatatacacgcatacatgcttcaggatagagaaacactcaggaacacatatttctcactttatagtcatttatattcatattactatacaccaaatgtgtatcaggcagtcagtgtctggatttttttcacaaaagctcagacacacagcaatccatactgaaagattagtattttatattaaagatgattatcttacttgcatttgaaactttatattttaattcatgaaatcatcaggaagaatattctatcagtttacccctggcatgagaatagacaatttgtttctttaaataactccagccatgaaggagaaaagcacaactctaacatttcaattctaaaacaaagattgtgtcatttaaatacccttaaaatgaaaggggcttttaaatgaaacaacaattaactgaatgctaactcctcttacgctttgttcttaaactcaaattagttttttgctgtttactcttgaaattaggctatgtacacttctgaacatattacttttaaggtgctactgtgcattaaggttaaatgtaatttcatattgtttacattggtctgaatttttaagagtcaactaatctgttacttaagaatataggaaactttcagtaagctgagacctgatgtacacctacttccacacctttgccttgtcaccttcacatggagctatgctgaatcacttcttatacaaagagaaaaaaaatctttgtagagatcaaacgtaggttaaagtccagtcctttatataaccaggttaggaactatatacttttgaatggtgcaccatgtctactaattccaatgcagaggattaaattctgaaacttttattcttttctaattactattgcaatgttctagagattacacaaagactgttttattttattcttcaaatatatagataatctctacataaacaatgcattaagaaatttgtagactctaatgtaattaagaatctgccatgacacagagcctaaagatgttggtaatttatttaattgaatttttactgtcaagcagcaagtttaagaatcaacaaatattatttatttaatataagtagaaataggactaaacatattcaatgaatatgatattactatgattctaataaaaaaaacttatcccaatttctaagactaaaatcaaggcaaaacagcaaacagtttcagaaatatatcctttgtatcttcctctaagtgagtcacatgaactgtattctagcaaatgtctcaaagctgtttttggtctgcaaggtcacactgaagtaaaaaattaaaaggagaaacaattaccaggaaaaatttgacaaggatattccatatgctttagctttgtaagtcactagaatattccatatgctttgcctttgcagtccctacaaaccacaataaaaaaaagatattgagcttaggtcagtggtgaggagaatgaagtccttttgtctccctactttttatgattagcttatcagaaaaggcaactctgtgaagagagaaccttgtaacaaggtgtcatatgtccagttaaaggcatttggaaggatatccccaacaccccatgagttcactctgcttctgataccactgggaactggtggtttaaatagacaggtgtgggccacggatcgttcccatagaattatgacaaaatgagtcattttttcattcctgacattattcatctatcaattatttttaaagagtcaaggaaaaagaaaacttgagccactactggctacaaagatctcaacagtggaacacaagaatccagttagttgtaccagagtaatagcatcaccctctggttgtgaaaagcaacctattttgactgttttagtactttgtacctaaattacatttgtggatattagataacatattataaaaagcaaaattttccagtaaaaacctaataaatgtttgcttagtgtactcagaattttgtcagctatggagtgttatttagcagaacacttgaaatcctaaaaacatagtttcaagctctgattcaccaagcatgacccagaatttttacaccagtgacatgctgacatttctcgtttgggtttattgcctcatggtcccaagacagcagttgcagtcagagcacatttcaaagtggaggcaacaagttacaagaagaaagtttattctttacacagggactctacctttatcaataaaaggaaatgtttgcaggaagcctcacacagacttcttcttctgatcatctattggcagaagctgcatgaggaggagaggaaacctcccctgccaggaagctgggaaaacaaacatccttcaaagtagaacaagatagctctgactggctgaaccacagctcatcacagggctgcaaacacctgctgttcatacaaaacggaatgattttaagaaagcctggacaaaagtgctggggagttaggcaactttttacaatgctttccccaaatactgttcttgtgtaccatgagcaaaataaacacaagaaagagcagttacttctcagtggcaattaggcaacaagatagtaagtagggtgacattcataatggagtttgaggttgaaggtttgaaggtggaggcgaaatcacagtccaacagtgttctcagtcatttgtgacaatatcatagtagacagtttcttattttaaacatcccacattcaactattctataccacttacagtggtatttgactccctacttagtggagtaggatttcaggacattttgtctgcaaaatcagcaacttgcaaagaatggcacacagggaaatttggaatgtgacagcctaaggctgctgcaatagtttggtaatgccatttgcaggctgcattaattttagttggtgtgttaccatttaaagataatggcatggcctttgtgttcacagcaggtctgtgggagttccagccaaaattaacagtggtcaaggagcacccatcggtatcttcctccagtgaacacccagtaatgacttatgcttttatgtatttgcccagaactctatcactcagtattcttgggtgatgacagtgcggggaaatatccttaaagctgctgctgctgtaaaagattggtgttctattagagagaaggaaaatgcactaactctgcaattcttcctggaggtagtgacagaaatgttcagtggtgttggtgttcttttactgcttctgatgcacctagtttaaacatctcaccatatagtaattaagccctttataatcacaccctgttcttcctgtttaattaatttatttatggtcaaatagatacatatgactgattcaaaacagatgtcagtcaagggattttctatagtccaatgctgtaataaagaaatggtgaaatatgtgtcttttgagagtttccatccttttccatcttcctggtacacttagggtgtatcttagggtgcctggtacactttcctagatttataacattttcttgtccgtgtacccatcaacctgttctgcagtattccatttaagcttattttgttgtctagttacaaattacaagtgcaaactagccaaagttagacctcttataatcaggtactctgtggcccacctgccagagcacagatcctttctatgctcgccagtcatggtatatgctgcttaatgttttccaacttgttaaaaactattctgtataataatcattttgtcactgtattttgacattcttgggataaattcttttcaaatatttctatttatcctctggatgatagctgttttgaaggaattattactatcaagctacaggcagcatgttgatgtcctgaatggagacggagggtgcttaattttcccttgggtcatgttaacaatcttattcctcttagcgcctttgaaagccaattacctgtcgtcaagtctttatgccttgtctgcacctttggggtttagatcaatgattatccttactcctttcaagaaataatttcttataaattatgattagcagctcagtacaggaaagtcaggattgtcttactaaacattcctagtgatgatgtgtctagaggggaaagggctgaaactgtatcatggctaagcagattgtaattggcacatccatgtggacagtggaaaagccatagcactactcctttctgtgggaagaatcagcatccttcacagaatgttccatgccttgaaactgaaaacaaaacactgtgtgtggcagatcggcatttccaaaaatatatcaatgtagtgcgaattgagtcagtcaaagtcccctcaaatggtcaatttcctgagtcacatataagagtaaatttactggcctaagtgatttttatttctgaaactgttcaagttatgtcaaagttctgcataaaacatcagcagagaacatgtgaacattggcactgggaaaaccagagataatcctttacagtaatcttcattatcatggattcttaaaacactctcaattttgttcaaatcccatgaaagcagagccttttcttatttatttttctgtctttgcttggtctgttatgcacatttgtctttattagggggataaagtattattaaatgccaagtgactttagacttagtgctattctaaagattaatgtaatatatgtagaggttatgacttaacagaggagaaaatataaatattaaggatctttaggaaactagtatagaaaatgaatggcaataaaatagagacttttcctatacttcaatttttaaatatggcaaataaatttacaaatggaacttaattcactgttctctcatatgtcataaaatttgaaaaattaatgaatttgtatttttaaagttggctttaacattacacatcttgtgagtagttttcgatgatttctacttcagttatagctatgctatttatttcttctgaaatcaagggaatgaacaatagcgaataaggtgagtctatcagggtatgtgatcttcacatacccttctcacaagagaagctgcagatacacagtaggaatgactgaaggaggaaagatctctgggttatcctactagaggatcatcatgtggggaagggaaagcagtccttaggagctgcaataagtgcaaaagcattaaattcagacaccaaacaaatcaaagtagaggttcatgaattcatgctctcactgagcagagtgtgagaatgtcaaaatctgcacttcctgtgaaaacttaattattaatcttcccctttggggtgtgctgatgaataaatttggttgttttaattagatttttgtgatttatgcatttaaccagagattaattagccatctgcatttatttttctgtagatttgttgtgaccaatgtactttatcgaggcaggagtggttcctccctgttctctagactagtccttattaatgacattctgacattaacagtgaatgcttccacctgtctcttgtccatacttaagagtgtcacaaggaaataccattataatttatcatcaaacattcttttctagatatttgttttttaattattaagaccattttctttccaaaatcacaaaaagttatttacaatttcttctgaagcatttcatttttatgttcttattttttttaataattttagttaaattaaaaacaaacttttttttaagagggaactgggaaccaatcccagttccctctcccccctccaccctcccattgcccctgccatctccccatccaccacctcatctactccttagggagattgaagcctcccataggggatcatgaaagtctgtcacatcatttggggcaggacctagaccctccaccttgtatatgggctgagagcttatcccaccataggtaatgggctcaccaaagcccatttgcgttctagggataaatactggctccattgtcagagaccccaactgtccctacactcagggagcctggttattctcatttttctttatgcagatctttttcaaatgatggtttactgtatccattttccttcataatacacattttaataattttatttttattcatatgaaattgattctcccagcattatttcttaacaaggatatgatgttgtcactaatttaaaaatgccactcttattttaacctcgtgtttatttaggtacagaagaataagtgctgggttgctttggaggctcagtggctagaggtgcatagtcctgcagcttggcatcctaagatatacatacatacatacatacatacatacatacatacatacatacatacatcaagtagattggagaaaactgactcctgaccacacacatgctgaggcatttacatgcacatgcacagacgcacagacatcatacatacataaatctaattaattagtggattttaaaggagtccattatcttcttttttcagctggctttcctgaacctctgtcagtatcgtggtttggtaaaagaggaaggcttccaatggcctgtaaaatattattttctgtaatagattttagcatcctgatactcagctcaatgttaatgctcattgatattataataaaaatggtgtaagaacaatgaagatttccatgaagtgcaagccatgagagatgtttatcatgagtggcaacagtgtaacacttttctcagtactgaaaattgatgagtgcatacagtgcccatttcatacacaaacatcacaagagctgtgctgctcctaatatattcatgattaattcaaatttattttttctcaaacaatggaatttgttaacaaagaaacaaaagaccatagtaattatttaattttgaatatgaaactgttgtgtataacatatgaaagatggagagaaccaggcagagacagtagcacacaaaggccaaaagaagctttccagaataataaaattacctaaggaagaaacacttggtgaatctgtgcagagatatttctggtagaggccagagtgtgcaatacagtgaattccaggccattttgatatcctgtgtcaaaaaatccaaagaacccaacctccaacatatataaaaattgatacagggagacacagcagttttcaaaaaaaaagtctttaaaacatatttcctttatttctttgaatataaatagagaattgattaatataagtattaaatattgttggaaaggctaaaaagtgataccggttagccattatcttatttgttcataaaagaaaaagtataggcactgatattttatgatatggtatgtaaattattgaaaatcagcttttatgatcattacatcctcatcatgtaatgagcatcattttcctgtagaaaagaacaacattttatgttttattctttatgaaatgctatttcagtaaaacttgttttgttaaaaaattaaataatgatttttcacctattattgaatattccagtgtgaaattttaaataaaacatgcagtgcttttcttttgctatgcatatttttcttcctcacttaaaaaggctgaatgtaacttttgaaagtataacacacacacacacacacacacacacacacacacacacacacacacacatatgaatgtgttagaatattgcctacttcatattaaggaaacttgaagcaacacagtaaaatcatgttaatgaaactctctctctctctctctctctctctctctcttcacacacacacacgcaggagtggttcctccctgttctctagactagtccttattaatactcctagttgcttaaaggtttttaacagtgtgtgaaagtctagtttgtaaaccaagacttacaaccttgtgatagaactcaatctagagtcctacagaagtattccccttaatggtttgttatgaactgaacagcaatggtttctgctttttgatgaaaatatttgcctttatactggacctgtgtccatgagtaaagaaaagcaatgttagttattacacttacatttctggttttatttttttcaccttttatctgtcatgtgtgttcatttctctttgtgtcctcataaaggaattttttttgcagattgttttatttgaattagaaacagaattgttttacatgacaatcccagttcttttctccctccagtcctcccctaacaccccccaactaaaaccctacctatcacatatcctttctgctcccgctagagggttaggccttccatagggtatcatcagagtctatcgtatcctctggaatagggtctaggcccacccctgtttgtcttggctcagggagtattcctctatgtggaatgggctcccaaagtccacacctatgctagggataagtactgaactactacaggaggtcccgtagatttccaaggtttcctcactgaaacccatgttcctggggtctggatcagtcctatgctggtttcccagctatcagtctggggagcaagaattcccccatgctcaggtcagctgtttatacataaacagctggtttcaccagcctggtctggacccctttgctcttcactcctccttctctacatctggattccagtccagttcagtgataagttgtgggtgttggcttctacttccaccagctgctgggtgagggatatcaggtgacatataagtcagtcatcgatctcattattaggggtgggcatttaaggtagcctctcctctgttgcttagattgttagctggtatcatctctgtagatccccagacatttccctagtgcctgatttctctgtaaacctaaaatgtctccctctattgtggtatccattcttgttatcttctattcttcccctgactcaaactttctgctccatcatgtcctccgcatccctcctcttctccccttctcattttcctagctccttgccccctcttcccgtgctctcaatttgctaaggggatcttgacccttttcccttctccaggggaccatgtatgtctctcttacggtcctccttgtttactagcttctctggcagtgtggattgtaggctggtaattaaaggagataattttttaaagacttttaaaaccaaaactttaaaggattttatttgacatgnnnnnnnnnnnnnnnnnnnnnnnnnnnnnnnnnnnnnnnnnnnnnnnnnnnnntgcagcattggaacaggaatgaaatggaaggaaaagaaattttacccacaaagagatatctttgacattttaaatacaaagaaaacttttgtcaacttcaaatggatagtgccaatagttgctatttttcataatatatttattctcataaattcattttcacatttttacttaagcaaatatgagaatttatgcctaaatttgttattttcctccttatataatgtggctccttcatgaaataaaattcttcaagaatgcaaaaaattattagttccttgaagtgttatttttgaggaaaaagcacaatgaataatgatttatttatgttatctgatgaatgtgttggtaagtcctgaattttattctttctccattaaggaatataattactaaaatttgtaattcaataatcatcttcagaaaagtttgtaaaggcttatagaaactgtggacagccattccataagagagacagaacatactgtaaatatgtcagcacatgaacgtggagctctcttgctgactggagaagcacaaacaacaatgacaaatccatttataatacaaagtaatagtatatgtctcttatctcaaattctagagactaacttctaaaagatctctaaagacaattatttataacttacttttattgataggttatacataaagtatggcttcttataattattacaatgattagtcagaattattatttcttttacttaaaaatggtaagcatttaccaattatgaagatcttaatcacttttctcgcactttagaattgtggtccactattaaaataggcaaatctttaaaaatagttaactttagataaaccattattttaatttgaaaatgttgaatttatttaccataaaaataaagaaaccaaatgtttgaagtctttgatccattttgagttaagttttgtgcatgccaatagatatgaatctatctgcagtcttctacacaccagcatctagctggtggtagttcaaactactacagccactttggaaatcagtttggcagtttctcaggaaaatgggaatcagtctaccacaagattcactcttatgcatatacccaaaagatgcacattcttacaacaaggacatctgttcaagtatgttcatggcagctttatttgtaatagccagaacctgcgattgttccttcttcttcccagagttctctctctgacctgaagtaccgcccatacctctttcctagctattggatgttcagctttttattacaccaatcacaacaattcattttccaacagtgtacaaatatcccatgagagttctcatgctcagttgctgagacagatacaagactttgaacttagcacagacatagaaatcgcaccagaggtttctgatgtctaagcacggtaggaaagatttcagaggcaaaatggacttccctactggcatatacacatgttgccaaagataagaaggaaaggctttcatatgcaatagcctgacagtgaccataacaaaagcctgcactacagcaaccttgcagaaaccataccacagtggaacacaaacagaatcttagaccaacaacaaaaactctgacaaggacatgttttctttcaatatacctcacagaatattctttttatatttacatatgaaaacctatttttacatcttttcctatggcatttgtgtttccactacagtgctccgtgattcccaaaacaatagttttgtttagataatatctttattttttataattcagtggctacaagaatagcaaaagtgtacatctttatttcttaccaagtttggcatttagactgtgagttaattccccccaaatctctactaagactattaaaaaactcaatggatctgttacctcacctgccctcattgccccattgtatttcacatgctaaactgctgcaatcttgatcagtttattttaaatataagcaacttttagcgattacttatatgacatttaaatctcagttgcttttcacttaaaaataacataaccaaccaataggaaagtctaaaatatcactgtcaaagcctttgtaaataaaagttttattgtagaggtttaaaaagtctttatgtacacagataagcactggacaagccagaaaaagttaaacattcagctcctcccttcgaaggaatgaggtcttagacgttcctccttgaatgcggggaatggatggagtttaaaacctagtgatcatttgttctctgatgagccaggttctacctatatcctccaaaatgttttacttattccagaccctttcagcataaatgttgagcattaattacttctaggccataaaacccatatgagtgatgtcactagtactttgtaacagcctaagtgacttctttgttatcttagggctaggccaatcatgactcccacagacattatgttcacctcagtcattctccctagaccctaaatcttggggagtatctctgagtcaacagtactaatttttgtgaaagaaagcagatatactttgtaaagaatttcaatgtaagcatatcttaaatttgttgcatctgtgagactgagataattattattagaaaacttttttaccaaaattgtgtgtggattaaatattgctaaaataaaccgactaatgtcagggtttcaaagtttggcccaaaactggttacctacatccagcttaactaaatttcattcttactccatcttgattatgtgcgtgttgtttgaaaagcctgcagcaatttccacacactgggttttatgatgcccacctcagtgggtctgaggaaatgatttaatatttgagaactgagaattaatcatcatccaaacacagtgaaaggacaagtatgggtaaactccccaatcctaaaagtatttgttatttatagataccaaaatcataccatactaatcttcttttgcctagacctatttttgtaattattgattaactttgttcttttaatattctaaactacgtataatgcattatgcttgctttcctgacaccccatgtcaccttacttctacaatatcaattctcacttccctttcagtcccatgcccagtttcattgccctatattgtgtttcttgatccagagggttttccctcatcctatgatttactgccagttactataagatccattgtcagcagcatatttaggactttagaatccaaaagcaggcatactgtcacattacatgaaagcatctgtatttatatgacaactttcatatatgatcacaatggttttacatctcattttatgctctccaccctctgtatcttttgaacaaaattgtgtcttacttctcattaaaattttcctactgtaagtttcttaatgaatacatacataaaataaagtgattctatgggcctaaatggttaaagtaccatggattaagaataaaagagtaaatagcttatttaactctgcagccaccgtgcaactgaatgcatttgattacatgcacatgtttttggtcagctttcctatggactttttttcccatttatgtgtattgtattcctttagctgaggaataaactccatgtatgttccttagagtaagctcactgaaaactggaaagtgtcagtcactggctcaagtcacagaagtattaattctgcaatttgtaaacacctgcctcccaaggccactgcagttgaggacaaagtaggtgtggtcactgtgttaagagctcatagtatgacaagcctgataaagtatgctgttctaaacatacgcaattccaaaaaaaaaccagaatctcatggagaatactgacagttaagtttaattttaacaaagaaaccatgattgtgtgagagggaaataattttcataaatatgaaataggcaaacacaaacattttaaaatatgaaattgatgatgaaaatgaatgcattcagttaaattacagaggttagtgtcagtatccaaagtagtggtttgtttttcataaagatacttattgactgttatgaataaatcaatccaaatttataagattgtagacatctgatgtcattcagatatattcaaattttctctgaattattaaaattttcctcaatagatttgccaaccaaaacattgatattcacaatgatatgcaccatttaggaagaatcttgtatcatttcttatatttgtaaattaaaaatattctaagacttaagtctgaaaaagatatttggaaattaaagggtagttattttctaaataagaagggtgtcctattaagctaggaattgtttgccaggtgtggacaactcatggcaacacagtatgccattattttaatataagcaataaacaaacaccacatagcaacctgcaagttagccagtgtttctctatgctgaaatcaggtatgctgtaacttctatgacccactctgtgtcctattactatgctgtcttaacctcataaagttttattccattctttttcactcaaagtttgtacactttctcatgttttcagttcctgtatttctctgtgtgcctctgtgtggccagacttgaaaatgttttttctaactttaaaaaaatgtctcctgcttatttgttttaaatttgaatatataaattataattttattctatatccctttaacttaaacataaatgctgaaattttagcttctactctcatatcttttcaaataaactaagttcctctgcttttccttttcttatattaatctgagatgacttcccactctaatatactgtctgtggatgaattattgtcctcataaaggtgggccccagacttctttaacttaggacattgtaaagctattcaactgtttatgtcacttgctaggttgaatatgtagcatctaatgaatgtctatcctattctagactacaggtatttagatgaaggtatcctagattcacagaaaacaatgaataaagttttaaacatttcactgaaaagaaggtagtagaacaaaacttgtctaaatacttaaagtactgtaaatcagtaacaggcagtgtaaaaagtacctttcttatgactgaacacttttgtgagatatgctgtgtttgcaaagatgaaattccttgactcttgccatcaggtatttgtaaaatctttgtgaatgacagtaagaaagggtggaggagtggagaagaagacaagagaggaaaggaagacggtagagcaaggaaaaaaagagggagggaaatgtcctaacattgtagtagcatgtaataaatcatctctcttctattgtcagatttctgcccataaataaccacttgttattcttccattttttctttggtgtgtgtggggggtgtcagggtgtgggtgtgtactttaagctacagttttcatgacatttttgttctatatagggtctttctgtttgtttgtgctgtttttaatctactttctaggaaatttctggttttcaagtcatctaaaatgatttggtttcattaaaacttgggtattttaaagttgagctacagttcataggtttttattaaaatatatttactgcacactttatggataacactaaattaaaagtcacgacagtcttcttacctaatttttggatttaatttagaatacaaattagcttttaaaattaagatgtcaagttgcaatatagtaacaaagtagctaagtatgagggttgggaaatgaataagattgagtgaggcaatgtaatcaaaggattttggttttcaaaacagattttgacagacattctcagttgtagagtgtttgtccaatgtgcttagcctgtatctccaatggcaaacaatgggatgatttgttataaatttcaaaatttatctaagctcatgtattttgtaaaattatccattcctgtatatttgtcatgtatctttcaaagctgtcaaatataaattttattgttattgcaaacaagttattcaagacatctttctctaaaaagaaagcaatatttactagaaacgtttaaatggaagttagaaaatatcagcatatattgaaatagaatatatagtatggaaattgtagatgtctgaactttccttttcaatgcttttcagatctctaattgatatcaaattaattgactgggcctctgctaattagtacctcaaaataaaacaaatgataatacaaccatgtcttacaaagttaaaaccatcctatcatgaatttcaacattgttcagaagcaaagagtctttgatttaagatatatagtgatagaatgcttataccaatatcaaagtgtaacattatttgtatgtaaatataaaaacttgctcatttccattaaaaataaatggcaagcacttgtacatcacagctgccaaatggaatttctcagagttgtaactctgtgcagcatttcatccatctttttgatgggcttagaaagatttatacctggaatagaatgcacaatgagacaaggaaaaaagaaagccaaagctgctaaaaatgctaataataaatagaagcatctaacagctatcatgttgaattgtgggatgagcatatgtattgattaaaatatttcagccagatatattgagataataaaaagagaatgcatttatgtggtatgcagcattcaattaaaatgtctcacataaataagttacattttgtgagaaatcagttcaaaacatccagtagcacaagtgtgaaatattgttagctctactgcactgtttagcaagtgctttttaattaaatcaagttccaaatccaacattagatcacagagaggaaatactagcacagaaaactcatcttatttgtctttcaaggccaacagaattgtccactcacttgccaagattctcagtgttatagaagatgtggcagtggggactttctaaaaatacaactcttgtaggaccatgatgtgggttgcccctctgtatactatgaacatgttttattaccatttgttaataaagaatccaatttggataatagccaggtagaatatacttaggtaggaaatccaaacagagacacagagagaaggaaggcagatgtgaggtaacacgccacaagcctcatgctaaaatataaactactagaaatgggataaattaaatgtaagagctatgcagaaataagcatgagccattggtcaagcaattgcaaactaatattaagcctctgtgtggtaaccttggaagtggcagtaagttttttgggactgggcagtcaggagaggaacctctgcttacagtccttctttatagaagatatatgttttaaccagtttccacaaagagaaaagatcacagataacattagtgctaaggatatagaaggcatggggtttttggtccttaaatgtcaagaattctgttgttgttgttgtttttttttctaaaattttggtcagtttttttttcttttctttttctttttgggtttttagagacagggtttctctgtgtagctttggagactatcctagcgctcactctggagaccaggctggccttgaactcacagagatcctcctgcctctgcctcctgagtgctgggattaaaggcttgcaccaccaacacccgggtcagtcagttttaattcttgtaatctttaagatataaaggaccaataagcacaataatcagtcagagctggtgaaaaaaggagtgacctatgatcactagcagtcagcatacagaagatggtgcttagcaaacattttataaatttgtgactccataatttctttcatttttatttttataattgtaatcagaccaattttaaactagaaacaagcttcttttacatctcaatcccaattctttctccctcacctcctcccctgctcaaccaaaccctatcccaaaccctttctgttccctagggaggggaggccttccatgggggatcttcaaagcctgtcatttggagcagggcctagacacaccccattgtatctaggccgagagagtatccctctatgtgtagtgggctcgaaaagtccattcgtgtactagggataaatacggatccattaccaggacctcctgaaactgagaagcttttgtaaggcaaagtacacagtcaacaagaaaaaacaaaaaaaaaaaaaaaaaaaaaaaaaaaaaacaaaaaaccaaaaaaaaaaaccaaagaacagtagcccacagaatgagaaaagttattcaccaacaccacatctgacagagggctgattcccaaaatacacaaagaactcaagaagctagtcaccaaaataccaacaaatccaatgaaaaaatagggaacagaactaaatagagaattctcaatggaggaatctaaaatggctgaaagacatataagaaaatgctcaatatccttagccattagagaaatgcacatcaaaaaatctctgagataccatcttactcctgtcagaatggttaaaatcaaaaacaccaatgacagtttatgctgtagaggatgtagagaaaggggaacactccttcacttctggttggagtgcaaactcttacagttactttataaatcagtatggtagttcctcaggaaaatgggaatcagtctacctcaagatccattaattcctctctggggcatatactcaaaagatgcatattcatacaaggacatctgtccaaacatgttcatcaaagcattatttgtaatagccagaaacttgaagcagcctagatgcccctcaactcaagaatggatggagaaaatgtggtggtacatttacacaatggagtacctctcagcaggcaaactatggaatcttgaaattcccaagcaaatgaatttacctagaacaaaccatcctgagtgaggcaacccagtcacaaaaagacaaaatggtatgtactcactcatttatgaattttagacatagagcaaaggattacagcctacaatccacaccacaagggaagttaggaaacaaggagggccctaagagagacatacatggcccctcagagaaggggaaagggacagtatctcctgagctaattgggagcatgggggaggggagagggagttaggagaaagagaagggaagaagaggaggggagagggggacatgagagagaaggaagatttagtcaggggaagaatagaggagagtaagaaaagagatatcatagtagagggagccattaagtttaaagagaattctggcactaggggaatgtacagagatatacaagtttgacaccaattaacaatctaagcaatagttgagaggtttccttaaatgcctttctctgatcaggagattaatggctactttatatacctagagcctttatccagtagatgatggaagcagaagcagacacccacagctaaacactgagctgaactctggaatacagttgtagagaggcaagagtgatgagcaaaggagtcaagattaggctggagaaactcacagaaagagctgacctgaacaaggtagagctcatggatcccagactgatagctgggaaaccagcataggactgttgcagactcctgaagtgggatattcatttgaaagcttatgtcttaaggagacactgtttgtgtaaataataaatgggatctaagcagagcttcaattcattccctcatatgcatgccagaatgcttcttcttgtctttaaataatgttaaaaacacattacaccagaaatttgaaatcaacttaacaaaatttgatggcctttgacaatatttctatgggtcttcataggttaattctctcactatggtttaattaaaaatgttctctgcatattttcttaccttcatgctatgaaaactaccttgtacaatgagtgctaattagggagagagtgcaatcagagagaaattgttaaatatgtggcccacagaaactttccaacatagacgtgattttaatgaatgtgaattattttaaatatctgggataaagtttggatccctttcagaaggtattttaaaatcagccagcttcctactgcttaaatttaaatggtaaaatttccagttgagatgtgtaatcattgctctacttgcaagtattcagtatgcatgaagttttagatacacaaaatattcatagactgagtatagagtgagccccacatataaaaatgaaagtaaaatttcctgtcaatggatgtcaaaagaagacttctgtaatacttgtgtgatccaatcactctccttcttaagcgacaccagggtagccaactgtcctcttcataaatgactatttcatatgctttcagtatggggagactaatttagttttaataagaagcccaatgaatattaaatctacataatcaagtaatgtattctatgttacatgatcttggtgtgtgtcaaatatcttttaatatttgcaagaaatgtagacatccattactgtaacaatccactgtcttttccacattcatgcagcttgcaacaactctagcaatattctactttatctttttctaatgtttctctaacctgttgaggactgattagtttctggttcagaaaaatcagtggtaaagctggtactacaggcaaaagacacaaaggttcctacgtcttggttaagaaatggatatgctgcattagacaggtgtgctgtagaggtgttcatcatgagtgaaaaggtaagaagatggtgctgaaaaaatgaagtaatctaagtgcagacaaaaaggtgtgctgtgtctgaggtcctggtttcgaaaatgagtaacaggattcacagtatctgttctgttagtgaaataccaaatcaagagaaaaaaagtcattagattttggataggtgagtaaaacacagtgcagaacctctgcatcaagctgtgtcaagcatgaaaagtattagttatgcttctattgtcagtctctgcctaagtgtaacaggatttgaattttgacttttccacatgagtacaacatggaaaagtgtagtcactggacagggagaaatatcaagattccccagtcagcaactacaaggatacaaaagctaaataatagagtcattgagacagaggctggcttcttatgtaaccaaataacacaagactgtaacaataaatctttctgccaagcctcccaagtcctgctgccacatgggcactttctgccaggctgcacaagttctgcccgccaccactttaaggtcccaagtaacacagagagacttatattaggtacaaatgctgcttggccaatgactaggatttctcatctgctagctcagtcttacttatcataaatctatatattttataagatttatcttatgggatgccaggagcaagcatcctgtcttcccaggctgacatgatgaatctgctctttctcctacctttcccagaattctccttgactcccagtcccacctatcttgttttcctattgcccagcagtactttatttatcagccaataagacaaccatatacaaagaaggacctccactaccacaaggcctaagaataatgggtgcaaaattattaaaaagtctaaagaaagcaggaatttcaaatgggagcaatgctccggtgtaaccctcaatactgtttaatggtttcctccctccaatgaaaaacagtactgttcttgaacagtaagcagcatttattgtgtgaaaatataaagaaattcataggaaactcttcagatggttgtaatcccttagaacacacattttaacaagaaggagatacaaaataattaaagatactggtctatgtatacataaatgtgatatacaattgatagagtatatgtttttcattttgtagaaaaatttcaacatcaacaatatattcaattatattcaatgacaagtagtatgaggaattttatgtggaggagaaaactgccaaataacaagtgatgaattaagttgcatgtggcctcccagagaaggcagacattgatctaaaaatttacatatggtatcctcgagaagctagatactgacctaagaatttagtcatatgtgactcaccctttcccaccaactcacacttcttagtaaaccccattttagttcccttggctttctctttttaaaacaacttggtttatgttcaccttaattaatgtcttttctctgagtgttcattcagtctgcaatgctctctacatggttgacttattccattatcaattatcacctaccatttccctctgtgagcaattttctctgatatgctccatttttgaccttacttcctgcatagcatgtatcataatgggttatagtttgttctgtctgaatttatacataactgtatttagccactccatattcttcttcctattctcccatcactttttgaatgtagaggtgagactctttatattacttactctatttaatcaatatttagtgaatgaatgtacaacgaataaatcaattcagaagaaatatctacatgtggaaaaaacagagatttgcagggattacattattaagctcttgtgtaatgtagcatgtataaatataacagaaatcttttagttgtaaaaatgataaataaaaatattatgctcctgggtggaaataacagacttaggtggatttatatttattctttttctttcttggtgtacatcttaacatagttgcacttgtaaccaccatactgtagtatgtgttacctggatgtcataactgttctccttgacattggaataatcaccatattcaggttggctttttgttattatgctacatagagactcacagcatatttattgtgctgcttgattttcaaagcctttcttttttaataaaatcctaatggcatattgatttatgatatagcatatccacagccactggaattcttacagtgatgcttcaagaagctagttaatgctaatatgatcttaatgtcatgcttatggtcttaactgatcctaccaggttaaccctcagaatattaaagcaaattattcttacaccaatgacaaagtcctattaccctagaagtactagttctgatttatgatgtttgtaattgcaattggtgtcttaggccaaagatctcagatcttagaatgtcaatgggatgagctatttatatccatgatcatcaaccactatttatgagacactgagtagcttatattgattcaacttttaaagctagcacctgtatagtatatagaaagttcattatagaatttcatgacaatgtgttctttggaaagaaagtaatagaatatataactcataaaagtagcaatagaggctttcgttggttagacatcaccaagaatatcctgggaattaaattcatatgacaggaagaagacatgggtggacagttgggggatactatcaatggatagggttgcaatcatggtagctgatgttgcaagtaccagtggtagaaggctgaagttaaaacaggatggtattaatggagatgagtggtcagagatagaatacagagctgcagatttttcacaatattatgttatataagtagactttgtacttgatcccattggcactgaggaaccacacaggtatttaggtctttggacttactgtgaattttgggaaagaatggatccagagagaattcctcaaataagagcacaatacttgtccatttgctactgttcaaaacatagagcaaaagttaacatgtgacattctggcctgtggttcattattacttgtggataaatactatgacattaaagaaagaaatgaagaagggtcagaaataaattatggatattacttcttaatttaaaaggtcccactgagtatatccatttacaaggtatgtgttacacatagacattccatggaagtgtgtattttatgctacattcgtgccatgtctacatatgtgactttatatctacacaggatcaagttaccattgttgagatgatactgtcaacatttgtttctctgtgactgaatatgctcataatgattacttctccttatgtctgtattctagaacctgacaaatccctgtacttcctatggctgagaagaatgtcagattatctatctatcatctatcaatctatctatctatctatctatctatctatctatcatctatctatctctgtagggagccgtccctgcattctccattacaagatggcgcctgcatccggcaggcaccgaatgtaaacaagttaatgcacaggcgctgggtaactttccatcccttggtctctgcctcttctgtggcatcatatggtccgatgagctgcagccaatcatagggtgacacaacccaggcggcggtcgccagcctttattaggggacgggattcttggctcggggtctccgctctggtaagcttatgctctcctctcaagacgcattaaagctttactgcagaaggatccgaatgtcctgtgtcgttcttgctggnnnnnnnnnnnnnnnnnnnnnnnnnnnnctgtagggagccgtccctgcattctccattacaagatggcccctgcatccggcaggcaccgaatgtaaacaagttaatgcacaggcgctgggtaactttccatcccttggtctctgcctcttccggggcgtcatatggtccgatgagctgcagccaatcatagggtgacacgacccaggcggcggtcgccagcctttattaggggacgggattcttggctcggggtctccgctctggtaagcttatgctctcctctcaagacgcattaaagctttactgcagaaggatccgaatgtcctgtgtcgttcttgctggcgaggcgannnnnnnnnnnnnnnnnnnnnnnnnnnnnnnnnnnnnnnnnnnnnnnnnnnnnnnnnnnnnnnnnnnnnnnnnnnnnnnnnnnnnnnnnnnnnnnnnnnagaactgcagggtggtaagttcggagaggtatgctttattctgacaccttcttttttgactttgttcttaatttctcaccactatgggatgcatcagtaaaagccttaattctagtctttattacattggtcttatattgtgcccaccatggctggtgttccatttcgagaccaagcttaccccgggtagcctccagcataatgggctcttcaaaacagagagacctaattaaaaactgtctagagattgaggcttgccgtcccatggtagcagagagtcaaaaaacgcttaaagaggtacaggataatatatcagaaaccgaacgagatgagagannnnnnnnnnnnnnnnnnnnnnnnnnnnnnnnnnnnnnnnnnnnnnnnnnnnnnnnnnnnnnnnnnnnnnnnnnnnnnnnnnnnnnnnnnnnnnnnnnnnnnnnnnnnnnnnnnnnnnnnnnnnnnnnnnnnnnnnnnnnnnnnnnnnnnnnnnnnnnnnnnnnnnnnnnnnnnnnnnnnnnnnnnnnnnnnnnnnnnnnnnnnnnnnnnnnnnnnnnnnnnnnnnnnnnnnnnnnnnnnnnnnnnnnnnnnnnnnnnnnnnnnnnnnnnnnnnnnnnnnnnnnnnnnnnnnnnnnnnnnnnnnnnnnnnnnnnnnnnnnnnnnnnnnnnnnnnnnnnnnnnnnnnnnnnnnnnnnnnnnnnnnnnnnnnnnnnnnnnnnnnnnnnnnnnnnnnnnnnnnnnnnnnnnnnnnnnnnnnnnnnnnnnnnnnnnnnnnnnnnnnnnnnnnnnnnnnnnnnnnnnnnnnnnnnnnnnnnnnnnnnnnnnnnnnnnnnnnnnnnnnnnnnnnnnnnnnnnnnnnnnnnnnnnnnnnnnnnnnnnnnnnnnnnnnnnnnnnnnnnnnnnnnnnnnnnnnnnnnnnnnnnnnnnnnnnnnnnnnnnnnnnnnnnnnnnnnnnnnnnnnnnnnnnnnnnnnnnnnnnnnnnnnnnnnnnnnnnnnnnnnnnnnnnnnnnnnnnnnnnnnnnnnnnnnnnnnnnnnnnnnnnnnnnnnnnnnnnnnnnnnnnnnnnnnnnnnnnnnnnnnnnnnnnnnnnnnnnnnnnnnnnnnnnnnnnnnnnnnnnnnnnnnnnnnnnnnnnnnnnnnnnnnnnnnnnnnnnnnnnnnnnnnnnnnnnnnnnnnnnnnnnnnnnnnnnnnnnnnnnnnnnnnnnnnnnnnnnnnnnnnnnnnnnnnnnnnnnnnnnnnnnnnnnnnnnnnnnnnnnnnnnnnnnnnnnnnnnnnnnnnnnnnnnnnnnnnnnnnnnnnnnnnnnnnnnnnnnnnnnnnnnnnnnnnnnnnnnnnnnnnnnnnnnnnnnnnnnnnnnnnnnnnnnnnnnnnnnnnnnnnnnnnnnnnnnnnnnnnnnnnnnnnnnnnnnnnnnnnnacacgtccgaggcggcggttgccagcctttattaggggacgggattcttggctcggggtctccgctctggtaagcttatgctctcctctcaagacgcattaaagctttactgcagaaggatccgaatgtcctgtgtggttcttgccagcaagactatcgagcgggacatatctctctttgtgtgtatgacattttccttttccactcctctctagttttaagtaggctggctcaataacttagctaaaattagtgaaaattgctgcaataaaaactaatggacagatacttctgtgatgtgttgcattggagtcatttgttaaatggccaggaatggtataactgatcaaatgagagacctgaagtttttttggaagtttatggggaccctccacattgattctcatactgactgggtgagtttaaatcctcccagtagtttatatgaattccctttggtctatgcctattgtaattttttagtggtagacattctgactcacattagatagaatttcaaaactcatttagtttattacatttattgtttcattggtggagttgtaggtggataaaaacatcaatgaggtagtaaagaaaaagagaaatcaagtgttagtggagtatgattatgtgtggttttcgcttgtgagtttgaggcacggcaaggcttccctactcaaatctaaagacaataagacattgggttctaagtttaagaaataatttattgttctaaaggaagtagtaattgagataaaaatagaaatgacagcagctgaaacattacggttaccaacttcccctctacttcggatttccacactgtgaaaggaagtatgagatagtgtgtgcaatatctgaattattagagatgttgaagtgatggggtagggatgggggactctcaaatgcttaaagtaaagcccatccatctctgtaagaagtagggtggaaatcaaagtcctacgttatggtgactgattttagctattctttcgtcaagaggtagtctgagctttgtctatcatgatattagggtatttaacattcattgtgatatttagtagcaatctcagtatgagtatatccaggccttcatagccagtctctcctctttattcacctatagttgtttttattttttgaaaatttcaagcatgtattcattgtaatttgattgtctttacactgatctctacacctaatcccctttcatggcatccatttactgacccattgagtttgtttagagtacttgaatgtggttgaagcattatttaccataccatgagcatattactggtggttataccagtaaaacattggccccaatctacacctttctgtaaacattaaccacaaatagctttttttaaaggctcaggcctcatgagcctctttctaatccatgataggatagggaagattagaagcttctgtggatcatgggtgggtaggaattcgtatccaactataggtttagcagtaaatggctagtctgtgccaggaagataacatattctgtagtacactatccttttgttctcttatattcttcaatccacaatttttgggatgttctgtgagccttaagatattgatgcagacatccaagtttgggatgagcttttttgagtatttcttaattacacagttagggaatcattcagatcactgtcttagatccaacatattgggaataccaaattgtagcaggctttttttgggtccaccaaccagctcccaaatcatgacacagagactccttattagttgtgaatgctctgccttatcttatgcttgtcccactagcttttataccataatctgtttctattcatctacattttccttggggatttttacctttctttcattctgtatgccctattctgtgtgtctggtggcttcctggctggccagccctgggcatcaccctgcctttctcccttgttctctctccatgttctgaagagtagattcttccatctacttattctttctgcctaccagcttgcctattggccattcatctgtttattagaccaatcaggtgccttatgtaggcaaagcaacatatctttgcagcattaaacacagcataaacaaatgaaacacacatttacatagttaaactaatattctgcaacaccagacagtgcctgtccccacctgctcaaaggaagatcacaactacagcttcaggagctttcttcactatgtcttcctcctctattaatcacaatacgaactaaacagttcaagcaggaagcagagaaacattgctatctcagaaggagcttgaagcagcagaatttgggggtatcaccagtcctgccaatgttagcctgtcataccctatatcactgttcagcctggcatgtacctgaataccaagaaaacctaaaagacaaaaaggagattaattgaaggccatttaaactaaccaagtgtttgaaacatttctactgagtctgttaattatattttctaataaaatgctggtaatttaaaagattttatctctaaagaaccttcctcttaaaaagaaaaagaatgctgtcaagctaaactgctactagtgataatcacagctaaaaaaaaattggcagcattcaggggaattttctatcatctaatttttctaagaagagaaaaaaatcagtaagaatccaaattttcaatttgtatatggaaaatgatatctattcaattttcatctccagttttctttctgggtttcaatgacatatgttgggttttacagattcattggtccttgaatcccaatcacatgcacttggagatactcaaaagttctggtccaaggaccatcagtagtagacatattgtagatgattaggaaggtgacaaactacatggttaacatataatctgcaaaatctttttttcattactgggtataagaacattacaggaagaattttcaagtttcaaccgacacaattttaaatgatgtggttgctacaatagagaactatttaatttcgactctcttgcacaactaagtctactgggacgattttcttaagtaaaatatgattgttgtgattgttgacctaaaagcatgtttccatacatcatatagagtttcttaatttgatatgtttaaacatttctaaaggtaaccacttctaataacatgtaatgtagagcttactcttgtgttatggaaggtggaaatgaaagggttttatgtgctgtggcatcttcagtgcttcacagacatttctttcttcagctgagaacaaatgggattaataaactgtgaccattgttcctgtagcaaggtacagggaaactggattgccattctcaaacaatacattagatctgtaggaaggaggggaaattcacactttatttaaaaagaatcatggcctacagttttccctgattactttagagatccacaaacaccagtatgtgaggtgaggctctgagagacactgaccatgtgaacatggaaactactgtcaattgtcacaccagctataccagaacatcacatatgatctggcatttatgtcctaaagcaagattcagtatattttactttcaggaaactgctacattgtcccaaagatcttcactgaattgtggaaaagcctaactgaccaggtttcctcctgggtttcatatcaatatgtggctgagagagattagtttaaaacctggtaatcacattcccagggagcagagcctgtgttggagctatgatgccttgtactattgtataagagaataaggaagcactaaggctcatgaacatttcagctaatttctctggctgtggagagtgtggaaaggagatcaaggcactagccagctatgggaggctgagttggtagcttgtgctttataggagcatcactctgcttgatgacttcagtactttctagtttgaattttgtctgtattccaaatatgcattgtaagtctgatattaatctgagaagttacatgtattatgtataatttatagtttccatgcaaggtattagcatatacatgtaatgcacttttccatttttttttaaaaaatggagatttagttctttaaaaaattcaatctgcacatacttcatcattatgaaaaagggtgaaatagatttatagttttcttttcatatatctggtctgctgtatcaaaactattgttaccttagggggcctaatgtcaatagaaatatatttatcttcattggggatgttgagaagtacaaaatcaaactgtcagttagtttagtgcttagtaaggatctggtatatgaaggaaagatatcctctaactgaaatcacacactaggaggatgaactcaggtgctcaactctcaaggtactggcaacttgggctttgaaaagtgttcacattcagagggtcaatgtccaatacaccatctgagtggttaggtgtgatgtatgaatttggggagggcacactgtttgaagcacagtatgttctagagaaatctcttgtggggtgtaaatttgtgtacatacttagaaagcttaacagaaagagtctacctacaaacaaacataaataggtcttgtttctgatcaaataattaaggttaatgcatttgataactccaagatacagatcatataatgtaatggttaagagaggtgggagttaatggggttgcaaataatatagtcaccgccttagctgtactagcaggtatccccacattcagtcaggagggggtttctctgtggactcaatgcagtcttctaggtgagctttttctgatgctttgttgtcaatgtcatgtatatatgtgctctatttatccttgactgtaggtgcctgagaggccagcagtgtggtggggccccctcaatctggagttacattatacaaatttaagtatttctttgtcaaggatggagaggtgactcagcaattaaaaaggcatagtactatttcaaaagacacacatttgtttcccagaacccatggaaggttacaagcatgtgtaccaccagagccagaatatccaaggcctctgaactctgtggacacttgaaatcttgaagtaacatacccatacctacatgcttgtacacacacacacacacacacacacacacacacacacacacacacacttgaaaataataagttatctttagaaagtatttctttctcattaaatatttcagtattaaatatttcaatatcctaaatataaagctttattgattttattcaatatctgtctatatatgttaaatatataaaacctagcaaaatatataatattctctaagactggaaataatccacgagacattgaaatgtatttgtttgctctttgagagtggggaatcatagtaaatgaattggaaattgaacgaggggatgctgggatagacaggatgaggttagcacagagctagagagcccaaagaacagacaaacattccataaggaaaccattatattacatggtcataaaatggagagtagcctggaaagatggctctgtggataagacaactcactcttgtagaagatttgagctcccaacactcatgtctggcagctcagcacaaactataactccagtctgaggggtaggaaccccattgctggcctctcaggcacctacactcagggataaatacccacataagcacatcacattgaaaataaaacaaatcattggaaagttcagctagattgaattccgtttatcgacctccgaaaaaaactggatgtgggaatacctgatactatatctataggctttcactatcaagacaaattgagagttttaactttaacactagcatgtctcaaaatacgtagtgtagttcaaagtttcaaaatatactaaaatttaggaatgttatttggaactttcatgcttctgtaccaaatggtgctgtttacttttaattatgtagggagcaaatgggaaggtatgggcaaaaggaagggatagattttagaagttctgtgtgtcttacttggaagtcaatattaaacaaaattttagtgatgaccatatgtttgatattgatagtacactctattcagtatagcaacgaagtaagccagagtagttcagggctgtagtttcaatattgcttttacaaaattgaaattagctctgggcttggatccccagagggcacttagatataatttggttaactatcgctttcaaaacgtaatgccattcgtggtctttaaggctcccaggcagggacagatacattatttctgtgaataccttagtcaataaatgtgccaacaaaagatgcctgtacattcccaatctatccacctttgttctttatataatagaagattattatttatttctaaagctacatcttgatctattagaaatgtcacttatgagaataatgtcctgggacttctaatacgtggcaaacaagaaaatttcctatagaggacacatgtcaggttatgatataaacatcttgttggagctagagagacagctcagcaatggaatgcacctgctactcttccagaggacccagtccagttaccgatacccacatggcagcccccaataccacgtgaatcctgcgatatcatgcagtaagcacagcaggctctgtatcagctgtgccatctccaagacacagtagcagatttcatatgttctgtcctttaaaagatagaaatatcagagggctgctaagaacactcagtggttaccagagcaaatactcttgtcgaggaccggacttttgttctaatcacccacactactttcactggagtcattaactctgagtacacaaaacctgcttcttgacagtatcagccccacttacttgtgctcagagcgtagccttcataacacatgcacacaaaggtaaaagattctaaaagtaaatccttaaataaattaggggaaaggcaactgattttcaaatctccacccacaccaccttgatcacgtatgtaatagatacacttacagatgcaaacttgtgcagaaattaagtatgtagcatatatgtttgttcatgattctcagataaagatccaattttccacaggttcaaaatatacttaatagatgtgtgccatgtgcacatataaaagtcccttgaatagaacatcatacttgttttagaattctgtggatgctaaattgataatttgacaatttcagtaatagaagctttagtttcaacttgagaatggaaagttatataactaggtctgcaggccttctctagatttcttcatgctgcatatacttattttgcatgagcttgatcatgtcatttatgggtattaatgacctaaaaatgtctgttccttggagggacagaattatatgcatcatagatcaactaggaagtcttttttttcctttttaaaaattaaattaattttatttttccctttttaaatttaaatttaaaaaaagctgttttacatgtcaaccccagtttcttttccttccctccctcccctgacgccaccaaaacactatcccatctcttttctgctcctcaaggaaggtgaggccttccatggggatctgaaaaatctatcatatcatttggaacagggcctaggtcctcccctatgtgccaaggctgagagaatatccctctatttggaatgggctcccaaagtccattcttatactatggataaatattgatccactgacagagtctgcatagattccccagggctcctaactaacacccatgttcatggggtctgcatcagacctatgctggtttcccagctatgagtttggggtacatgaactcccacttgttcaggtcagctatttctatgggtttgtccagcctggtcttcatccctttgctcatcaattctccctctgtgaagctggattccagtggtttggctcagtgtttacctgtgcatgtctccttctgcttccttcagctactggatgaaggctctaggatggcatataaggtagatatcaatctcattatcagggaaggacatttaaggtaagcatcttcagtactgcttagatattagttggagtcatacttgtagatctctggacatttccctagcgccagatttctctttaaacctacaatggctctgtctattatggtatctcttttcttactctcctctattcttcccctgactcaatctttctgctccctcatgtcctccttctcctaactccctctgccttcactatgctcccagttggttcaggagatcttgtccctttttccttctcggggaaaaacatgtctctcttagggtccaacttgtttcctagcttctctggctgtgtggattgtaggctggtcctcttttgttctatgtctaaaatcaatatatgtgtgaatgcatatcatgcttccctttttgtgacagatgttacatcactcaagatggtttcttctagttacatacatttgcctgccaatttcaagattccattgtttttattttccaccaagcagtactccattgtgtaaatgtaccacctttcctttacccattctttagttgaggggcatctaggttgtttctaggttctgactattacaaataatgcttctatgaacatagttgaacagatttacttgtatgaatgtgcatcttttgggtatatgcctaagagtggcattgctggatcttgtggtagactgattcccatttccctgaagaaccaccatactgatttcctaagtagctgtaagagtttacactcccaccagcagtggaggagtattctcctttctccacatcctctccagcataaactgtcattggtgctttttattttaagcaacgtggtatctcagagttgttttggtttgcatttccctgatggctgaggattttgagcactttcttaattgtctttcagccattttagattcctctattgagaatttcctatttggttctataccctatttttaaattggattatttggtgttttgatgattagcttcttgtgttctctgtataatttggaaatcacccctctgtcaaatgtggagttggtgaataccttttcccattctgtaggctgctttttatcttgttgactgtgtcctttgctttacagaagcttctcagtttattagttgtcaatctcagtgtctgtgttactgatattacattcaggaagtggtctcctgtgccaatttattccagggtacctcccactttctcttctaagagtttcagtgtggctggatttatgttgaggtttgatccatttggacttaagttttgtacatggtgatagatatggttctatctgaagtcttctacttgccagaatccagttatgccagcaccatttgttgaagatgctttctttttttttccagtgtataattttagcttctttgtcaaatataaggtgctagtaggcatgtgagttattatcaatattttaaattggattacattggtctacctgtctatgtttgtgccatcaccaaactgttttcaggactatagctctaaaacagagcttgaagtcagggatggttatgcctccagaagttcatttattgtacatgataatttcggctatcctgcatcttttgtttttctatataaagttgaatattattatttcaagatctgtgaagaattaagccagtattttgatggggattgcattgagtctgttgattgcttttggcaaaattgccatttttactatgttgattctacctatccaagagcatgggagatctttccattttctagtatcttctttaattttcttctttagggactcaaagttcttgctatccaggtctttactcatttgtttagtgtttccccaagatattttatgctgtgtgtgctattgtaaaagagtgatgtttctctgatttctttctcagcctatttatcatctgtatatagtagggctactaaatttttttgagttaatcttgtatcctgctgctttgctaaaggtgttcatcagtcaactgggaactcttacatctctttattatttttaacttaatagtaattgctaattccaaaatatttacaaacattttacagttgaaaatctgcacctcagaggtgttaaatctttccttgataaatcaacaaagtctggtatacaaattgatactaagtctgtccccactgtttcaaggctgagcaatgcatcccaccagatgaagtgggctccaaaaaggcaattcatgaccccaggatagatcctggttctactcccaaggactgtacaaccaatcaagccacatagctgtcatccataattcaggttccccaactgttggtccatagtccctgagccctcactagctcaactcagccatctccccatcatgcattgttcatagcatccctcctcccaatcttcaactgaactctaggagctcatccaagtgcttatttgtgggtcactgcatctgtttccataagttaatgattaaagtggaagacctgtttagacaccctctctggtattactaggagtcttacctggggtcatccctgtggattcctaggaatttctctagcaccaaactttaccctaaccccataatggctcattttgtcaagatatgtccttcatatcttccccttcatggcttccccttcatccctcccccaactcagtcatcttgatgcctcatgttcccatccctatcccctcccttttacctcccctcccagtttattcatgagatcttaactcttttctcttcctggggccctccatgtgtgtccctctttgggtcccccgttttacccaacttctcctgggctgtgtattgtaccttggttttccttttctttatgtctaatatcaaattatgagttagtacacactgtgtttgtctttctgggtctggattacctcacttgggagagttttctctagttccttcttttgcctgcaaatttcatgatgtccttgttgttttaccactgagtagtagtccactgtataaatgtaccacattttctttatccattctttggttgagttgcatctaggttgttttcagtttctggctattacaaataaccctgttatgaacatggttgagcaaatgtccttgtggtatgattgtgcatcctttgggcatatgcccaacagtgatattactgggtcttgaggtaaattgattcccaatttcctgagaaaccaccataatgatttccaaagttgttgttgaagttcatctgttgtagatgtttggatccccagaaacaacatcactcagtatatccacaaagatcacttacataatgtcaaagtgtgaaacagaccagtgctcctttctcactccacaattcaacatgactggactcctggtgatctattcatcacctgagagggcagatttcagcaacacaactttcttttcaattattagaattattacagatgtgctatatttcctttgtctcatttcttgagtatgccctctcattcccccactgatcacaatcatcctagtgaataaggttggttgtacagcaggtcttccacccaggttgaatattcctctcctggagttctagtcatcctttgctcttcctacctcagcatacccattctgatatccctcccctcccagtttatccagtttgttctgtactttctaagatttttcagactttgaattcgtagatgaaaagcacttggttaaattgttcaccattaaaacgctgtactcatcacagcaaatatttgaagtaagtttaacatatcagcatattaaaaaccccaaaattgtagaataatttatacacttagaaattgaaagaggcatatttttttttatttaatgtgattctatttgttcaagactccatgaaagttctcgtgaagggacataaacaattccttttctcttgactacaataaaaagggaaaaggaattggttttgtctactttaatttcatcacatataagagatgcagccatgttttactggaagacattctgcctaaggaagtactatccagcagaagctagaagtaaactgaaaattcagatgttgtgcttctatcatccctgcttctaatgtgatctgtggtcacttagtattcttcaaatagatattccatgttttaaaactaagcatatgcataatggcatgttagctttacagaggcaactacaagatttgaatatggcttgatgtatgaccttggaaagaaagttccttatttaccttattttttctttttcagcaaaacagtttaacaatatctatatagaaaacattttgagcactacataggaatatagtttatgaactgcatattcatgtataaataagaaataaatgaactcattttccttggagctggggagaagtcccaatgtttgagaatatttaatgtttctccagaggactcatattcagttaccaacatccacatcaggctcataacagcctggaactccagctcaaggagaactgacatatttttcaggtccacacagacacccccacatacatgtggcatacgctcacagagaaacacacatacacacattctttaaaagtttttaaacttgtatgtcctaaaatacttgaaatcttcaaaattatagtactgactgagtaaaaatatgttcttctatagtgtaaaatagtggattaatataggatgatggaatcatatgtataactattacatttattatcagaatctataataaagaaaattatatatgctaatatacaatttgtatattcataagtatgtgtatcttttgataatcggtgacatatatatatataatgttcaaatatatatatatatatacatattcatatatagcagtaagagcatttacttatactttctaagcttaataagcacactatatgcatatctattactagagtagtaaatatattttatttccatgtgactatatttgcttatttgctattataatcttttagataccaagattgatgtttaatcatttttgaagttttgtggaactatctgccttatacctattaaattaattttctcatcacatcttttacttcccatgaattcaacacaacctctaatttaatatttaactagtcttgctatgttccataagtgatgttgaactcattatttagtttacactggccttcacttgcaatgattactctgcctcagcctcacaaaggctgggaatatttgtgtcaatatttgtggctctgaattttcatgtgttttccttttctatataaaatctggtggtgcaaaaatataaatgattgaaccgtaaattccttagacatcatcacttaagtcaggctaattttattaatttatgaaaaaggaaacaattggcaatcattggttttctttgcagatgcacaattttacatgattaaaactttggttaattggtatattctatggattcctgcatccacaattgcagaatctgtaatataacacagttggaaaatgtgagaaggtgttctccttcctcctgtaggaataattgagactcccactaatattacacactagaagctttcaccttaaggaggcatctggcatttcaagtgctggattcccaaagattgcacatctccctacattcatgtttagaaagggtcacctccagaacagtgactgagggtcagaatttgtagtaaactaacctggaatttccaatgacaccccggcatcaccatgccttttaatacctttgcttttcttaccagaggaaacacctaatcagctcttcttggtcacaaatgttgtaagtatgctaggttagctaaaaagaaggtatcctaatcaaagaattccttccagttacaatgtttagcttactaatagggaatataagtatccaaactctgtttcccaattctataaatacaaccacaccctttgtgatatcacatcattgtttttatgtagatgtgctccttttagagttgcttttaatgagacattaaagatgtcacatgtattatgcttcccagttattgtataccataaaaacgtagactagattccacaaaaccttttacatatataaaaccaaaatcgttattacgttaagacagcataagataatgacactttaaaggtagttctaaaaaccaaatagtagatttctctaaatgtggtagttgcataggcacagagcaattaaatacatgtgattttttttgctgttctgcaccttgtcagttctattaaaaaaggacgtaacatatttctctgatattgctcttcattattctagagatgtcactttttagacgtcttagtatatgtaacaagaaatctatagcattctgcaagttgtaagaagggtttggataacaaaatgaaaagcatttacagtgttgttttgcttcctgaggcatcattctactcagacatcatctcagttggcactattctgccccagttgagggcacacattggtgcctcctgtcttttctcaattgcttagaacctgtatataaaatctccttggtgacaaaaacaaacatatcacatagtgtttagtttttgttctttttggaaaatttttatgcatcttatcattctgctactgccctataggtattcttgcctgccaattatcacagatgtttaagcagaagtcaacaccaagctagtgcactggcttctgtcatgttccatgtatgaggaagaagtttaaaaatgcaaaaaagtaacttacaagttctgttgaaatatagtgtaagactgttgagtgattagatataaatgcctgaagaaataatgcaagacaacttgctaggaattaaatattgcaggtgtttatgttgcagaacatacaacaatgtcaagaacatttatgactatgatcattggtgcagtgagcttagctggtacagcacatgcagcatagtctttggacaagttattttaaaattgagattaagttctgatcatcagagaagtaaccatttttattcatgtgtgatgatttcatgctcctagccatgacactgtgagatcatcttccaaaccacccacaacacactttataaatgttatttccaggaaattgaggacattatcagtttgacttctttttaactccaatgcatgctttttcatcaaaccatatttatttcccaaaagagcaaataaacttttctttaattctgaaaaaaatcgattatgaaaaatttaccattttcctatacaaacatgatatttattttccctcacgttaatgtaatttgacttcaaataatgtgtgacaaaatacatcaacctcctcagaacacagaactagtaatggtaaataaaacttctactgcttgctgcttgattatcaaatgtcaagttttcttgtgatactgtaccacactgtttatcttttccttgcactgtgatttagaggttgttaatattcctacttaccaatcaaagtcataatgaagtaacaaggtttaatttcattttctgagagaactaagctacagagcgacctttatggaaattaagaaaaatactggagtcaaatactgttgacataaactgaatttctaagccagtgaatgtctatatgaggagtgtacacaatgtctgtatgtctgtgtatggtggaaatccccatgagtggacagaaaatatttgagagaactaaatactctttcatacagaactatttttgaagttacgttcacgggagtaagtccttcaccagaagctgtgcataggtcagttgtagttacatattttagattgaggataaccgtgaatttctagtgaaaccatggagcatagtcaaaaccaatgaatttctaggtcttaaaacatgtttcagtagaatttgattttacaatgacatgcttacagctgatttgtataattctggacattatcttataaagaacaagcacactggatgaagctgttacagaaccacaaactcctttttgatggacctgttaaactctgatttttctgcacaatgtgacaccggagccctcatttgcttcttaaatttgcagctggctcatgcaaaataagccattttgcagcccatctgttgtaaggaagaaatctgtgacagagcagagctctgacctgtgctactttatcacttgggttgcaatttctaaatagatttcaaaaataatgatgttcagtttctacttttagataccagtgagataacacctgtctagacagatggtctttggactgtgaaactaaagacagctgagaagcagaaaaatcaagttggcgactagtgtgaaaccattagaatctcttgtggaaaccttttagttctgaaaaacactttctattaaagacctttggggaaacgtgaacatgctctcaataggaggtggaatccaaagaagtgacaactaaacctgcataaataaaatattagagacacccagcattgtgttaaaacacttcattgtttaactaatactttacactaagtcattaaggtgaattcagccttccttcagataatggtatcaatttgtttaggaaaatttctagcaagagattgattttctttttattgtctcctgtggcctgctgaccccatcagggagttctttccaccggttgtgctagtaagtctactaagtaataaaagtgctgtggttatttcaaggaactgaaactcatccacaaccatctcagtttgtctcaccattttactgactgattttgttaaatatgatcctcccaagtaacttgtgttgctcttcatgaatagcattacagtcatggtggaaacttatctctccttattcactattgagtcctaaccattcatcagtaaggatgttggtttatgtgctttctaacaaaaagaaatgaactcacatggtattgttgaaggcacacatggcaaatgtactagatttgaccaggtagatgttggttaatcatatagttggcaaaaaactattttttttcctttcaggaactagcagtgtaaacaaagtgtacaaagttcttcatttctaaacccaatccaaacatcaggtttaatatatattaagatcagatgcatgtttttttctcagaaaacaatgagaaatttgtataattgcatatatgtaatacattcaagtaaaactaattgatgcaatttcctagatattttgcttatattttatgcagatttttatatctaccttccactctcaaattctcctctgaatgtgaaaacttaacttttaccttatgcttgtaaatttttcaactctaaaagaaatatactgaacaacttaaattatgaattttttatgtggacaaatgattctcatcaaaaatattatgtaaacatttctctgaaaataaatatttttctttaatcattatttataattgtaagcatattgataattaattgtttataaaatacatagaaataactcaaagtttctggcactgattcactcataatgcaatactattcttttagcaaatcagcattttaagaaatatatcatttctgtgtagatatgtagacaatgtataactctaataaatataggacactattagtaattttatttgaaagttctttaaatatcttaaaattttctgagtcattttggttacaattaagacataccaataaaatgtaaaaagttaaattagcaaaaataatacttaaatgtatgaaatatgtggtactatatcgctatttttgtttttacatatttttcattactagttggatctatgtcctctctttgtttcttttacttggttctcattttattgattagcaatgactttgagaaatctttacacaagtgaatgctatgaaacattccacatgtatttcaaagagttccacagtaaatccagaatatgttacacctgggtaaaaagattaacaggctcctcactgagcacagaagatgacacttggatgaaaatgttttcaaaggatttactctacatatttctctgaatattttgttgttaataattaaattgaattcaataaaggtggttctaaatataaatgtatagtacatatatgcacacataaatatttactacatcctatgttccaataagcataggatacagtaactcataacatttagtacactatgaacacatacacaaaattctctagtggcttggtaactcccagaaaataagaaatcctttctaatgaaggttctaaattgagacaagcaatctatttgaaatagtcttaaaatcattacttataaaacatatcataaagaaagctatagtttatcataaaataaatgtaagcctagataaatactcttcaagtatttgagatagtgagaaaataacaagtcacctgcacttttgagtagaatgaaaattataattcctcagtgaaaaaaattgttctgattgtgattgtgtgtgtgtgtgcacacatgtgcgtgctcaacatcaactactacaaaacaattatagccagggtctgaacaagcaatgcagagattaatcctacttccaatcctgaagtcttgaattactttgagggaagacatgaaatgatgcctatggaaaacttaaaacctgtacagcagcaaacaacctcatgacatcatttattttattttttctttgaaagatttatacatgtatcttggtcatatctcatccccaattctgccttccccataataataatgttatgaaacactagtctctggacatgtcatggccactatacatgcactcacaatagctgtgtttgcctgcccaaggcaagaacaagatatagtgcgttaaaaattccagcatagtggagggtgatctcaatattccacccattgctgaggggcaccacttgtattctgcatcattatttaaaaaatagattcacatgaacacttttcccacgttagacagttgttttaaattttaagtgcacgaaatttatagttttccttttacgagagtcagaaacatcacctgccacccaagtcacaccactattttgtattcagtacactctggcaggaacacaggaaattatatagaaatagaccaattttatttcatattagagactttttactaattgcaatagcttttttatcggcaatcaattatttttcaaaaccaataaactttaatggacactgagatattttgtcacattattttcacagttggatgcacttatttaacccatagatagttttcaaaggaacaaaagcattttctgtgaagttactgtaagatgtaattcaactaaatcatccttgtttaaccattcatggaaattacagacagttcaaatatttatgttatctaaatacaaatgaatgaatagcattgcattatattaaagataattcacttctactgaatagatgaaaaatgaggtctagttacatgttgaaagtattataaatgcataatatttttgaaaaaatatattttgcaatactttatgtctttacttttaaaatcttcatggtactttactgcttacattataaagacagttaggccttccagccaatacttccctgtgttagagctccacttttgtgtgttgttggttcaccctcttcttacacagtccacattatcactgcatgttctcagctccaatctgtgctcatagacacatcagcatttagttttctgcactccacttaactagcctgatgataaggtatttttgtgttttatgccccacatatatcttaattgcaatggtctgcttttactccttcctgggtgattttagagtcatggttgatagtgcaaagcaaatgcaaatgtaaatacaggttcagatcatttgaaaacttccatctatgattaagataagatgattgtaagctccttggtttcatttttttttttaccattttgcattcttgtgggatctataacctcacctacatagagacaaaactaaaatattgagatatattgattgggaagatgagttagagcaccacaaatgtaaagaaacaaattaaatggtatacatgatttacataagcaaggcttgatttattttacattgaatttgaactctctttttaaaaatacatttcaatcatggccatgggcttttctgcacttgtgtaggaagttttaaacatgagaacaggtgcctgcagtcataaagaaggggtcagatgctccaaagctggagctgtaggctactatgatctctctgacagggatgatgggagttccaaacttgtgtcccatggaagatggcatgtccattattggctgatcatctctccagacattatgcatgatctttcttaagagtagcatctcaaactaccagaatacacttagatcaacaacattgacagttaaagaaattatataaaatttaagacagaattgtactcacaacctttacttttactaccacaaatctcctttgttactctgaagttgttatggtgctcagcatcaaatgaactcactaaattagtagcatgagacccttagtgattcatggaagaatgctggaaaaaaaccctgacatccccaacattctgccttgctgccaaacatgtgcctttagtacagcagctgttcttcctttaccattagagaccctctcactcttgtcttacacaagcttcatgtggcatggctgtcttgtcatgtctgctgcatgtgtaaactgtctaatcttttccaaatatcagtcatttgcttctctacacccctgttctgaccatgaagatattatccaaattcagaatagtaatcttactagaaactgcccttcttataccaagaaaaatgtagaattttttatttacttatttactcatttatgtctttagtatttttgagatattttgtaatttcaagttgctcataattatagtctatattcctttagactagatcaatggttgagatccaaattaatttaaattatacatggatgattctagctataatgacatactaatgagattaatcaataatgcattatattgacaataatggctattttgcttcccttatgctaattacaaatataatgctcagaagtatcgatgcctttaggatgttgaacagatagtcaaagaatgcacagtcttagtgctgatgaaggggtggcatttgacactacaattgtaaatgaaaaagtatatatactagcagtatttaatttggtataaagcattgatatcagaaatcttccacctgaattttaagtacctcacagtttgcaccattacattatttttaagtgagtcactgtgtatttagctcccatatgaagtgatgaagcacagcccttcaacaggaaaaccaaaaggcactggaataggggagacggagacaaacctttgcaacctctcatctaaagcttcagcgggataactgtgttcaccatggcctgtgttcacccttaacttgcctttgttggtaatttgaaatggaaacagaatggtgtgttattccaggaaagaatgtgagatgctctaagatcagtgttcattacaaagtgtacctaattttgtcactgtcattttttacaaagcccttatttgacatcattactgttctcatgtttgcaatttcatcaacttatcagattattttgtaatattgtgactgccaactataaatgaacaaccaaagattaaataataaaacaaaatcaaatagtaagtaacagcaacacatttctatctggcttgcaattggcattcggcgataaacaccacctttggattatgttctaggtctgacttgcagaagtacctccctggagctatattgatacattatttatgatttattagagcttgcctgaagattcagaaaagcaaagtcagccttaagatcaggttgtggtgacacacaccttcaattccacaggaagaagctaggaggtggtggtacactattttaaccctaggattccagattaagagacaggcagatctctctgaatccaaggccacccagatctacacaagagtgaatcaatctaaaagagaattatagctcacacctttaatcctaacattagggaaatatataagcaaggtcttagagaggcattcattctccacccatgctgaggaaaggttacagtctgaggctttttttctttttccaacgttttttattttttttttgtttgttttgttttgtttaatttgaattagaagcaggattgttttacactacaatcccagttcccttctcccacccgtcctcccctactaaaaccctatctatcacatatcctttctgctccccctggatggtgaggccttccatagagtgccatcagagtctattgtatcctttgggatagggcctaggcccatacctgtgtgagttggctcagggagtattcctctatatggaatgggctcccaaagtccacacctatgctagggataagtactgccttatgcttgtaaatttttcaactctaaaagaaatatactgaacaacttaaattatgaattttttatgtggacaaatgattctcatcaaaaatattatgtaaacatttctctgaaaataaatatttttctttaatcattatttataattgtaagcatattgataattaattgtttataaaatacatagaaataactcaaagtttctggcactgattcactcataatgcaatactatgcagttctgtgattagttgtgggtgtctggttctacttccaccagctgctggatgaaggctataggatggcatataagttagtcatcaatgatgagagcttgtggagacaggatcagcccattcagcctagggtagaggtaagaagctagtggccagctgctttgcttttctgatattctacttgaagcttgaaccctatttttcatgttatacagagccttacctacaagatgacactagggtgctatacttcttgtttaacttctttattttagtgtgctaggctaaattttaaaacaatgttgtagaattaaatttcattttgattcacgtgtattaggttttcattagacaaaatcatatacaatctaggataagcaaataaaatccccagagttcaaagtatttaagttttcaataagtaacttggtctagaacatcacttacacagaaatccaatatcaacaatttaacttccaattatacaaataatgagagcagataaaagtaaactagaagaccaattttcaaaatgaattctgaaattttcttattttagaaaagttaatttaaaaaaaagctcgctaagtactgggaaggatagtataaaactgtaaaataaaataactcataatcacaactatagacaattgttatcatgttttaaatattttctgatcataaatacaaatacaaaacaaaacaccaccatcgtatggtgtggctttattattaaattatttattacatataacttttagtatgggcagatgtaaataatttctcaacttaatcacttttgcataatcaatattgaaaataaagcaagtcatttaaaataatcaagttactagacaggaaaatagatggcaatttatcaagtactctaaccctgatactccctgcttacctgcaagcacattgttttcattttgcttgtttttataattttctttaagtagcactaatcaaaattaatttgaatcttaaattgtaatgagaaaaaatgatagtctcctcatcagtgatataaatttcattcccattctatataagataatagatgtgtaattgtcacacataagacagatacttaagaaatataaatagttctctataaacaatctgttgcatgtttgttgtatttcatactacttaaaacggactcagatttctaatatgaatagccaaaaggtgggtgcctttttattcttccccccacaatctctctctctctctctctctctctctctctctctctctctctctctctctgtcacacacatacacacacacacttacacacacgaccagttctcattttgtaacccatggtaaatcagggaatgatggcattgtgggcctgtgtcaccatgtgtggtactcaacaaacatgtcaaagattatcactaaagaagtgatggtgattcgatctgttgacacagttcttgaaatattgcagttctcactcagatatccttgatacaagattattattttcttttttatgcatttgctcaaatttctgtcagtggaattagagaatggttcttaacataccacttattgtatgctagaacctttaatttatatattattttattcataaatgctttatcaccagagggcatcaccttagtcttgagagaggtgttgaaactcagatatgtgcactagctcaccaatctcatccagccatgtgccctgttggttttcctccaccctctcctggctttgctgtaaccacacagggctgatccacctagctcgggttctgttgttcactctagcctccacccagtggagtggctatggttatagcagcacatttgctcaggtctatgtgagtcccctcttacactgagaagtgtctccatgtaatgtgactcttccatgatatctacccatcctacacattatcacttttaaaattgcttcctaatcatttatagaaactaaaacttgaaatactaaaatattccttttgtgaaaaaagcaaagtaatataccaagctattatagcgcttttattttgcaactgtgctgtacacaattttactgtttatctgaattttacttaagaaatatacttcaataatttgaagcaggcagattgttgctaatgagtatgtgctaataaaagttgttaacttatggtacttcacctgtgtaacactaaatgacctgcagtgtagaatgtgattaagtacaagtcattgtcatttgacactgagctttagtgtgcaatttgtaagttgtgaaaccttggaaaaccataggaatactttacttccctatctgagcagctactgtcctcatcatctaggatgaaggactgaatgctgatgagtttatctatgcaaagtgcttacaatgatgtagacttacctagagagaacatttcccatgttggagtaaatactgcaaattaataaagtttttgcagctatcactggaagttggtgacttgtcagtgatggtacccagttcttaacacaacacttatatggtagaagcagaaatttcaattaagaagcgtattgccattactgggctgagctcctggtgtccaattgtgaagagagaggagtgataatatgagctaatgggtcaagaacatgttgggaagacccacagagacagctgacctgagtaagagcaagtaagaactcactgaatccagactgacagctgaggaccctacagaggaccaaactaagccctctgaatattaatgagagttggaggcttaggcagtttaaggttgctggtagtggagccagtatttgtccatggtacatgaactggctttttagagcccattccctgtggagggatagcttgctcaacctagatacagtggggaggattttggttctgcaccaaatgatgtaacagactttgatgatcctctatggggtggggagatggtgctggaagtgggagggcaggagggagagggaactgggattggtgtgcagaataaaatttaaaaaaaaataaaaaagatagagttaccattaaaattatagactttttaacaaaaggctctatgttaatataatgttaataaagtccctggttaatttattaatactgcatgggatgttgaaggattttcagtaagtaaaactgttactataaggtatatgtattaagttttaaaaatcaggctattattactaatatcattgataataatgccaattatattaataaactatgtttaatgtgattttttgcaagttttcagcacagtattctacactcatttattatcaccaatgaccataaagaaaacatgtgattatctttcaattattttgtatattaataaaaaggcctcacctgtgaaagggaaagaaaacatgacaggaaagcagaagatgggattcttggaacaagaagtggaccagcaggatggagcagtgaggtgggatgggaacaagggaagatcagcaaagcaagatgttacaatgaagctcatgaattctatgctacttttgaaataacaaaccacaaaacaaatagcattaaagccagggaccgttgtatataactgagatatagcactgggcagtggaggcaagataatcctgaggtaaaggtcattcttagcttcacatgagttagttttctcattgatatgctaaacctagcctactacccagggttagtgaagtcatggtcttggagaagaacctacaaccaccactttagaaaaatcattataatttctaagttcattctaaacatttgtccttacaagtacagccctcattcctcattgaggaaaattctctgcaacagagaccattacagaaaaccacagccaatcgtagccataaaaccctgttccaatgcatagatctatgaaccaacccctacacccaaggctcagagaatatcacagaagagagataagaagtgcaggaggatcagggagtttgtggtgagaccacatctcctaataatgtcagaagttacaccagcaacatcctaccatcatgactgtccaaacaggagctgatcaaggacaacaacaatacacaaaccaaagtggattggggctttaggcaaaattaaaatacaaggaacaagactagattttgaagggtcatgtcaaaaaagaaaacaccaggacaatcagcacaaaattgttaagaagctcaaggcatttatggcttagtatgaagccacaccagacttctttgtgagcacaaggtctccatgtccttgcaatggaactggggtatcacaagggaacctctatgaaaacaacggatttcggtatctcaattgaatactccttgctgttcaacagcctcgggcaataagtagagctggtatgcattttaaaacttgcagctttcactgaaaagacttcatctttattaatattgctaggaaacaacatcaaacaaggagtcatatttcttagtggaagacacaaaggcactccagcccctagaggaggtgtaaggagcactggagagaggtggcatgcagtcacccttgtgagggcactgcagtacaacataggattttaggtccttcctactttatttacatcaactctctctgtgtttgtatatcccaagtcctcaaatcctgtttgtcacagtgtccaagcacctcacattatgtgggatttacaagaccttctcaatatttttattttatgagtaaataaatgatccagggaagaatcatgatgcattgtaaatcattttacttacatagtaaagcaagaacactgtggaaagagttggaacttgtctcacacagctcaagcatgctcctattcctggtagtgtctgagctgattgtctgcagactgctctgacatttggatctgatgctttctgattctaagttcatgaaatattgacaatggagaacctcagaatccaggtcataaaatctctttcctacttcttgtgtgttcctaggcttccattctcaatatgcaaaatgtgaacttaattaatgacctaggatacctctctggtgtttttgctatgggattatggttcttcatatgtggaaggtagcagaagctgtctgtcacactgctagcatgttaccgtgcccacagttattagcactgctccctctttttaatcagacctgtctcaaaccccaatttcactttatgatttcatttcactgtctccaccaacataaaactgccttctctctaattaataaatatgtgttcctggagtgtggaactattacatttcctatgacacatttaatgaagtagcagatgaaataattcatactctggataatgcttaaatatttacttcaaatttacatttaacatgtacattcttatctgttcatttaattgatttctctgaataaggataaacatttttatatgtttgtttcttcctttacatattttaacatgtaagcacaatgtgaacaaagtagtttcatgagattatgtagcactgatatctgtgtctaagtcaagttaagcaaagtattgaaaaacaatacaaaaatctgtacttgagacaaattattattagaatattcaaactacttcaaaagaactgagtcaagaaatcagagcaaaaatacagggacaaaatggtccaccttgattttggacattgtgagattacttaaactcataatccaaatttcttcatcagacagtagaagagagtatttgtatctaacttccagtgagaaagtaaaatgagagcacaagtgtaaaaacaaatatgtacaagcatacacataatataaacatattttaactacaaataaatctttctatttaaatagtaaaacctcataataaatataacatttaatatacataaaactgtatagtgtatgcattcaaatatttaaaataaatattaacataagcttatatgagttttctcactatccaaatattgtcactaaataagcaaattgtgttaattccacgtaacacattttcctgcttgaataagccaatggtcattttttttctcacagaaagctctgagacctggaagaaaaagtgaataaatttgggtataggagactttcaaacttcacaatggtaaattacatgaaatgaaatacaattgtgagtcacgtgacttcatagtgatggactgacagaacattacttccccactcatgcttgaacttcctcagcagctactttttccaactggcatgaaaatacttgaactctgtcataattatggtcctatttgacttatttctgtctaattttgtatggacttgataaattatattttgaggacatcatagaaatttattttaatgaggataatttgaatatttagttgtttgaaagaaattctaattatttaaaagacaaaaataagatttagaaagtgctaaggcattttaatataatgattactaaaatttgaaggtattgtactctctaaaactaaacttgactttaacacaattctatcaattcactgaaaattcagaatttctcaaataagttgaaaaaagtcagcttaggaatagaagttaagaagtaaacatcaatcattttaaacatgctaaaacagaagaaaattcaatagggaaaacccaatgttctgaaaaaaattacattatgtaaaaaaaattcatttaaactaagtccagagtaagtaattccacagataccatttgtctgctcttctgcattgagcagtagaagtttatcgggccccctccatgttgtaggcagcctatgctctggaaagcgttaacagtagtcatgcagaggctgggccttggattgctaggaaacaaacagaaacgtctacacagagcttaagcaaacaatgtgcagagttgacagaagcaggtctagaaatccactaatcagaaggttccacgatgagtattagtgtgatggttctcaagattgtgtaacgttgacctacacacaggaagtggcagcatcctgatattgacatgggtatgtatgaaagaccacaatcttttcaggttaaaggtaactcatgtatttggtggagaaacaaaacccagacgactaggcgttgaggaaacttctttgcaaactaaatatctcaaggcattgatgaagacattctatcatataggctttcatgtttttggacaagaggatagcacccggaaaggaatgctgcaaattattaaaatagtaactatttatttgtctgtagataaactctgaactcctctctagagaccattgtctgtacatagccaggaagaaaccaaggccaggaggattaacagttcacatcactttagttcactcaccatccttattttttacacaaatatattgcccagttgtgtaagttatgcattttgctattatcactttctgtattactataaaattccaatccttaagtcctctgttgaaagttttggatcaacattaaagaacatggttgagaaagaagagtcaacctaactcaaagcaaaaactcaaggaagccaaagatcattaatgtttcaatccttgggactggagtacaagaaatctccggtttctggatcaatagcctttatagtctttgtgatcaaagctatcacaacaagcaactgagggatgaaggatcttatctggcacctaggtggaggtgccacaggccacctgatatggaaggccttgtggtggaggctcttagcagagggagagagaggtttcttcacatctcagtggatcagagagcagatagctcaggctgaaaccaagatagagctataaaccataaataataattaacacagtcaactaagtctgcaaagatccacagcttcccagaacagcagttccatgtgtgagcccgtgagtggatatttcctattgaatatgtaagtttgtgaacaagatgagttaacattatgtataatatttcaagtaccactggacagtagagaaagaatccactaggatgtacagcaagagcatgtggctattgtggttttaaacttgggaaaaagatgcaagtgtgcatgtgccaatgacagatgagatttttaacagaaataatacaggaaatggcgaaggaacactagaaatgtccaaactttaaaaatgagagtggtgaaaaaccacacagtaatgcaagaagaaggaagaagctgtcataggcgtaaagctaccaggatgattgatggataatattggtaccaagtttctgtctgtgtctgtataatattttcttttgcaataatggtcattgttatagtatctttcattttcattttttaaatttttatagatttttaaaaagcttgatgtaaattttgaattatattcactcaaaatgataaaattcccaattaatcactaggaagacttggatatgtttcactccctgccacgtaccaaatatagaatgttatagcagcttttcactgattttattatatatttattttattttaaattttcttaatataattttaatatatgtacaatattcatcatttatttcaataaaacattcacatttcttgaatagtgcattttagatgttgtcttgtctttcctttgggaaatattcttagtgtgtcttttatagtagaaagacattagtgaacctaaagttcactgttactgtgggtgtttgaaaatgcattaatttttgtttccctgctacagttggctcattatattggtttctaaaaattatgggtgtgaaatgattgtactatgtatgaatttcaaaccctttaagaggctcacactaacatctatgtattgaaatatttttttctgtttttcttttatttgcagggtgtgtgtgtgtgtgtgtgtgtgtgtgtgtgtgtgtgtgtgtgtaagaacatggacataggctgagagagtcagtgtcctgtcttacagtggtttctgtgaaatactgcagttggaaggatcaatgaggaggtatgatgtcatcctgataccatccttctgttatgatgattgacacttccgaagaacacacagtgctgatattttgttccttagttacacattaattgaagttatggaaacaaattagatcaagtttcctgggaaaatagagaaagcattatgaaagttcctgtgagggggagaaggagaactgagaaatatttcttatgcatctgtcaatgctttatgcttattgaagtgaggatatttctttgttaaattaatgaggtggcagcttcccagttaattctagagttccactcaataaaagcactgaacatattgaagagattgcaagaagggaatttatatccttgaaaagccagcctttccattttgttgagaaatgatgaagagcatatgttatagtaattgaaaaagaaaagtgcagaggaatgttttgtttgcaaatattttaaaattatggcatggtttactgtttatattttaaacaatcacatagacatttgaaaaacaaaaaaattctattttagtatatactacagaattcaacaactccaccaatatccatacctacatctagatgcttgtcttttgaaagagacatttgactttccaagaatacatggtaaatatgtgtctttgttcctaaaaagaactctgaagttgtctaaaaagacaattttttttccgttagtacaggttattcatgctatcaatagtcttatatgtctacttgctgcctattgtctctagtctacaccataactatatccttctcaaacacatatatacacttgactttaaagagtgcctttaaagggctggtttccagccagcacttttccttttctttcactttcctttccttttctttattttttctcatatatctagtccctgcccctcagctccctccttttctgttataatgcaaggataaattaacaatacagatcatttactgaacaatactgagaaattaacaatatgttaatatattcctattttgatcatggtcatttagctctgtcaagttaaaggaatcttttgtagttcttattgttttgctgtgcttaactcagagttttattttgtagtcctgactggcctggagctcactgaatagaccagggggagggtcttgaatcataaagatatgcctcttgagggctaagattattcaccatcataccaggctgtttttacggctctgatgagaaacatgtgtaaagtatcccctcacaatgaataaacaagcaaattaaaacacattaaaatcctctccctcttttatgtaggtcacatctgagacattacaacttggccagagttttaaatcacctcatgtttaagagtcaacatcctgaagaccaggccctaaagtaaagtgtcaacgatgaaacaaaccttggaatttgctgaaaagccacaccactggttcctgtagcataaaataaactacttttagagtgttgtattttcatatgaatgttgtaattgtaagcaactatatgctttagtctttgagctataagcaaagagtcctctgttcccatctgcaaaaacttcaagcacagaagaaaatgtggcaacaaagacaagtgctttcttaatttttcccccatcttggatgtaggtatatctaagcagaaatggtggcagcaaaacaagaggtcataggtcctgggtgaccacctgggttcaccatctgaaccatgtcttacaggatgagttgtattacaggaaactgacaagggtgattaagggctttatggtcagagagggctgcattcaggcaaagaagtgtgaaacagaataacaccttcaaggaccttaagttaatttgtttgggctcaaggataaagctccaagaggaaggagctcataaatcaagtgagaaatgtaggcaatgaatacatcactagctatttatgttctgtatttttctgcaattaaaatgtaagggctcttagagcagaggccatctttccaagatcttaatgattctgaacattctgcattttatcccatatcctggaactattcttaaaaggtgcactcattcttggtgtagacaaaataataatttaatattccctcattttgtttgatatacaacctaatattataaagtgtattttataattcttcctaattttcatggatctgttcagtcaatcatctacatacaaagaattggtatagcttaaggggtgatttttacatagcattttacaatatgtaagaaaatttagtttcaagtgtcagagtgaatcctaggactgtgtttttcaaaatttcctttagaaatctgtttcaatttcactaggtatataaatatttctcaaaccaaaattcaccaaaagaaaatggtgactcttaactaaattcaaacacacagattaatttaatcaaggataaaaaaaaactattcaacttttcttgtttggagcaatatgccccatttcagatcaaccctaaatgttgaaattcaattagctttccatgatccccttgtcctcccctgaccaaaaatacatatgcatagtcctcaccaaatattcataaagtcagttaaacaagtgaaggcatgccaaactgtttttatatgcactttgttaaagtgatgaatactttaaatcagcatcataaactgacagggaaagcaaactttagtggagtgctagcaaagaaggggaaattggagcacacgctccctcactcacataagtgctgctgaagagaagaggaaagggaaacacccagggtattgacattgactaatctgctgaggacaggcaaaaaccataagaaagaattagccatcttaatttctgttaccaacagaaaccacaaagacatttaaaatgtgtatctctaaggactgctgcacaaaatattttaaaacatgtacccagaactcatggattttgtttttagtgggtcaagattatttccatacataattacttattttctgtagtgttattaaatattcataaaccaaagttttagcaaaaaataaatacataaaattgtcatctccattactatataagtgccaatggcattgtgtcataatttttgtcccttgggcaatgcaccatattacttttgttttaaatcttgattatttgttaaaccttctactctaacaatgttaacacggcaccatatcccaaatgccttctctaaaatgtctgaatgtgaggcttaggcaaaccacaaaagaccacaaaaactcaataccatcacgaagtttcatgaaatgcaatatgccagcccagcttttcctatctcttgaggacagaagagaaacaaattgcttgtggggcaccagagccattgtgtgccactcaattctaattggtaatctgtgtaaaaaatgtatgactacttcagttataagcagaaatataataaaataagctatccttagagaggagggggaaattacagacaatttgaagtagaaaaatccacaataggctacaattttcattctctgtgaaatactgaatcattttctctgatgactcttcatcagacccccatcagccctctcccctgccatctgccttgcaaaaaaggccatgcaggaatcccgggctgctaaataaaaaggaaataagatgctgcaccttcctcaggaaatgtcagaacaccttgttaccaatcacttactgtattagatataatccagttctatacttgcgaatgaatgcctgtgcagtgagggatacgaaacatccagaaatttgaagaagcagattatttgtagattttgcatttcaatgatcatgtttaacacattttagacaaaaaaagacaatacctttttaaagatggttttgttttgtttttgaaacattatttcacttttcagtctaggctggcccggactcactgtgtagtctaggctaatctgaatagtccagacaatgtcctaatttagctcccaaccacacttggctctgttttgtaagtttttcatctgtatctttgggagtgttaagtgaacactttgtgtttgtcattggtgggttgtggtatatgcttgtctatgtaagtacacgtgactcctgtgactctagtgtgtctacagggcagatatggattccagctgccttcctctatcgttgtctagtgtattgattgaaagagagaatgagtgaaacttgacatggctgtattttctagacagacagtacagcaatgtctctgttgctccaaagttagaatggcacaaagcccagttttacatggatgcttgggatctgaactgaggcactaaatgcaagagtggcaggcattctcctccctcagccatctccccatgaacaggaagtactttttctaccaatagtaattgtggtctcaaagtaaagcatgtcttaatttgaataagaaaggtgacttcaatcacaaatgtgaagtcaagtacatggcatacatcacaaatggcatgcaatttaacttcagggcagaaaaagtttttaatagtatatccatttcactgtagatattttaaaaaatgtattaaagataaatacacaatgcatgcaacataagtctttagttgctaatatacttttaatctgaagctagagtttttattttctgatcatatggtgttttatgacaattcccctagtagttgacagcatacattaaatggaaataaggggataaatctgctaaataaataatattcatagacaatattaacaggaaacattcttttggttctagaaggcagaggattattacaatttttcttctaggattctacagctttgaagtaggctcacaccgatacattgtttccaaactcacattttttataatttgttttcaccagcatgtaagtctcaatttagatcatgaccaactaaacatatctacctttacttaaaatagatttaaaatacaaaagtaacatttctgctatttgtattttaattacttgtttaagttgaattttgggctattttctctacttactgtttgtatgtattcttaaacacattggtgatttatataaatgcacccctaattttattagacctacacatgaaacaaatacactagccacatatgtatgtgtatatgtactaattaagaataatttcatcctctttggttccagggaaaaagtgatcttcaaggatgttatgaaagaacttgaaccaaatctttgcagtttattgacgtgctttgctcgaggctgcaagaacaatgaataatacatgaagttcagactctgcagcatccctgtgctgtacacctctgagtgttccttgtacatgtgtagagaggcttgaatcttcattggtatgcagacagcatgttgcagagaagttgctctatcttcactgaattttgttttgacacatgtgctttgtgtcacctattcattgcagtccagaaacacaaacatttttctggtgagcattgtgcccctgggatgatgagcattgtgcccccaggcatatgtctggtcttatcttctccatctctaatggatcccccggttcagggtagaaatcaaagtgattcttgttgaagatcattgcactagagagcacactgtgaaggttctctcaaatgtactcattttaaatactggattggagccttagaaaaccacaagctagatgctgggatttaacttgagtaatagcaaaactcagtgtaaaaaaagaccaaaaatgtatgtgatagcaagaactatgagaaatctttcttcccagaagagagatcaacaggtaaggaagagctcaagtccctaagcctgtgaaaactagagagccaagagggatatcaagatttcaactagagaagaacaaactgttgacctaaacatgcggcccctgtctatactggcactcatcacctgctttgaaggagtaagatcacaaaattagtcacttttgccaatcacattctcatcctcatgacatttttcctttctgatactttggtatagattttctgacatggaacacaggtggcttgagttaaggaccagggttcttatgaggacttgtgttttatttttcttcaaaagaaaacacaattttggaaacgtgcaaattctgaagttctgtacaagcaaactctcctttaataatccccacatacactctcacagtttccttagcaaactaatgttccctggtgctaccttccaaattacttctggccttcactgctaaatgttgtcaggtttgttgtcgctaataataaattttctcattttcaacttcattttggatcacactatacacatagactatctttttctcatttatcaagtgcgttctgagtcttaaaatttttattatatatttattatttcaacataaaataacatccaccaatgatattatctcattctaacttttcatttactgaaaggttttaagtaataaattcaatttctttgataaatataaaacttttaaattatctcctttccttgtgagataattttaataattgtgttttcaaaatttgtcatttatctatgttggaaaaatttacagtacaaccatcaaaattgactctatttacaaagacctcggtgaagcacagctggcactggacaatcagcttcattgcctaaccagagctactgtgcatgcgctgctcgcctccccagagcctatcagagttgagagtgaggccgagctcctcaagaacactagtgatttccatgatcccctcctcatctccgcatctgtttctaatttattattagaatgtagctaatacttttagtttccttccttagttttcactccttctactcctgatttttgagaacctcattttgtgcattccccttgctaactgtgtggaatttcagcatgggaagtcaaggcaatgtcaagtgaggtgaacaagagcaagcttggagagagcattttgaaaccatctgtacattgtaattggtgtacttagaatgtactgatgtttaagaaatgaccactccagcataacaaaaaaggagattaaaatgctacatttgatatatcaagttcacccacataaagctttcatttaccaaattatcatgtctgtttccccctttgtcctatctctctattatttttcctctatttacatgagagtacctagaggtcctttgctaattgctgggaagattctgtctagagttactgtctggcctgttttacttttttcttttctgttttgcattcagtttcataaagcaaagaaaccagtttttaggaaaacatagttaacaaatttattaaatttaaaacgttacattgaagttccctggtgtgcaaatattccttgagtgtgtgctgcccagagaacagcaagggcagcccttaatggatccaattttatgcctgtggcaaataaattctcctccagtggccatctcctagcctgtcagcagagaggcaacctggagggagtaaggctgagtggcagggcagacctcatcagcagaagggaagttcagtccctcacacctcaggatattaagaagctaattaaatgtcccctgctgtagcaggaagcagcctgtgagtcccatcttaaccgctacactttctaaagcagaggttaacaattcctggaaaacaaggaatgcaaaaggataagaaactgggatttataaggaacattggactcaagttgtctcaattattttttatataaaccagttgggctgtttattgtaaaaagtaatatttactaacacctgatgtgtggcagttgctgacgtgggctgttaggaggtgaacctgtagaaatgctgaatttctgctctttagaaacttcacattgagtggagaaattgatttgtgaacaaaacctgcagaaaagggcagtccctagaaatagatagttataaggcagcatgcaaaagatgtacctcagaaccaacattgaaccatcaagcagtaagatctcgcctctgacaactgtgatttacaaatgaaaaagagtggatttcaggcatggctcagtgggtgagggagcttgctgtgaactctgatctggtccccagaacctccatggaagaaggacaaactggtccacagacgccaacccttcaaactcaaaacaaggaaacaaggaagcaaatacaaaatgataaatgcaaaataaaacaacaccctgaatttaattttcagttatccttcatctgctattctcttgaataattcccacttagttttcaaattcccttttgttccctaacaagagttgattctgtcattgccaaaagcatagttcttgactcaaaggaaagaggacttgtcatattctgtagccaaatatgaatggatatatatttagattactttgtatatcatgctgtaatttaataactattaaatgacatcttggtaataacagaagaaagaaatcataaaccaagacaccttgaatatattaatggatacattaggtagttgaggtctagaaaatcagggaaatctctgttccagaccctagagtctatctgatggcattcttaaactttggtgtagtgggagctagaagaatgtacatccccaaaggattgccttattagtcacaggacactacctgctgcatatacttgggcaagaagtgctattaagtgactaaagacagcccaagatcactttggcttccaaattgtaacattccaaattaatcaatctgtcctgtagaatgttcaagaaggatgcatctttgtttcaggtcacaacttcaagttaatataatttgctccagtaaataattacaaaattatctgttgccaagcatgacctgggaggacttgagactttaataccagagaatacactgattaggtagagcatcagctctgaaaataccagttttctatcacattgaagattttcagtttagcctaacagcaacccccgcctgtgtccacttcctacttctgggttcaaataggatcaaagtgagtctttgctatctatcttagatgatgccagttaaggaggaaggggagtacttagagtagagcacaggacaaagggttactaaaggtggaccagaaccatgatgtaccatttcatttgcataaactcctactgtagtctttaactttgttttctcttaggacagactgcgcacattcaaagtgattttcctaaaagccaacagtaaaagtgggatttttaaattaaaattctcctgcaactttttcagattttgagggtgtaacccttggcttccaaagattttgaaaacttgattttcaattgccccatttacccttcccccaaacctacaccctatgctcaaggcatttggctcttgaagccacaagtactttactcaggtgcttgtcatgcagccctgctcttgagcatccaggataggaaagaaagtctacatgcatttctccagctgaatgcctccccagcccttcccgcctatgtgaattatgaatgccccactcagatcccattgtgttcttagcatgccagggactaatcacattatgcagcaattgttgatttcctgtcatacctccttgtaggaaatttgtctcctagtgcctacaaggaaggaggcttggaagagtcattatgtaaatgctcaatggcttaactaatgactcaggatattagaattaggtttcctctaagatatcataaattatccaatatattcttttgacagagtataaatgaaaatccttttaagatttattttttatgtgtatatgcgtgcatatgcatgggttgatggtgggatatttacaagtgagtgcagaagccttaaaagccagactaggacactcctgagcttgtctgactcagagtctggatatctaagctagggcctctgaagagcagtatttgttcttaaccatctcttctgctccagaaattaaagtccaagtattaatgtaattttctgaaagtcatcagtaatgtatatagtaaattgcaatgctttttagtttttgttattcttttgtaaattcccttggatatttcctttcaatcctatactttcttgcctttatgacattttcctgcatttctctttgggccatttgtattgttgtatgtgtagcatcaatgacaaaaatgacactgaagacaatttattttctttaacctctgaagactattttagcttctgtgtagtaaatatagattgtctacacacattgcatatgtctccatgggcagagctgccaatcttcatctgaggagaacaaccagaaagaaggatgactgaatcttgctaagaggttggattacagagcatgagagctatggctgggacacagagacaaatgtgcatggactaccacttgtttcaggcctgagaacattgagaaattgcatttatgtactattaagaacttcttttaactacatttatcatttttatgtattgaagttatactttttaaaacagttacaaaggaaagaaaatttacccccaatttagattaaaaaaattaatgaagaaaatattatagaccttatcttgacttttcatttaatctgaactaacattatagatacttaacatgagtgaaaaaaaactaaaatacatattatacaaaatctattcttattatgcgtgcatatttaataaacaatatcttttggtatcattttatgtttgctcatgtgtcaaaacactagcaaatggataagactaggaaagtaataaaaactttaacaaaatgtacctttataattcaggacatttaacaagaacttttattgaatgatattatggggttaaaagtgtatatcaaatcacacatttaaaaaatgtggcccatgtggctctactcatcatattagtcacatataacaagaactacccccaaactaggctaattttgtgaaaatgggtccatatgtgtagactgcatgagtttcaaaattctatgtgacttttaaaagtttctggtaaaactatttggattttaggattcattttacctctatgcttaaggttacttaaatgttgtactacttactcattgctctgaaaaagtgcctgaagaaagtcaattaggaaaggaaagaatggtttgtattagctaatagtttgaagagatacagtccaccagtatagagaaggcacaatggccatggtgtcatgaagatgaggcagatgatcacacttcattcagaggcagaagcagagggagaagggtgcttctccctgtctttttctgtcttatgccctcaaggactccatctcagagcatgcccttgccattcaaggtaggattttctttaatggctaaccctttctggtagcatcccatggacatacttagatgtctgtcatctaagtgattacagatgtggtagttgacaatgaatattaagcattgtgcctggatgttgcaattaatgtagcccttcatgaagagagaacacaaggccatgatatctatcagtcattgtatttgatcacatgtcagttagatggtagaattatatggcatgttctacaaggacagagatttgtaggatcaaggatgttttcaatcatttaccatgcatgcaagaatactgtccttatcatccatcttattcattcttttttagatagctatcattgcaatttactaccaatataactttaaaataataactctacattgccagagataattcatgccaataacattgacaatttttgacatgattattgttaatttgtaggtttcctacttggtatggtactcattcttctacaaatatatgtattttatactatttctctgtatagaggtaaatagtctattacttgaattacttgaatatcagtaaaaatttgaaataaaagtttagtagtgttgttttattatgttctattgataacaataatatgcttttaatatactcactatataaagcaaaataaaaagagaaaaatttttactagacaattatcattaagtactatgatttacatcaagagcttcattgaaatgtaatatgtaagattaacacctttttgtattatatatgaagtgtaaatttatttcaatctatgaaagcagagacaaagccaaagaaaagtcccaagacaagattgacaccagagttcccatactttcatttggttttggcaggttacagaacatgagagacatacattaacctgatcgaaggtgactcccagaactaagatgtgtgcctaatgagcttcagctacacggggctgaggggaactacacagagcaatggtcagcatcagtatcctgtaactctacataacccagacaaggttaactaaaatgctaggagaaatgcaacagctaagaagcagcagagccaaattctgaatggagcccttgactgtagagtgaagatacttggcagtttttaattgtaatgtcagtagttggtttttattgcctgatctgtcccctttattgaaactctacaggaatcttgagattaagagttagattatacaattactaagaatatatgtaatggaataaaactgccctcacccaattcccaattcttgctattaagcaggcattcagagaacacactcagtgttttaaggctttgtttttcccacctgcataagaataataccctaagaacagaataactcctcctgactgtcagcacttagtctgactttagggttacaatgtgtggtatttctcatagttctggtaaaattaaaatttaaaattgcatacagttacgttctagctgctgtttattttcactctttcactagctatttatgtnnnnnnnnnnnnnnnnnnnnnnnnnnnnnnnnnnnnnnnnnnnnnnnnnnnnnnnnnnnnnnnnnnnnnnnnnnnnnnnnnnnnnnnnnnnnnnnnnnnnnnnnnnnnnnnnnnnnnnnnnnnnnnnnnnnnnnnnnnnnnnnnnnnnnnnnnnnnnnnnnnnnnnnnnnnnnnnnnnnnnnnnnnnnnnnnnnnnnnnnnnnnnnnnnnnnnnnnnnnnnnnnttatactcattagctgtagtaaacatacctgcctatttatttatttatttattttcaaaatatgctgtgatgcctgatgttgatgcttgactagatttcctctgcaatcaactaaacaacataccattgaccgtcctgtgatgaaaccggcaggaagagattcctgaggggccaccctcctccagaatggatggtatcttctttcaatatcctatttcttaatacaaaatggccacacaggaagacaatgttgtgtgttgcctgacttcacattttgttgatgtgtggcaatccctgttgctattgctgcccctgtgctgtctggcactgatctcatattacagcttctttgacttccaatgtggaaagactcagccctctaggagtattccaggtcttcagctcctgataagaacaactgagacactaagtttcttacacaaagagttactggatctcagtgtcttcaggatatagtcagccattcttagatcctccaagctctacaggctctaagccatcctgaaacgtccatatatacatacagttctgtttctttagaggtctttcctaacatacaggatataagtagtggtacaatgggcaaaataacttttccaaactgaaacactgtctgcatatttacaactgaatggtaacatatttccacctgaagtttgtcatctctggtattgaatagactgctatacagaaatggcaggtgaatatgttatatttaatatgccaacaactcacaattctccttttagagtttcataatgaaaactttttctctggttttgttgtcattttcaatataatatgatatccacgagacttagtaagatctactggagccacagtgtagataagaccacattcctgttttcttttttaaaaaattatattttaagcattcaattcattttagataccaaccacatttcccctcccttactcttctccagctccatccatccactcctcagaaagggcaaggcctcccatggggagccaacaaagcctggtacatcaatttgaggtaggacagagcccctcccttctgctctctacatcaaggctgaagaaaacatcccactataaggaacgggtgccaaaagccagctcatgctccagggatacatcttggtcccactacctgaagccccacaaacagaccaagccacacaactgtcacccacatgcagagggcctaaaaaataattttctttaaaattgtagtaattatttggctgatctttaataattcctaacaaagtttcatgggtctgtgtgtgtctgggtacgtgtgtgtgcaggtgtatgtgcatgtgtgcgtgcctatatgtgggtgcagtgcctggagatgccagaagagtgtgttgggcattgtgtttgcagacatgaaaatattactttctgcgtagatcctgtcaggagcatgagatgttcagaatctctgccattctatttatttaagataaagagcatctgaatgcttagaagagctcacctgagaagccacactctatgcacacagacttccttttcctaccacacctgtcaggtgccctaccccaggttgtttatgtctttatgtgctcagttgggttgagtcttattttcacttccacagctcccaaagtcttaacccattctgtccactcactgcccttcatttcctttgaccaaaactctgcttcccaaggcacaatttgtgagtcttttccatagaagaataagaatttctttatttgtgcgagctgtttacagaggaaaaacagtatggatcttcacagatgtcatgagtaatttcagccatcaggtcagactttattgtaaaaatagttagctatgaagtccctgaagtgtggtgccatgaaggtcagggagagaggaggattggcaccacctgcctcccccagtgtgtaaccagactttcatgtacacaaagctatataaccaaggagagagttaaaaaagaaatctcaggactggaggtgaggctatgagtttggggaagggtaatatgcagagaaggtagagtctgaaggaacacgtatgaatgtgaatatgactgtgtgttcttgtctaaaacattcttggggaaaagtagacaagtgttggcaatctctgttcatgcacactagcacctcaaactgattctgatcccagtttttgctttttcggatacaataccattgttgtggacagaaaagtcgaatttcactggttacatattttaaagaacaaagtcttaaaatcgagcacatcactgacgacacagtatctgaattctgcttttctgtgctgtatgacccagagtaaattgcttgtactgcttctatatagtgggaaaaaatccatatatcaatctcattttcctcttcctgtctgtgactaatcgaatcttctattaccacatcatcttaatactaatgatagggctggttataagccaattaattattaatcagaaaatggttatgtttcaactatgatggcttcagtcacttggattttagatctgtggtgtgtggactttctgtattctgtgggcttctaggattttagaataactttacatgtagtatgtatttcatcagtatatatgtatacatacagaaacatatataatctgaagttacagattttccttcaaaattttttaccagctatattatgttttcttcaactgcactgttataactttctgttgttataatatagaattagatttgttgtttgtattaggattaacacaataaaagttctttatttctggcccagtagcttatctacagctccataaatacccatattcatctgcatagaatgtaaactaatctttttctcttacataatgctaatcttacctaaaaatctaataatcctattctagcactaaaatgtaatatactaacgtaattataaatattcatttggcttatgtacagaacatacaacttactttcaaatcacatttgagtaataatactgatgatagaaagtatttaatacttataaaagagaggtgtatattggcagcttttttttcagatatttccatatatatcacctatgctaaatatatctgctttttaaatgcttgtataataaaatatattatgcaaaatatatcatgcaagattgtattatgtaaaataaactacataaaaactgtagatatgtaacatatattatgaaccatggtctctattgctaagtgcatttttgagcaactattatcatcagaaatcacatttcttaaaagcaacagtaatcttactgaaatttgcttcaggatagagtcaggtacatgagaaaatctgggtagatatagggtttcttaatgatcaaagaaaatgagcgcattggaactggtactcatgacattattattaatggcaggccatgagagtatggggatattaatagatgtattaatagagactggaagctcagtgcacatattgtaaatagcgtgttacaggaaagtcaataaagcttggcagccatgagtcttccaaagcttttagtgaaacatagggtgtgtgagtgtgacgagataatctcagaggtctaaggccgtaaatgtttttcatacaatgaaacctactttctttcaaaaactgcatgactaaaaggagaatatatatatnnnnnnnnnnnnnnnnnnnnnnnnnnnnnnnnnnnnnnnnnnnnnnnnnnnnnnnnnnnnnnnnnnnnnnnnnnnnnnnnnnnnnnnnnnnnnnnnnnnnnnnnnnnaattgcctaaaatatactgtattaattacgaacttgttttcatgctattaatgaagctgaataagaaacttcaactaggagggccaaggtacataatggatatgaaatgaagtcaacttttctctgttctaagcaatgatttaggcatttttcaaattagtttctctaataaataaggccaatatgatcaaaagaaaaatttactaatatggtccaccatcaattttataaataagtaatacataacaaagtattagttaacttgaacttatccagatacttaatgtcaaatgacaactgtctggtgctctatctctgaaagaaagatataaatgaaaaggaggaggcaaggtagaaaaaagagggaatggaaggaagagcaggaaacaatataggtgggaggaagggaagaagcaatggagggaaaataagagacagaaggtattaccagtgagcccaaggaagggagagaaaaggagagtggtgggagggaagagtcatctatgagttacattaagtgaacttgtgtctacaccaagcttttttcaaatgatccttcacttgagtaaatgtattcatcctaacacttctgttatgttcatgtttacatgtgttgctcataccattatatatgtggcagactataggtgatgacttgtgggccaacaattttatatgtatttggaaattgcttttaaaaagtggacattgtgttttatgatatcagaaggagctgtacattatccatctaatacagaaaatgacatttatctaaatccatagttctttgatgagagaatctaaagatagacccaggaaaataatttaccagtaacttgcatggcaaggagcttggaaagaaccagattgattgtatttaatttgtggtgtcgcttgctcatctaagctttcacttcctcatctgaatttcatgagagtcgcatgccaagctatttaatgaattatttttaaaaatctaatcaccaggataagacagctaattggtaggataatggaaaactaaggggtcatattttattttgtcttttaaaagccatataatgctgggtgcatatatttaagtatattatacatctcttcagtaatagaagggtgatttgctgggattttgttaatgtaaattagttaatttctaaacaatttccaaactcatcatctctcctggctctgtggtacctcgcccattcatatttcacccttccctacctgcttagatgactggaaatgtgccaatatttgattaatgacaatggagaaagactctggggcagataaagaaaatgagccaaatgggaagagcaggctcggaagggcaagggccggggtagagagagagactctaaaatccaaggctctgcaatggatggcttatgtgttctgaagcaaagattaaatcatagggcacaacatactatgtctgtgtagacaaggtcccagacttggaaaaatcctgtaacttcttactatgagaaaaaaagggaaaaaatactttgtatagccaatgttcaagaaaaatatgaagctataagatataacttcattattcctgtgtgtaagacatatacatacaaacataccaccaccactaaaaccaaacattaaacattgaaatactaacttgtcatatttccttagatgtctaattcttaactcaaatctcatttattaaaaactgagctttatttatttctaaatctatttccatttcttatggtgtcaattcaataaagagtccatttgctgagtggggaaatttaggtccatccatgaccactacctcaaacagaacattaacacagtatcacaagtttgtaaatgctacttcccaaatacattcagactcccacagcagttgctatcagtaagctgaggttctcagtacttgcttaggcattccaggtccattgtcaatgttattcagaccagtatcctttctcgttgttccaagcttcatagatgagccatagtggaaatagatagtaatgtggattagaatttaatctttgggttgagcagagaaaggcacctgctgtcaatcccaaatacctgagctcagtgtacaaagtattaggagagaactgacatccaaaagctgtccacagacctccaaatgaaagtcataacactgtgtgtgtgtgtgtgtgtgtgtgtgtgtgtgtgtgtgtgtgtgtaaactcacacatacaagatgaataaagtgcaatccacagccttatcccagattaaatttcaatgatttcccataatccccaacatttctttctgagttcctcttttttaactatcctcaatcaacataaaggctggcaagtactcaaggaaacttgccttgacattcttaggggagaatatccctctttgattgccagtttcctctatatagaatatctcatcacatctgcacagttaactgcctcaatgtatatatttgttgtcttagtttttctattctctcttccctaataaagtaaaatgcatctctgtttaagcatctctgacttattcatgagcacatttacagttatgttttattctttaaacatatatctgggatctctaccagaagtcagcactctttggctgtgtatattttccatttgttttattccattttgttttgacagaatcattttaagtgcctctcactgttcttgaactcatgatcttcctactacaacctccattgtgctaggattatgggtatgtgcctatctcttttctgacattctcttagaattaagaacaacatctggcaaaaaaaggacatgtttaaatatttactgagtgggatgatgatgcttcttaaatagaagttttacttcagaaatatattcatggaaacagacttgatgaagttcttccatttctgcatgagtttctatgtgagtttaatttacatttcagaagctcaaatagcatactatatttctcatttcaaaataatcaaattatagcatttgttttaaaacaaaaaacaattcatgaagtctgtggacaataaaaacactttatagtattttatattaatattggactaaaataaactttcagaaatacctaaaaataaaaaccttgcaaacaaatgatgtgtgtgtgtgtgtgtgtgtgtgtgtgtgtgtgtgtgtgtgtgtgcgcacactcatctgtgtcttctctatgctcagactaagctcactgaacacacttaaaaacatgcatttttttgtagaatttgtcaagtgtttcaaaggcagggtgaccatcagccccatgaaatgacataatctaaggtatctgtggccatataaactgtgcttcttaaaactgttcatgcttgtcagtttactgacaagtaaaaatttggagtgaaggtattgacaacagtatgaaatctactctagcaaagttgacaatgaagagaaaaatgtggacttgattctaaccaaaatttctttcctaccaaagaaaagttgattccaaaatgaattccctcttacccatgtttacttgtaaggtgtttatatgcacagtgagccttgattatttgtcatgattctaatgtttccttacaaacaaaatttaaatcactgctaattcttagggactgtaatcatggacaccacactagaaaatatggctgtaagtttgtatgtatattctgttctagcagatagcccttataacagacatgtagctattattctatttaggatctcagcccaagggatgatgccaatcataccaagagagtgtcttccatgtccagttaaccattattgaaaaaactcagagacacacccaagggcatcccttatcttctaggtattcatcaatctcataaagttgacaacaaaaattgactatcacagtcactgaatatacataatatttaatataaggtacaacataaaaattaatagctctaagagggcttattgaaattcttaacagggaacatggaatcaataaaacagcagggcatatctataccaccaaagcatgaccaggaaaacatttgcaatgagaaagtgttttaagctattggacctttaaagcctaatacagaaagagaaaagggaaaacctgggggcaaaaaacaggcaagccttgaaattaaaaccaaagcaaatgagccaaaggcaagattccctgaagcctggatgatcaggttgaaggactagataaagcccaggagccaaacccattcaggctcagcagtgagttgaaagaaggccttgagggcagaactcactctgttggcaacttgagaatgggtgccttaagtttatatgcactaaggcctgaaatttaaaaagggtgggtagaaatcataaaaatattacagttttagtagtatggatgcttctggttggtaaaaagctggaggatgacaaacatttgaatgaggaccatagaactgatgggaaattatattctgaggaagagaacaaatgggactgcaagtgtgcagcagactttggtagtaaatgcattgagtttatgatagatgccaggaccaatgaacacattctttcagtgggtacatattaacacctactgactgatcttttttcacagtgccgaaagaataaagaaaatcagaataaattttactctgttaaattgatgctggattcgtaagtaaaattatggaaatctcatatccatttggcttaacatgaaattgtcatagcataatattacttgtggaggacaagggagattgtatttattcttatctcttaaagaataaacatctcaaatgcttcaaactgacagtgatgaggcattttgtgaggactgtgtaatctttcacagttattttagtttctaggaagacttcatcagccacagagcttagtggaaacaatgagtaccaccatttatatcattggttctctccatgcttaagaaattaaaaaggaaagtagtcctaaaggtaatatggtactctgctcagaggttttaaattctggagacaatgtcttaaataaatcttccaggtggttccaagtaaatactagtttgttattttaagtagactacttttccaaaagaatttagctcaagaagataaatttgcaagtaagttggttaaatatctttttgcagtctttcatcagccaagcattgcaagatattgacactgttgttggttattatctatcacttgagtgtaagaccttattgataattgaatcagacaaagtgaagaaaaaaaggtgctactgacatggaagtttaattcccgcttgctaatttttgtcatatgagatcatcctacacatactactggacagaaaaaagtcaaaaatcttacccagttgtgaaaactgagccacaatgatgactagcctgtcaaatatgcactttggtgctgtagtagcatgaatattatggaattaactaaccacttctcaatggatttatgggctgctccacaagagagagctcatgcctgttactgttatctgggccaaaagagttatgaatggttaggtaatatgatctagggaagaaatgattattatttagacataatgttaaaccaccacctaatgatgtactgttaaacatcattaatacataaattactacatctatcaatcttgatcagaaaagctggtctttgcagtagatggtaatggccacagagacccagaactagtcagtatgcaaagaataattgactatggtgcagaatacactcagtgagatgcctagatcccattcaaaaagcaatgtcagaagaaggctgaagccatcaccaacaacaaaaataacagaaactagaaatcactggtctttgatatcctttaatataatggtctcaattcacttatataaagacacgggctaacagattggatacaaaaccagaattcatccttctgctgcatgcaagaaacagacctcaacctcacagacatacattacctcagagtaaagggtttatcatagaaaaacccatcaagaggaaatttaagttctgaacatctatgcctcaaacacaaaggctccaacatttgtaaaagaaacactgctaaatctttagtcaccctttacaatagtcaccaattacataaaatatctttgggtagctctaaacaaacaagtgaaagaccttatgacaagaacttctagtctttagaaaaagaaattaaagaagatatcagaaaaaaatgtaaagatctcccatgttcttagatatgtaggatcaacatactaaaaatgacaatcctaccaaaagtaatctacagatttaatgcaatccccatcaaaatcccacttgaaagaacaatactcaacttcatatggaaaagcaaaaaaaaaaacccaggatagccaaaaatcctgtataataaaggatcatctgagggcatcaccatccctgactctagaactataataatgaaaacatacatgtggaacagtggaatcaaataaaataccctgatatcaacacacactcctatgaacacctaatttttgacaaagaagctaaaaatataaaatggaaaaaagaaaatatattcaccaaattgtgctggtataattggctgtcaacatgtagaagaatgcaaatagatccatatctatcaccatgcataaaactcaagtaaaaagggataaaaaacctcaatataaatccatctacactgaacctcatagaagagaaaattggaagtacatgtgaatgtataggcacaagagaccacatcctaaatagaacaccagtaacacaaacactgggagcaacaattaataaatgggactccctgaaactgagaagcttctgcaaagcaaataatagggtcaacaagacaaaaaggctccctatagaatgggaaatgatcttcaaccccacatccaacagaggactgatctcaaaaatatacaaagaactcaagaaactagacctaaaactatcaaataatctaatttttaaaatgggggtacagatctaaacagagaattttcaacagaacaatctcaaatggcagaaagacacttaagtaaatcttcaacatcctttgtcatcagagaaatgcaaatcaaaactactctgagattccatcttatactgatcagaatggctaagatcaaaaattccaatgacagtttgtgctggaaaggatatgtagaaagaggaacactcctccattgctggtggaagtacaaacttgtagagctgctgtggaaatcagtgtggcaatttctcaaaaaaattaggcatcaacctacctcaagaccctacaataccactattgggcatatgcatacaggagccacattcacagcacaagaacattttctcaactatgccatagaaatattatttataatagcccagatcttggaaacaacctagatgcccctcatctgaagaatggataaagaaaatgtggtatatttatacaatggagtgctactcagtggtaagaaacaatgacatactgaaattttcaggcaagtggacagaactagaaaaaaatcaacctgagggaggcaaccccaaaccagaaagacaaatatagtatgtactcactcataagtggataccagacataaagcaaactatacccagcctacaatccaactatacccagcctacaatccataaccacagagaagctagaacacttttccagaagcagatggaaacagatgtataaatccacaactaaccaatgggccaaactcctggagtacaatgaaagtgagggtggagcaataatatgaacaattttgttaagatcctgatggggaaattcacagaatcacagaatctgttgacctgagctaatgaaagattactgactcaggtcttccaaaagggttacttgcataagactgaactagactcccttattatagatgacaataatatgattgagacaatatatgaggccactggcagtggtccaagatctaacactaatgcacaaactgaattaatggagcagattctatatggagagataccttgctcagcttagacaccactatgtctaatagtggtggaggaggagagacgttccttggctctgcctcaataagatgataagacatactaagtagacttcctatggggaggccttaccttctctgaggagcaaatggtgggagggaggagtggggagagctggagaagaggagggtggggtaacttggagtgtaatgtacaaaataaatgattaaaaatactttaaaaataaaataaaatgaagtagctcaaagagagagagacagagacagagagacacagagagatagagatggagacagagactatcgtgtgtttgctgtaaataagacatctatatctcactccatccacataagtctcagggatcttcttaaaagttgtgctgaaaaaaattgtaaaacccaaaagtagtgactatctgcagtgaatcaggatttgcctggcacagcaaggcaactgcactcatcaactcatcgtgcattcctcagaactacacaagatcaaactagccgaaatcccaacacacactgaggagggacacatgccagactgaagactagataaaaaagtattgtcaattgatgtctttggagggagaagggttcttcaagtacttatcccctgagaggctatccaagctcgagtagatggtctgacacccatgtacatgtaggcagtaataagtgacctgagttaatttagaaaaaacaaaagcatatgaggttggaaggaaaagtagtggtggatggataggcaaataattgcaggagagaaaagtggatacatttgatcaaaacacaatatatgcatatatgacattctctaaaaataaaggaaataaataaatattattaccgttttaaatgatggactaggcagttatagccccatggctactacactacttagttttagggaaaaaaattcaactatattaggaaactattccttactctaaagttttcttgtataagacctaactatgatgcctacttgggcctccacctgtgatcctatgaccatcatgatgaaatgagttttatattaagcttattctgaatttccaatatgcttgttcacatgtttacttactacttttatgatcatgtgtttcattttgtcttcctgaagactggatgtggatcattttgcatgcttaggcaagtttttgaccactgagattcagtagatagtttatcatctttaaagtttttgtgtaagtggtgagacacttcattatttttattcacaaaagtgtggagtcattatagattttcttcattatctgtaagtggaaacttcaatgagacaacagtcataggaccttttatgtttatcactaaatctcactttacttggtgaatatttgccacatcccttctataaaatatttttctcagatattccttgctgttcctctaaaaattcaactcttgtagagatcatctttttacccaagtacaaagtcacacatatatatggaaattctaaaggaacaattaaataaagaaatccgcagactttgatgataatagaggagagccaacaattccgttgagacttcagacaagttgtggcttcactcacttcattccttgcccccagttctttgtgccttttctctagtagtctccaagacacagacacagacacagacacacacacacacacacacacacacacttttatgtttttatttaattattaactaaaaaaagtgtgtgtgcctggctatgtgtgtgtgggaatgtgcactatgactatgggaactcaaggaggccaaaagggttcatcatatctactggatgtggacatatgggaagttgtgacttaccggatatgtactaggatcagaactccaggtcctaagaaagagcagtgaaaaccctttaccaatgacctatctctccagcttaatttgtttttatttcatctgtgatttttgctggtactggaagtcaaaccacacacattgtgtatgctttatgagccatacacttagctcttttaacattatttacttaagcacaaatatactttcacaagggtaaaatagagtgactgtgggaattttaagagactttatatggagaaatattattcattttaaagtttaataaaataaaacttaacaaacaagcagtaatttctaaatgtcaatgactgttttcaatgggctgacgaagtaccaggaccataaaatttctttaaaatattctttgagcaaggcaaataaaaatgtagaaatttgaagcttttgcttagatgctcttaagctatagcgtaagattaatgactttatctttcaataattatttaaaaatttgaatttattttaattattaataattattctctccatagagagaatgtggaggtcagaggaaaacttgcaggagtcagttctgctctcccaccatgggaatcctgggaaccaaactcaagtttcaggcagcagtcattatacactgagccatcttgccagtccaaatgtttctattttgttagactttggctggatccatcaatttgggggcctgatggcccaaagtttcgttaaacattagaagccttctttatcacaaggaaagtctcttatggacaaactaaagactaagcataaagagaaacctggggccaagcgttggtggtgcaagcctttaacccagcatttgggaggcagaggcaggtggatatctgtgagtttgaggccagcttggtctccagagcgagtgccagaagaggctccaaagctacacagatacaccatctcgaaaaaaaaaaagaagagagagaaacctggataaacagataattctaagtacatatagagtcataactgaatccatcaaagttctgtaagcctaagttgacaatgctaatacaggaaagagaaaaatatagaaagacctttcaggagatttccacagtcctgtaagaactgaggtggatttagagaaagaaacgtatgttggacagaatctgcttggtgttactataatttctgtcctttgaaaatgggttgaacttaatttcaccccacagatatatgtgtccaatgaagtgggtcttttaaattttcaggcaataaattgtggaatattctacaaaaaatattaaggaatgctatattacagataagttgttttacaaactaaaagtaattttccatggctgcatgtgatgtaacagggactgtacataggagatgggaagagtagagcagaccatctgatgtgttctgttcctggcttgggccatcgctgtgtacataacatggacttagatgagatttaatttgtaatttccttcctaaatttaatttaatttgttataggtgtgtgtgtgtgtgtgtgtgtgtgtgtgtgtgtgtgtgttcatgcatgcannnnnnnnnnnnnnnnnnnnnnnnnnnnnnnnnnnnnnnnnnnnnnnnnnnnnnnnnnnnnnnnnnnnnnnnnnnnnnnnnnnnnnnnnnnnnnnnnnnnnnnnnnnnnnnnnnnnnnnnnnnnnnnnnnnnnnnnnnnnnnnnnnnnnnnnnnnnnnnnnnnnnnnnnnnnnnnnnnnnnnnnnnnnnnnnnnnnnnnnnntgtgtgtgtgtgtgtgtgtgtgtgtgtgtgtgtgtgtacgaagattagaagaaaaattttgataggttcttttttcttctatcatgtgttccaggggttgaactcacatgtcagagtgtgtggcaagaacttttacctagtgagtcaattttattgcactgatttagagtttctgtaactacagtatgtaattagtaattagattcaaaagttagaaaccatgactttttaatagctctatgggtagactggaagaattaaagaatgactggcaaagtttttttacttttcttaataagaagctcctccctgaattcgcaaaacctcagtctcgcttaccagatagtcctttgtgcatccacattgacccatggcactggtaaagcagaagcatgtttcaaaggtgagagagtaactaccctcactattcaaaacattctaattcactaaacacccgtacttttaaaatttttaaggtctttcacctattttgatcacccacttttatctactcatactgattatttcttctttgtccccatatacatgtatgcttaacatgcaatgttattgttacatctgtgcatgcaaatacataatcacatacaccccagggttgatggcccctcaatatcacctgtgctaacctgccatgttaagtgccatcactctgtccaaattcagaacctttgttacattttctcccctgagtgattcttcttccaatggcagttaaacccattgtgtgctttaagacagtcagcagctaacagtccccattccgctcacctcccactcttaacagtaagcattcctttctattattcttaagatccatcatggcagcctgcctgtggactgtatgcattgaaagctcatgtaccttagcaaaattatgaaaactcagatgattcaataaacgaaaggttagcacacagtaaacctaagtgaataaagataacgaataaagactaaatgagtgtgtttactgatgactaatcattgctataaagttttccatttcctctcattaaatgatacatgcacaattctccaaggaaatattttatttcctgtgcaatgatttccgcacaatacccagtacaaggctctaaacacagtgggcaatcaatacctgctgttgactgtggaagtaaaataaatttgcaaaactaagtcaggcttgtttcttgtaatagaactccccttagtgatttttggcatcctaaatgaaatcaccacaggaaagtttatgaatgatgtgctgaatgctgcggatgaatgccatattttcagatgtaacactagtgggtgaactagttctagatagtgaaaaccatgtaaatatcaaaaggtagaaatatccatgtgttattaatgatttagatatttgctactttactttagagatcaatgttactgatgtcgagttattgaacaaaatcacacagttagaaatgcctttcctgaaataacattgttttcatgagatgctggatgtaataagtaaaaatgaagagatgcaaagaaaaaaaatcttctgagacatcttctagtgagagctgaagcagtgtgctgctaacttgctgtgttttagaggctttaatttcattcttataattactttggctatgttaatcaatcatattctttggtgtaacccttaaaaacattatttattacatatctatatgtgagtgatattagtattcatgtgaatacatatggatatatttgaaggaattataattgattcacatgaaaaaaaagaaaaaacaaaggcagatctctgtgagttcgagaccagcctggtctacaagatctagttccagcctccaaagtcacagtgaaaccctgtctcgaaaaaccaaaaaaaaaaaaaaataataactgatgcatatgaacacctgtataagcaagtccatgatattaacatgtatctgcaggataggcactggctataagcactgaatatttagagcagcaaacgtcttcactgaatagactgcaaatcatgtatataaaagaatatacccattcctagtctgatcatttcaagaaagttaaatggaaattcccaaatacttagaagccagaaaacttattacttataaatatgaaatgctcttacagtattagctaaatgagcaatgatttaaaattaattaggttatctttaaagatgcaatttttgactgcattttaactggtaaagatatttgttgccagacccacgtagctgaatttgagtaccagaagccatacagtagaagggaaagttccttcaaacatgcttcctttaaccttgacacatgtgcgttcttataaacagatacatgaacatacattcacacgaacacatatacacacatgctcacacaaacacagaaagtataaattttattaaatattaatttttatttaacttgaaattatttgatttctatttgaattattaactgatattggagagttatttcatttgagtaacaccagagtttatatcatagtcacaaaaagtatgaaatcttccaaatttaattttaaaagctcatatttaaaatagtaaacccattgtaaatatatcttccacttttcatttttatttcttttttttaattttttctccttttttattagaaaggaaattattttacatttcaaacccaggtccctctccctcccattgtcccctgtccctgccacctcacaccctacctatcccatacccttattactttggtctttcaaatcatgtaatttaaaaagtttatgcttctcgtgctagagtttccttcattttatttctgacaaagtgtcagtcatcacatttcaacagggagacgtttgtttggatataattctcagtgttgtagaattgcagagacaatcacattcactgaagatatatctgctggctgcacagccatgcatcaatgtttccaatttacaagatttaaattaatggctgttttgtagaaaacaaaaaagtagttatcaaagaaacaaatccaatgtaaaaccactcactacccactagattcatgcaatcattggatatttggaaatcaaattagaaatagtacaatcaagatgtgattctttccttgtaaaatgcaaagcagagaaaatggaagtggtctgagtcatcagaaactttggaaaaacgtagagagcttaatgggcagtctttctccttcagtcttactcatcaagctggcagtaggggttatagttgctagggcattgacactaacttgaacatggtcattctgttattagcaatgtatatcctttctccgttttctcatctttaccttgggagatgaatgcaaatacttcacgaagttttccttctgcaattgtatgtcggttgtgttgcttcctatagttgcttacagatggaggaacagggtgttcgttcataccagttaggaaaggaaaacagattcaattcagccacatttcaatgggaaatacatgattcctacaaaaatcttatatttggacattgatcttcctcttttatttctgtgtttaggtcaggtgaatttgtgaatgcaattaaatcagttgccaacattaagtcatatgctcataataagtcaactgcacaagtaaactttactaagagaacttaatattataacacttgtgcagtgaagaaaatatgaattgttcatagtgaatctccagaatttggacagtggtttgcattctactctaaatttcttaaccaatgtgttcaatgtgatttactgatttccacttacaacgcactccctattacacatttgcaattctttacaggtgaaaggcactggttgcaacaacagcagaagctgcaacaaatgtttaaaattgccagccatcttgacaaaattcgtagatgtttaatataatttaatatagacaattttacccaaaccccatcaatgagcacattttttttctccattttttatttaaattagaaacaagattattttatgtgtcaatcctagttccctctcccctcctcctctgccccccattaacaccctacctatccaataccatttctgctcgtcagggagggtgaggaattccatgggtgatcttcagagtctgtcatttcctttgggctagggcctaggccctcccccatgtgtctaggctgagggaatatccctctctgtggaatgggctcccaaagtccattcctatgctagggataagtactgatccactacaagaggccccatagatttccaaggcctccccactgacacccacattcatggggtcaggatcagttccatagtacacatcctaatgagtcaatttgcatctacttcctgtttagtaatcctgctaatgatatttgtgtgaaattgccattatttttccatggaaaatcttcagtaagactttggaatgttctctgaagagaacattttgtttataaaggtatttttatatgtagatatgtatgcttgaaggcatgtgcctgcagagtctaaaagtggacgtcaggactggtttacaggcattcttgtgtaggagtggtaggtattcttaaccacagagccacctctttcagccccttcattaagaaatttattataatgtatggagtattaaaaggagagataaaataggaaaatgggagtgattctttatagcaatcatagtttttctttagagttggtaaatgtggttattattttgtttaaatgatttggtaccatgtcatgtgataagaacacaattcatcttctcccttaggtacccttgctctgccttgtgttatctggtggcacaaagcctgtctaggaaaactttcaaagccattgcagtaattttgtgtttgggatgactttcaaaattgtctgtaacctgacaccatggcttgatttattatcatattaatacaagtttgctcactgaccatgaagccttctggacaaaatgctaataaaagggaagaagttccaaatggatgtaagtaacccaccagaaattatattagtcttagagttatatatgttcatgaaccagctcattttgctttattttcagttcataggaactgctctgctgtttctcataaaaattaccttcattgcacagtttgaaaatatgttaaaccgattgaacaaaacttgccacaatgtgaaaatatacctcaggatttccaattccaggaggtcaaataatctgcacagcttttaagaatgtgaatatttgcaagaaaatatttgcaacagttgcaatttttcatatgaaaaaaacggctacctatgtatacacgttaagtgctgttagcaaatctgcatacatctacagctgctgtcattatgatgttttgaacctgaggtttgattgttagggtaaaatttcagatactttaaggctaacagtctttacgactcaaagcctagatacattgagtagcgtttcctgtattaattgttataaatcggtgtggctttttatttctggtctttgtagttatgtaaataatgtaaatttatttatctctattatgcccaatgctatctacatttattattgtaattgaatgccccattttacaagaatcactgagcaaccatatgtgtggtgttcactttttctgccacttcaaattataagatcaatatcatggtttacatttcttaatttcaataagtgtatgataaatttattttattaatagaagatacattagcagaaggtaatgttatacaaatctatgaaatagatacttccaataaataaatattagctgtttgatttggcataataccttttggttttgtatatactgaaatagtacaatatgtattttaattcttattttggttaattacttaaaaattgataatgactaccatgtttgagttataaaatttctctctgtgtgcatatgtctctctttcaatagaggaataaaaatattagatgagtgaataatgatgtttattatttaatacaaagaactatgggcattatgaataagttttaacactaattaactttcaattcaaccccatttagtgaaattatttctaagataaaagaggaacataatctatcatgtttaagatgatattaaagtggtaaattctagttctgttttttacaacatttaaggtttgagagcagataaattattgtgctttattgcatttgacatggtattagattatcattttcaatggttttccttggagtatatatccatcctacataacattaatatgttatattgaataagtagcaaaagatgttatgagcatggtaaactattttagtttgaaaactttgctagggagatttaaaaatttattctatttatcttatccactgagaaggtttgcaagcaataaatactgttttagaatatatttttattaaatacatattaaaattatacattgaacctttcccaaagaaagagccaaacacatgtaactcataatgtacaatatttctctgatattttttgatatagttaaatttcaatttgaacatgattggcttgatatatatttataatgtaaattttatatagttttttccattgaacctttgctatagtagtttttcattggggctaacacctaaagtctaatgagttttcctggtatttcattacaggtgtgaatgcagtagaaacatggctttagttctgtcatttaggttgttttactgtcagaattttttcctactgtaacacctttgccattttccccaacaccttgctccttgtaagtggcaacttgataaaatagtgtgaagtttcccaaatctcatgccagctctgttctattgagaaaatacttatgtgatagatcttacctgattgttgcagccttatgagactagaactaagcacagtgtaactgtctgccacccaacaagccaccttacaataaccttccacctaaaaagatggatcaaaactaaattttaaaatatctgttactttgatactttgtgaggctaaacattttttcatatcacatctgtgtgtatgtgtgcacatttgagtattgtaagtatgtacaatgtaggctgtagagctcagaggtaaatatatgtgtctttctcaatagcagtatgtgttatttcttgagatacaatgtctactctgattggtcagtgatctttaggaaccctgttctcttcagcttcccagcatttccattgtacctgtgatactctggcttatatgatcttgttcttatatgttctcatattcggcagcaagcagtttacaactgatatcttttcttgctccctacacatttctctgaaacttcttcataaacattttggagcatagaaaagcattctctttacattggtactacagatcacattaggagatctacttctcaacacaaagaccaaagaagcaaaatcaatgatcaacttcttcagggctttttgcatcccccactacctgtaaaacaacagtgagaagacaattctaattgtgtgacactggaagtgtgtaaccatagcttatgcctttgtttctgataccttaaaactttctattctctcttgatctccaagaaagtcgtcatcttttatttcacttttgctgttagtgtttttactgaggcaaaaagaatgtgacgaataaccgaatttagtgttttagctgttagtgtttttatttaggcaaaaataatgtgatgggtgcctggctttctaagtttctatagtgatagaaaaacaagagtgtttgagtgcttactctctccaatttgatggtgctttgtgttgttaacacagagcttttattcggagagcctggctgagagaacagttccttaaggaagaaagagaaatgcaaaatactaagaaagggcttaagagcaggctcccaggcataatgacaatcaatgaactcaaatggggtactttgggactcctcccaggttattagaaccagttcctctggcagaactctctctctctttctctttctccctctctctctctctctctctctctctctctctctctctctctctctctcctttttcttgttattctctttattgtttatgactattacattttcatgaactttagacattaagttgctggatcatattttgtcagaacagaggcaggaaaacaattttaataacattgcaatcatacttgattttaaaatattttaaacaaaactctcttagagtacagatttctaaaattaatttgtaaagaaacagggcacattttctcagttttctccctagttactattatttttgttggcagatatattaaatatgatgtttaatagcattcaaaaatacagaatatcaattttattaaaatttacatagtctaaagtatttaaaatatgttagcacagtttttaagaatccattttacttcagtttcgcaagtagaaaaagataaatcacagaatttactcagtttattgatatttttaggtcaaagacaagccccaacatacaaacacatacagaatactcactgagcctcaccctgggtcacactaatgtttctcatttagtggttcttaatgatgatgtattttgggcattatattatacagcgtgtgttgtatgaagaattcagtacaaaaattatgcaaagttgtttgtaaaactgatcaaaagacttggtggaaaagaaactttaaatttacattttatttatttacggagacattgggagtatcatgttggggagaacatacattgtcagcaaaagtggaaacacacaatgttatggttcctggcaggctgagttggtcttctggtgagctttatgttaagtggatacaagttggagttatcagagaagagggaacatcaactgagaaaatatctccactagagcagaatgtagataaacctattgagcaatttcttaattagtgattgatgggggagtatgtcgcccattgtgggtggcaccatctgttggctggtgatcttgggttttgtaagaaagcagatagatgccgggcagtgatggtgcatgacattaatcccagatggatctctgtgagtttgagaccagcctggtttatacgagctagttccaggacagcctccaaagccacagggaaacctgtctaaaaaaataataataaaaaaaaacaaagaaagaaagcaaccagattgagtaagccaagatgagcaaaagagtaagcagcacccctccatggatcttgcttgctcttttcgtccctgtttgaaatcctgtcctgacttcccacagttgcctagaagtgtaattgaaataaatactttcttcaacaacttgcttttggaggtggtgttccatcacagccatggtaagcataactaagaaaggtgttcctacaacattcctgtgtggttcttaaacagcacctcacaaatgggaattggtgtcctaagcagaaacccacaaacacaaatctattcagtcagaatgagatgatgagtacagagaaaaaggcagactggagaagagttttccacagaagcaattcctgcatctgctggaggagagcccattggaaggattgattgaacaggggaaggttttgccatcttctacctacctagacagaacactctccttttggctgtacctccatttatgttcacactgataaaagacaggaagaacaagctatttatttaatttggttattctagacagagtttctctgtgtagcattgtagaccaggatagcttcgaactcacagagattcccccctgcctctgccttctgagtgttgggattaaaggtgtgtgccaccaccacccaactgaaaatgcttgtttctattatcgagatttaactctcacagaattaaactggagaatggacacaaacattaggctcaaacatagaaaaagatgtttatattattaacataatctagaacaatatgagacactattttgtgtattttctgggcacagggaggaagctggataatactttgttgtgtacattgggaatatacacatccaatacactgacaattttgtctgtgtggagggaaatttggcagtgcaataaaacttttaaatgcacgttctcactgactgaggagctacactcccagatctaattaaacatacctaaaaatgcaagtatggttttatacttcaaatgtatcttatttcacatgtgcaatgaatttatcaataatttcaaaaaatggtttgtaagtcattatgtgctcaccatggaagtgtttatatgtacacatatgcaattcaactgttatgcagatacctaaatagagtaaaagtgtcgtatttggtacaatgcttgtataaaagtgagatgagatggtcagtgtcagaaaggaggaactaggcaatatattgagggtgagacttggctttcattatattctttgttcttgatgataatggcaaaatgcttttattcattttattttatatgcatatattgagagactataaaatattttacatatatacatatacatataatataggcaaataaacttcctgatgttattttctccatctactcacatgacagattttcattctataagattatgatccctctagggtccttatgaaattggatggacttgctaaactctcatgactgtaactgctttgtcatcttacttctgtttgctcatgctctctttttaaaaataatttatctattattatttttgttatcatgtctgtcagcgcaagtgaaagtcagaggatactgcagcatcatcagcatttccttgcaactttttgtaggctcaaggactgaatttagggcctgagaagagcacagcaagtgtcttcactgctaagcagtctcagcagactcattcccatcctaccaaatatgtattctatcagttaaccagcacttgttcattctaatttgttcctatgatttggacttcttaaagggcatctcacatataatgtaggtggcaaaatatttcctttctgtatcttgtttattttattttcataacaacctttatcttcattcatgatgttaaaaactccagctccatcttcgagcttaataacatgtatagaacttatacaactcaatagcacagtaattaaaattacacagattaaaaatcagtcaaaggccctgaattaacttttttctcaaaattgacatattaagggacaacagacatataaagacatgattagcagcatttatcaactggaaaaatgaatcaaaattatgaaatattggtactgggcatgtattaagatgccccatatatatttaataggcaatgcaagcttttgaaaaggtaagaaaaaagtaaagccccaatactctatcttaggaaatatcagtccatgtagccaggactgaaattattacagagggcaattaagacattgaaacaagattatcatatgaccaaaaatggtccttttctaagtaggtatctccccagatgaaaccactatcaagtaaaaccatctgcattataggatttttcccagtattagtcacattaaataagatacaggaccatgaagcaacagtcaacagatacttgaacatatatatatatgtatgtatgtatatatatatatatatatatatatgtatgtatgtatatatatatatatatatatatatatgtatgtatatatgtacatatatacataatatatatgtaatgatatatatgtatcattacatttcattagcttttatagcactttgtcaattttgtaaaattaaggtaaaaaaatggagaaaatactgtttattcattcaagtaccttcatctatacaagaccattgccatgttatattcaaacctccaatgcctgcaatgattatttcctgttagtcattagtaatctgccacattgccaattttctacagcattgacaccctcagaaatgaaacattagaagaaaaatttgatatggtttatttttatttctggaaagcaaatttatgaaatgttgcctttccttgcaccgtccttaatatgacaactgtggtggggctatgctttacagctgtgggtctgctttaccgacaagtgcacagcaatgaagtacagagtatagcaaccaccctgggagggcctatggggcataacaaccagttgaccaatcaacacaaggcacggcctggcctccaagcctggaggcacaccaatcctgatcctgttcatacccctagacactccccttatgctgccatataagatctctatcccgtggctctctatgccatggcttcgcggcgtcttccctagccatctgccatggtggatggatgaaaggcctgatctaatggtgttagcttgttaaacaactgcaataaaagactcattgctcttacatcgaaaaaaatttatatctgtattaaaagaaaaaaaagaggcatggatttatagaggttttaatttctccatgtacaaaactgaattctttggagtgtttgagatacaatgataaatctatagctaataaagccattctttcagattaaaaaaagtttgccttgctcaatcattattcagtagcaaggtattgccatttcaagatgataattaattttagaaatgcaccaggatttttcttaagttttaaaatatctgttgtgtcttgttatgtggaagcaggaagtcatgtagagtccctgcagtcgacagaatgaaaagaactatagaacacaggccacacccttcctctacctaaatactgtcagaaatggtatgcttgtgttgaacatatggtttttgtatgcttgaccaagcaaaaataaatgacatacttgtatctttaaatgtttatctcataatgtaaatccatttaaaaattcaactttgttttgatggacatataaactaaaagggaatttttaatagctcacaatagaaattgatatttaatcctcactgaaagaaataaaattgccttctctaattttctttcctgtctgaatttcttgctttctttacttttatctttgtttctttttttccaacatgcacatgccctatagaactttatgacagttgtttgaaagagacttttcttagttattgccaccattcctttttgttttatattctatactagattagttagtaaatatttgatggacagcctgattgcttgtgtagatatgatgtgctacttaaagtgtcataagaattaccaaataaataataaaatatatttgcttcaaaattcttagtcccaaagtcatccagacaaagccaaccccaaacaaaatcagcatggcaatataaaaatataaaaatgtgtttgtactcaaattaagattctatttttgctctaatatttagcgactgcttcaccatataaaaggtcagtttaaattcttattagcaaatctgttttgtacatggtatgtacttatacaaatagacatgcaataacaactaatcaaagaaaaggccataagtttgaaggagacttgggagtgatatttgggtgcacttggaggaataaaataaggaaaggaagaaatgttttaattatacttcatccttaaaaataataaaaatgagacatttgtaagattactttattataggaaaacctataataaaatgaaagaaggaaataattgaggacatgaatgtagtctgcatcattttgctatccatctgccttttacttcaaaattagaatctgcgatataactaatactgtaaaagaacataaagactttatttttccacagtaaaaagaacaaaatattcaaaacaaagaacatccaaaaagagatgattacagtcaatatgtgcaaataaaataatacaatgaaaaacaaagacatgaagatactaatggccattgttggtgatacacaggaacctggtaagggggctcatctttagaaaataaaaatgctaatatccatgcatattttggtagaatttaaatcctaagctacagccttgaccttgtatgtatctttgcttcgagataaaaataagtcatttccaatctacacaaccctcttagttcattttttctaagctttatggtgaattgagtcatttctgaagagttttctttagtcttatttccttcttactatggttagcaggttaggataatcctccttccagaaaatgaagaaagtttttgtgtcactaagagaaaaacagtgggaaatcattgtagcaatttcacacaggaacccaacaaaaccagaaattctctgtgagcacaccaactgcacagctgtgggtttttcttgtatatgtcagggtgagttcatgttactgttacacttagttgtgtctttcagttcacttcttcctcaagacctccaaatccagaaggataacaatgacactagagctaaacctgaattcttcaaattcaatgaatgtcattttcctgagggattcataaaaaaggggaaaaaggagaagtgtactgcccaattcatataagggacaataacattttataaaatgtcaaatcttgttgagaaagatgttatccacttaatttagaacaaaatcttgccccctcctcatttcctctttaaagctcccaattacttccctgaaaggaagcccatgttttaataaggtttattccactgtgacccttctgtgtgtttcctcaatagacagcaaatctctgactataattgcaagatgttcaagtctcaatacttttttttgcctgaagaaacagttcaaaccacctcacaatggacacttctatttctgcaagatccccagtatagactatagtttcagagtgaccccagttagtgtagtttcttttttttccctccactccccatcctctccctgaagagcatccctcctcctctcccttctacccccttctgtatttctttttattctgagacagcttgtaaggaatcgcagactgccacagaacattttatataaccaagaatcaatcttgattccacataagactgcctacagccctcaagttatgggatcaaaggaaagcaccaccataccatggatatttggtattgactattctcaatacacagcctcatgtgctaggcaatcattctgccaactgagatatatattaatcctactagtatacattcttcattttgttattaagctgtttatttttctcaatgttttcccttttctgtttaagaccccaataaaatcctatcttttcagtctccaaaagcaattagtgctacacatactactgagtttaaaagaaattcctgtccagataaattatctgaataaatgagctttaaagattttgccctttccttccataatgatcatacattcacctcccaagaaaaagagaccactttcatagtatcagagcttaaaactttgtgatagaatggaaattaagataattataaaattcactataaatatactacagtgatatgttatgaataaactcactatgttagtaatcttaaagttcttatttttatcatttaaaattaattttttatatattatcagaatcaaatggccactgttatcatttgacagtaatgacaataatatttcagtgacttatcttaaattacacagttcattcactcttgtttagacaaaactctacaatttaaattcaaaatcttccatgccattgcatcatttacattggttaagtggatcttagaacaccttaggataaaccattttagcaattccagagccaggacccacatggatagaccaatatgagaggattctgtgaagaagaacagtagcggtacccatagggcaatgctgtatacagtcgtcatgtggactcactcccattttgttctttatttacctgttgccctttcctcacagcagcacatgaaagtaatcacttcagaagctactttagacctttgcttaactctcactcattgcattgcttagtgtcaatacctttaaaatgattttagcaaaatctatatggcaaaatttcttattatcaaacttcaatgtttggacttaaatctcaagtaggcgccattttactaagatgactgaaagagtgaaaacacattttaggaaagtaagtctccaaataaattaattcagagatgccaaggactgttcagtcattgaatctggaggatgttttgtactttctacaggaactacttataaattttaaatatctgcttagaggtgaaaaaccagtcttagggcagataaatcatttcaaaaacacccctttactttgtatataatacacttaggttgtgaccctccagatatttaatatttaaaggaaagagattctaaaaatttaaattaattcttattcacaccttcatacacaaatttgtaacaatttaaatattaaatattcagtacaagtcatcattaaaataacattatatgagaaaggacagcaattatcaacactgccatcttatttgtgctgaagatttttagcatgtacattcatcctaaaataatttcttttattcagctgaccatagaagaactttgttttagataatgactaacttaaatatattatagattcatttttacctttttagtattgcaacagttaaatccacagtttataagtaacttgacagttgaattttaaagctcataaaaaagaatattttcagaggcatgtttactgactttctatcaaatgttccaatgataatattatttcaaagagttcacagttaaaaatttaactaaaaattgaaaatgcgctgaaaatttcttactgtgattacccagtaatttttgtgtcattaagttacatgtggagcatttattattttaaattcttctcaattttcttagataaaattttgagaatttcttttatatgagatcaccgtagatgcctcctaagttcactgacaaaagctgtcacatagctggtacagtcttcactcctcctctagccagtggtccccagagttaatttaaaatatactcacatgctaacccttcaaatcaaaaaggctaatatttctcaggtaatcaatgaatacaagggatttcattcaccacatgctaatctaccttgatgctacaacatgctttggaatttaaaataaaacatagagctagatcttaattacatctgtttttaatccctttaaagttaacacttcacttttttgtatcaccattaattaatctttatgatggacacaggaaaagaggagttatacgtggacctttccaagacttaatgacattattctgtcatgtctgttttgctattctctcacagttcgcttttcatcagtaattcaaaatatttgtcagcatttagggaaataacagttttagcatcaactcttataatacagccaccatccaaatgttgccattagagcagcaccatagatgaaagcctgagtagtttaaaacgttctgtcttagggtgtgaagatgaaagcctcagatcctccgaaatacttcttgttgaaaacattaaaataaaataaaaatcactaacaaattattccatattttttaggatcataggaaatgttgtaagcctaatttggtaaagaatttgaagatttatatttcaaaataattaaataattccaaaggcaaatctgtctgatttaaacacaaaatgttttataagttttcggagattgctcaggacaccttaatcagttcagtggcccaatgaaccatgaaagacttaatgaagatgaaatggtatctaaacaaaaatgattttccagcaatatatgaattaattttaaaattcctatcatcaagtactgtgtattctcattaatattaatttaaaccaccaggaagtttgtgcataattcttcaatgtcaaagtccaaggtacaatagtatcccagaaaatattacaccattgaaagggaattcttgtttaaaactgcatgggagctcccaggtgagctcaaacagatcccatgcactctcctactattatgtttacattaggtttaatttaaagaagaagcctctttaaactaaagaatacttgcaaatgtaaagttcagtatctgcaaagctatagatgaaatttgataaattggaaagtaaatttctcatgaaattgcccatttatcacttagtccctgtcaacatgtgtggcaacatgaacaaaatgggtagtgattagagacattatgggagatgaggaggtatttctagatcttgtaaggaagtgtatctatggttcaactcttactgagtatttttactaatatgaatatcacagtaataatgttttgatccagctttaccaccagtgtgaattagcagtatttctcttctgaaaccctttatgctgcagttactatgggatgggagtggaggataacacctccttctaaggaattaacatctacaaggatattaagaccagtggatacctattcccctatcatgtttgtatatgtaataagatttttatatctaatgcctaagaaacaacttatggcacagataattgaatcactttccacctcatcctggccccaaacccagctacctatacctcagataaacttcaccgttctcatcataatggagacagaagcaggtttcacacatgcacagagagcagtaatctgtgtgagtataaacacacacacagactctctctctctctctctctctctctctctctctctctctctctctctctctcacacacacacacacacacacacacatacacacacactgtgtgtgttgctcttctaaaaatacccaaactctgtggtctgtatatcctgagctgtggactatttggaaccacaactgacatccatggaacacacgttattctcaatttctcaagaaaagtctagtgacaaactttaataaatggtaacccaagctgctgggttctttaggccactatgaattttgaaggaattactgattataaagccatagggaaaatcagtttcataagtcagtactcagtgttaccttagtgaacttttatttggaactgtttaaaatgtggcagttatcgaagcaatctcagattaagaaacatacaagagaagaccaagagtgcgatgtataaagatggcagtggatgacacagtgccgccatgtggacttggaagagttcactgcctgcagtggaggagaaaagtcctgctctttggccaactgcttgccttgcaggaggggcttaactggcagacagaagctatacaatgcagccaagtatatgctcaacactccaattttatgtcatggaatcaatagtggtaaaaaaaatgacctgcatttaagttaggaaaaaagaaaacagtgtgtaaaacaatgtaagttttataaatagtttttggaaaagcaagttcaatgattttaactcaggaaaaataatcttgattagataatttaattattagccatgggtttttaaaggtgagtctatctatatagagccatttaaaattatcctaatagctattgcattgaaacagtataatttgttttattgacttttaatagaagtcatttatttaaaaaattaagtttcaaactaattgaaaaaaataatatatcctatttatcataacctactaatcacatacataaggatattcaattttcttaaagagcaggggaattagaaaaattcacaatccagatttaagagttaaggagttttataaacttcattacttttgaagtgaatcggcctctaatgtggagttatggatcacaagggctcaggaaacagacttgcagggatgtgacaagtctaggcttccggccagcttctatgctgctccatagtgatgaaaagttcagggaacatcttcagatagccttaacactagtctagaaaagtatcatctcagaacacaaactggcttgctgtaggcaggcatatgcataagcttttgctgtctaagcacataaacacatacatgtcttttaagagaaatcaacggtcagtcttctggtagcagcaatgaaatgtattcacaggtaattaaaaacaacaaacactcaagtatgtgtgatggtgtggatgaagtaaattgtaatcttttaaatatttcagcattgttaaaattttagaatataattttgatgacatggctttataaactaaatgtctcataaaatgagtttagcatttctgacatctatatatcaaagtcatcttcacagtatcatacatggacaaattgttgtgcttttattttaatcattacaaaaatgtatcttgtttttatctacaagtaaagaaaagtctgtaatgcctttgccagcagagcatctacttgatgtctgcatctgacaagcactctgcccttcactgacaccctctggtcctgattgctaagtcagcatggccagcaaaccacaactcttacctgctaccttcaaggtagcacaggtttcacaaatgtcaaataaaatgacacttagggatatggatttcaggaagtgagttatatctttcattcttttattgaactaaagtgtgagcttaaatatactttcatgcacaacagatttatcatctttaatgaatatacatgatctaattgtaaaagtaaagtttttctctcttactacccagtaataaatcagtttcaggccccctaatggccaaaataattttacaaatactgagagatgttcaggtatattagccatccgtttaaaatttccacaactctttccagatatttcaccaaaagatttctaatgacactgaaactcctgcctcacagctaaagtctagcatttagtttatcatcataataattttcatttttttaacttgcaagtattctaactttccatttaattgcctatggaaccagagagaagtctaaaaactggtttttcttctgttagagttcagaagatttaggtaacattacggggtataccaaccttgacctccaaatattaagctgtccactaaatactccactggtgatacagcctctttcactaccatgtggcactccagctgagattgctcaaaaagtctttcttctatattacaaatattattttaaattttgactgtgaaatgtttctttctacaattaattagattcaattgacattttacattatctatccactattttaatcctttttaaaatgtattcttatgtagtcacttagtgtgtttatcatctgatcagcataagcatacctgtcaaacttaagacttggggcttgtgcctgtgaagaccttaaaatactttcaacattaaatgagaaattatgcagctcatcactggccactgacactttataagcatgtcttcatgtcttagcctcagtttagtcttggtattaatcaggatgcagtccttgtagcccattgtgacatttagaggtaattctgtaggtctgctgcagctcaatagcaaccaattatatttccaacattttgttagttcaatgcattgtttcatttttatgatactgctatttgaaggtttgctactgtcttcattcttctttgtcattcctaagactcaaaaacagagcagacagctgagttccctaagtgacttctttccaaaacaagtatgtgaagtagtggataaagccttacacagaaaaccctgtgaaagttctccaaacctgccctaagataagcatactcattttcatacacatgctaggtttacataaaactattctcaaatattagtgcattcttattctttttggaacaaaaaaaattaatcaacctaaaaatttttgggttgtcatagaaatcctcagctcattgaatattcacagtcatagatattcaaactagtattctctccctgttttcctgtaaaaataagaatttgggaaatcatattcagcaaatgcatctatgcacagcatgcagggaaaaataactcagcataattcaaggcactgctttttcagttccctaaactttgcagaactctacttggatcttttctgaattttaacaagttatggcaccgttagattaggtctctattcttagattgttcagtttatgagattctcagccatgacctgagaaccccgtcctattttttttccatcctaaacaatgcattgctttagtaaaaatcgttcttatccatcgtggcattcaccatgcctaaattttcttgcttctgtttttgttttcctcttttttttcgggtggccttatgagataaacaacatatacttgcttcaacttttcaatgtaaaatcccagcagagaaaaatactgttttctcatcgtaaaacaagaatcattgggcaatttttacctctggcaacacggcaaggaaggatggctttggagaagcgactgtgtcaaaaaccctaagtggctgggaaccgaagtgcaccatcacagggagcagtcaccagcgaaggaatgccagccacttaccaatgagatcccagctgcctctgtccatttcggggactctcaatcccggtctcccatcctcctgctctgggcgcagctcagatggagcagttccttgggtgctcctcagcctgtggcagaagagaaatcgcagagttctgagtccttcactgggaattctcctcaggcttgccctgcctctcccagcagaggggacccaggtgaggcatcctcttggctgcgagctttaatggcacttggctgccagcacttgcacggggcggaggagttgggagatacaggcaggtgcaggtgggcgcctcctcccgctgctgctcagggctcgcgctgatgctccaatgcgtccacgcgccccgcgccgcgcgccctgactggctgggtccttccacnnnnnnnnnnnnnnnnnnnnnnnnnnnnnnnnnnnnnnnnnnnnnnnnnnncgcccctcccgctccgcgctgtcaccgtcgccaggcgcctagctgcctcgcgctgcaaaggctcatttagcatgtccctgcctgtaaaagactgtatgcctcaagcagggctttggatttctttctttttcacatggtactccacttgcatcactgaccaaccggtacccccgctccctctcctctccaaagtagggaaggctgtttacccgtacctgtccacctctgggtgcttcacattcaccagtgacagtgaatgtgctggctgaaggatgcaccgggactggcagactctgggtcccgtcttccctttgcccgctgctgtccctgctgattgccaggctgtagtgatagctcagacagaggaggctcagacccaggcgcgcacttatgctgtctccagaggagaactggcactcgggagagtgtggttaggttctaactggaaggcaattctcttttgtgtgtacatgtgagttccacctaagggcgatgcacttggggctgtattacttgtccttgataatggtggggtagtggtggtttagagtcacttctggaagagccaaggaaacagtaggtttggcttcttgttttgtattttgttttttgtttgtttgtttgttttttgtctgcaattttctatcacaatgtccatagttgaaaaaatagctcaggtagtaaatccgaggtggcagctttagtgttatttatctgttgatttctggactttccctgtcttttgagtgcttcagcttcatgtgtctggtggtaatcgagtatttatgaaataaattccgtttcatgcattttgcctccaactccatgtggcttgcacctgtatgtgacaaggctggaaaccacacacactctcttctctgccagcctgtctaccctgggaactctgtgtgagccatgggctgcatctgtaccaagaggtacacagtgttcacatgtgtgtgactcctcctgatgatccctgtgttcaggggaatggatgttctgcggaagactttggcccccagtgggctgtgaaaggctgtaattggcaaggcatgtgcagagccagtagctggaagccagataccactggagctctctgctcccctccttacagcttttctggtaattaaaattagtcgttttcctggtccttggctaatctcatatgctgtgcaaacactgaggcttctttgaagggctaccctcaggatctaggttggcttctttgtcacagcaaagacaattttgtgtgtttgtatttaatgcttctctaccctttcgtactttttattttcttgttcctgctttccagtaattaggctattttccttatgtgttaactgagccattgttggagagagtcaagctttctgggcggtttctctgctatgctggccccatgcctacagcaggctgtttaggggtttgaatcaacacagttttacaagctctttaaatatactgtaaggcagagtccgaatctatgagcttcaaagctgttttaaaaattatacaaattgcacaacaaaactttgcttttcaatgcttattataattgaacacacacagctttcatgtgtcagagattgagcctggccccctccccccacagcctgcttcctggagtacacctatggatgatttgttatctttttaaatcattccaccctttatttcatgtattttctttcaactaaccttgatccagaaggatgaaaattgacttctagaaatgtattcactgcagtaaataatgaatgtagctcaataaatcaaggcatgaggtcaagaagtacaagtaaaaatgagaagatttgctgaagccaggaaagagggagatgaggaagtttaatctgtcttgtctcacaaaacatgcctggtttatcattgacattaccagaccccaacgagagaaggatggttggccatcatgtgactcaagttatgagtgagaaaatctgctgtgagccaggctgggtggtgcacctgtaatcccaacactcaaggagcctgaagcccaaggatcatgaatttgggtccaacctgtacaacatagccaggtaattcacaaatccaacaatcaaacaaaaagaatgatatagaaagattaaatctttgcacccttttaacaaaaaagtgagacaaactatcaagtattttaaatgtgacaatgttatatgtgatagtatttttcccttttgaagttgtctgatcatttaaaaatgaaaaatatgtgggagtctgattaattagggatagtaagatctctttctgtctgttcaaactgagactggcagagtctagtaattacttgtgactgacaaagttactcagctacatttcttcagaaccaaagcgtttgtatagactggttattttgtttcttttattacttatagtgtttaaaaatatatattagatatgaataaacatatatttattcatgtatattgcatacatattaatctgtatgacttcatcctcttgtagtgaagcttagaatgtggatatcacggagcttatttttcttggaaagtgaaagttttatacactatatgtactttcttatattctgtcatagcgacagggctggagtataagcaaagataatactggtgcttaaaataagaaaatgtcagcatgcatgaagaaagacaaattaacttatgctttgtgagcacttttcaaatgtgctcacaaatactatcaccgtgatttttttattactgtcatgtggaagtggcatttttaaaaaaaatatagttttgacttaagatatctttttaaaagatatgaaatcatgcacgttttataaaactccagggcttcagagttaataaaatattattaaaacatcaagtctgtctattttatagggtcaatgacattttggatggggcagccccttctctaccttgataaaatattgagcattgaatgaattaaaatcattgtttgggaagggtctttagtatttcactagacaagcttttgaaagccaccttaacagtgcatccatctagctgtcacatagcttttctgatctcattgtctagctgccttttgtgtaaatgtcttaatctttttgtgtcctagtctccagtgggtaagcaacagatgaagtgcataagtagccatgctgttatgtctgagctcttgtcttgtttgtgctatggactgttttctttaaatcacacttccctttctttttctctgcatggcacttactcatgtgaggttctgtgttccagttaattgatcatcatcattttatatactaccaaatagcacttcaaattggcagtaagcagatccatatttgtttagatatgtaggacactggcccaccaactttgcctattgtggctatgttttctatttgcactgtttatgtctacgtggtttttctaatcttctaagtaacattgttagtcaaagtgggacagaaaatacacttaaataaaaacacagttaaggaaatgaggaagttgcattgtctgtttacagcagcatgctcagtaggtgtgaattaaataccaggaaatcaattcaacttttatttgaaatgagaacactttgaggcttttcatttctgtataggtttataaaatcatctgtcctcttactcctatcagagctgattttagaaaacagaatagacaaatcctaataagactttgagaatctgtcaaattaattagcagctgctatagcaatagcagcaaagagggttggctgtgttgtgaatgtccagagatacctttcacaactacaaatagtaagaggtgtggtggttcagcattcagaccagggctctggtagcagagtctcagtattcttgggtcagttttcaatctcaaggtgcctattgatgcattgatgtttgacttttggtggaagcatagttttactctgtatctctgcctggacttgaaattgctatgtagcccagactggcttagattcttatagttctctcaccacagcctcacaaatgctgatattgcaggtgtcctgcattacaggtgaccccaaagtgtacatttaaaggtggctatgttttgctttgtatagaattttttcagtatatcttcacttacaacattttatcaatatcgaaagaaaatatttaggaaccataagaccatgagaaaatagcttccagatagttagtttacaaaccagctttctcaactttgagtaaatatctccaaatgtttcctgttgatcaagttttatgcttggtcctgaagggctgtcacgggggtgtgggtaaatggtctttcccctcacccatggaacggcaagaaagcattctctgactaccttactccatcttttgacttttctcttgcatgaaaataatctgttcagagaaatctattcagtgtcatgcctcttttactcagtagcccttggacgtctcatctgcatccaggctcttgctcttcctgcttcatgacagagattctctttatagaagttatgactttttgtagaattaaagggtgtttgcaaggaaattcaatataaaaagctttttacttttatttgcttcctgacacccttccttcgtccgtctgtccgtccgtccgtctgtctgtctgtctgtctattatttatttatctttcttttttttactggtagaggttcttactgagtagccctggttggcttggaacttgcagtgtaggctgtacttcatccaccagtcttcttgctctctccagtaagcttgtagtagctattgtaaccactagatggcactcgtgttttaattagccatgccatttgcgtttttgccctggggatgttctgatttgattggattcattttaggctactgaatggaaccccaaattaggaaacgatgctacaagaactatatacatgatattacctgcaacattaacaaagcgcactggtgtcaggcgaaatgccagacttctgtagccgctctcgctgctctttcacttcctgaggaatcccacaggagccttgtgagagccaccacgcgccagctattattgcagagaaacacatccgagctgatccccagtgatctagcatgggcacaaacccaagcagatttgagtgttttgacgtggtcaccaaagaaccagccttcctaccactaatataaaacagtgagatcacagagacagaagctgtgtcagaggcaggaagcagatctcagctacacaagtgccaagcaatcccaaaggcacaagaagacttgatggctgaaaagctggtgaggtggcaatctctgtcacttccgtaagtctgctcgagtggcacttctgaagaacccactgctctgtgcctttacaaaaattagctgactttgatgtctagttgtacttaattaatgttggcacaggatctctctttttagccctttctcccttatctccctaatgaatctccggcaacctcatatgaggaaccagtaatgacataggtgttagacctccactggtaacagttttgttcatgatggagcagctccattggctttgcttgctgactggtaaaaacttgctatatgtctatgaaatctgcagatataatttattaacaagagagtacagacacaacacaaatattttgtgcttaagtaacaccttcctcctaaggatctcgagcctacttcatgtggcaacaaaaattaagcaatagcttacagctctctgacacctcttttatacacatctcattatttccccttacgccaactttccagggaagggagaatcacaggcagtaagggctttcatgcagctggtgacaggggttactggtgcaatgaaaataaattacttgtggtgccaaagtacaagagagtgcaattttgttatcaactcttaattgattattaattatcatataggttcacaaagggctagcagtctcctcgtggcaaagaggaggaggctatgttggatagtctcaaggaaagccaaaggctgagcaaggaggcagcctattacctggggtactggcattaaatgatgcttgctaatgaggatgtagagagtgaacccagcagcagagaagagatcaaaccagaaacacattgaaaaacaatctcagatgggtgaaataaaaaaaaaaaaacaatgatccctgcaaagaagctgttgccaattgtctaaaatcccagttaatttactaccacccacagtgagaagcctccaagtgtgggtactttagatgctttacagtggggatcagggcagttgaggagagactcttattgcattaatgaatactgtttgctttgtcagagcttggaagcaaaggccacaagacattaaaccatagctttgtattactaggataagtgggaaaataataaaaaatcaaaataatccaatttccaaattaaggagagaatcaataaaaaggatgtagtctgtatagtcaatctccagtccaggaaccaccatttttatctgggtctggtatgccttctatgaatcgtttttgtctgctctccttggcaaagtacatgctacacagtccatgacaaccttctatggtgagcaggctaaaattccctctcatatctccagcccaacacagagccataaacttttctccacggcttactttttcattagcttgcttctcatgtgaactgaattaaaattttacccacacaacttcttaagagattgactggcataaatactatttttatcacctgttgatttaaattgtgttagcccaactaatgagtttgtcattgatctggtattgaggaaacaaaagcatgggggggcatgtttaatatgcaagaaagtgcatgtggtctgataagagaagatatagattctggtccctctgcaggctattcataatgaactcagttcttgatgattgagtatagggagttcattgtcatttcaagacaccccaagaccaagttctcagcacaaaggagatttatttgctccagggaaaagtgaagtgaataagagacaaggaaaggagatagaggatgagggagaacaagaaggaaggaaataatgaagagggtacagatgtatgtgtccctaggttgtgggggggcgggcaaaggacttcctcaggatacacaggagacagacatgacccacaggcaaatggaagtttataaaggtaaaaggggagactccatgctaggatgaggtatttagttttgattgggcatgttaactaggacagccaagggagcttttgattgctggtctttaatattttgatagctggaccatagtagtcagcctcaggagaagggtttggataaataagggaatagactgggtggttaactttaggaatgtaatctaatagttttggcaaggcagaggggatgggggacaagggcaaggccttccaagagtcatgtttgccatgcttggtctgcatagagtcccttcattgaggacaaagcaaataacactatgacatttctcttccactagtgtctaaatgacagtttgcattttgttgtgtgtatttaagatacacaatgcagtgtgtgtcatatgtgtatacctttatttcaataaaaattaaccaaccacatcaacttaatatgttccacagtttcaaagtacatgtgtgtgtacagggtgtgcagggtgcggagtggtaaatatacatgaaactttataacaaatttccgctgtgcaataaaatatcaacaagtacacttttcacagtgtgcactgggtgctcatttgtttacttttcctagttggtgtgagacttcctgagacccttatctgttcccaccacatcagcctccagtctgcacctggcaaaccgtggtgcatcctggctataactcacacacatgacatcatgctggatatttgctcctgtgtgacttatttcatttagtagtattcttttccttctatcataaatgcaatgtaagacttgctagaccaagaaaaatgaaatttcccaaactatcatttacattgggagattttattaacataaaatgttctctaaaattagcaaactacaaaattgggatgtagaggggctgattgctgagttgtatgtgatggaatgtctgttgcttcagtgtgctgtctggggactttgcaacaatattactcatagctctaacattcaattttaaaattcttattattaggtattaatataatcatatattgacattgtttaataccttttttgaaaatattttagatttacttattttatttaatgtgaaaaaatgttttgctttagcatatacgtgtgtgtgtgtgtgtgtgtgtgtgtgtgtgtgtatccacagaggtcagaaggcagtatcatattctttcgaactaaagttaaagatgattgtgagtcaccatgtgggtggtaaaaactgaagccagattctctgcaagagcaataaatgctcttaatagccaagccatatctctagtccctagtttctgcctcttttcaagaaacattttgttattaaatttttgatgcaccattttcatttactctttttaaaaaacttttattgattctttgtggatttcacatcatgtattccgatcctattcatctccctgtccctatcatcctctgcccttgcaaccttgccccacaaaataaaataaaatttgaaaaaaaaccagtaaaacccaaacaaaacaaaaacaaggcaaaaaatgtcagtgtgcaggctgtagtgtcacactgtataagatttagtccacagatctttatttgtaagtgttcattgacatgagacattggtctggttcaaggactcaggtttctgctacacccttggcactgggccctcactgggactcctcttggaaatccttttgttgctttgtatggaggatctttcagctttggatctgcagttccagccccttcccatgctccagaagttcatagatgaggtgaatgttggcctgggctgccccatagtcctgattctgggcctgggtggtagctctgttggtcagctggccagctttctctcatacttactaccagggcaagctttcaagcgtggccctggttaactcaagtaacttacagtccaggaagtagagcgatgtcagaaatgtgcttacagagacatttacaaggtcctctggggaaacataaggaactttgattccccaaaagaaagtgaagtcttccacaggcagagaattaatacaactgatatttgaatgtaactgagatgtatagatatatatttatatcaatgcctgaaaaccttcccccacctgctagaagcatagtgggtgttttaaattcacaattcaggaaatttaacattactaaatatggttagatgctgaaggccctgaaaagtgtagagcaggatattacaatgaagaaagtaaaatttaaaatacattagtggttatcagaggctgaatgggttggggagtggtatatgccagattagataattggagtcactgcaactataaccaggaggtgatgcatcaatgggttaatagctctgagagagaaagatcagttgcagtgctaaaattactcagaaatatgcaataaactaaaaatgcactgttaaaatgtatggcaaaggcctttagaatgagggcacaagagatctggggtagcaagagactatgagaaagtggaaaagaagcttgctatactgtgtttctttccattcttgacaacagaaattacagcatagcaaatgagagacaagaaatggtctcagtctaccaaatcctgatatttgttagtgcatttagccaagcaaaatgctgttcttcttccactgtgagggtagaactgttgcccttcccgtacttcgagggaagaaccactgcctttcctccactgtgagggtagagccactacctttcccctactgtgagagtagaacctgtacccttcccacactgggagggcagacccactgcccttgtgcttctgggatgcccttcccctactggaagggcagaactgctgccttcctctactgggatgggtaaaacatggggagaaccctacttgttgaatcccatgggtttaattgaggcagcgactgtactttgaacagttttgtaagtagttcagctttaaacactgtgacactgtttaaactgtgaaccccttgaggaaaccacactgaataatcttgaatatccctgatacaagtgctgagatgttttgacggtaaccaaatagagttggtgtaaggaatatgtcagttcttctcttcagaaaaatgctgtgggaagaagtcagagctgtagatgagggctttgagaagcaagactccattatcaatatagggaaatgagaactgagaacactggagacaaatggtaatatctccaaggtagagatagaggcacttggcagaatgccaaggaaatcagagcataagggacttttccaaaggcaggcagctgtagatatgacaaaaaaagaagaaagaaagaggagagagagagagagagagagagagagagagagagagagagagagagagagaaggctaagtgaaaatggagtttggacaaagtagaaaagacagctttgaaaaatgttaccaaagcaatgaaagttattcaagagaaatcaccaaaaggttgaggtattgtagtaatgaaaatcaactcttaaagaaatttgcagaaaagttctgaagcacgatcctaattagtcttgtggtcagcagatgatgcttgatactaactactcttaataattaaaaactcagagtcagatatcagggtaaatgctgaaagatcagagaagtaaagtaccagccagacacagtcacatcttacctctcctactcttcagaccaaaaagaggcaagctactgcctatacccagccttaccacttgctctctctgtgcagccatttcacttcctgtttcctgtctgtgcagatctccagacagacctcgataagtaaccagtggctagttccaccctctgatgttcatgtaagctttatttgtcagaacacaaacaaaatatcacaacaaagttgaaatttgatcttcttcatttggtcaatcctaatctgggttgcataggactaacttttgggggactgtggtggtttttgctttctttcctgaaggactatttttcaaatcaatcatcttattctcccctgtattagttgttagtttgagaatagctcttggaaattacagctagttcttaatccctatataaaataaatatgtatagagtagaagcctctattttcatatataatgtatgaaaataattattcacaaaattcacaaaaatttaaagaatgattaatcctacttttgctttgttgttttgttttgttgtttggcttggtttgagacacagtctcctcatctagcccacactggcatctcacttatgatcctcctgcaccagattttaaagcacatcatcttctctggttaagagtgttttattcttaaaacaaaaccaatttgtctcacagaaagaggacttactcagtgttgtatgaagttatagaaacttactttccagtttctaactgaaaggatctggagagcttgaacatttcaaataaaaatgaaatatacatttttaagtttttaaatttatcccaattagacttaattctttgacatgctacctgcttaaatttactaatgccttcatttcattcgtaaaatcataaataattttatgtaaaatagtgtgacatggttgtctataagctattataaattttatggtctttatcactaattactatgcctataataatgaaatttaaaagtttaaattattgttgatataaacaggacaatctatgtaatatctcataggaaattaaagtaagaattatctcctcatactttatttagaaaaagtttcctaaattctgaggtaataaaatataagaaaaatatatcaaatggttattctgggacttgtaaaaaatcaaattaacatgatttgaataatttcagcaaatcaaacaatgtatgtttgaaggagacagattatactggctcaaaccatgaatgatgctctttattaggctctatttaaatagaaagttaagaaataattcttaaatattatactataaacttgttttcgcaattgaaatttcttttgaattggccatccattcatctggatctatttatatattatataaatacacacacacacatacataatacatacatacatacatatttcttggagtttttgaaaatgaaatgttgaactggtctcctaaaatattttatgtatatgtggaacagtgatcagaatacatatttttgttttggcctgtgcttgtagacatgaattttaattagctcaacagcagctgatgataagattgtttgcatgtacaagagtgtggctgatagaagcagccctaaaggcaattaagtagaattaagcatgtttttttttaactgagaaacagaatcctcagtgtgaactatttattccaatccaatcatggcagacatcagtcatcactcatagcaagataaaacagaaagttctaaatagacatacccatttgatttcaggttggcagagtagactatcagtgtttctggtaacttgtgtacaaatactaggaccacttcatagttcaagatagagtctgactgagttgcttaggtaagactagaatgtacatgcaatacagacaaatcttgaattttggatcctctttgcttggcttctaagcagctaagaatatgcttttactagactaggatatgattatctttttaatggaaaatttaatccacttacattcaagatgacaattactcctgggaagctgttaatactgtcatcatgtagtatactttctggatttttatgtttctttttccatatctaaattatgtttaagtgatttattctagtactatgttttgatgttttggttattatatttttatctattataggttttgatcagtgattgtctcaaaggttggaaatcacctcttgattatagcaagctatcaaaaatgaaaacaacttaactacaagcataaaatcactagaacaagagactatactactaataatctaaatttgcatctaattttcactgatagtttgaatcataaagacacattttacatatttttaaatttcgtaccaattaatatattgaggaagcatcattttggaaaaatattttgattttcagtatttgctgaaaagatagaagttgtctacatgctatactttcaatagacatgaattaaactgaatctgtcagtttaattattattaaaacagaaacataagaaggtataaaattatattccaaagataattaaactaaaagattcagtatgtctacagaacattacttagcatctctccttgaacatgaatggcagaggtacaccagacattgtatttacttatgacttatctctccttcacttctcaaagatagtctttaatcttagtttcctagtttgataggcttgtttcccatgctatgctggtcttctaataaacatttcactttcagcctttggaatctttggttgcaggtgattttggcctgccaggtccctctgccctgcttcccaaaatatacccacacgtgctacaataattattaaactcttggccaatggctaccacttcttattggctagctctgtcttaattattaacccatttctaatcattcttctcttaattattcaccttcagaaaaatgatgtagtcttggatagatttgactgagtgaaatttgcatcccttgtaacaggaaatcttctgtttctttgaatgagcattctatccccaaagtttaaatgggctttcattattcacctcctttcccttcccactgtattttttgaatagtaacctgagcccacagatacaaaaatgggcccaaaactgagctattctctttgacatttcctaggagacaagagaaaatatacagtaatcacagaccatagaaattactcttccaaagtctaacttggccaaccaatgagttcactggtattatgtacagaagcatgggtgaggggtttcttacagaagcctgagtggataaaggcagctacatcaccaatgtgtccacttttccttgtgagaccatgaaggaaagatgcctcccaggagctcatttcacaactagcttcaaggttaggaagtttctttcagtcttggagagtctcctctcccatacattgatttttgaacattgtatgtggtggaactgacatgtgaaacctctaaatttcagttttatgaaatgtctaatttgtgtttacttcctgtctgttcagggactcctttctccctccaagagggaatgtttgagttaaagaaaacttactcttctaacagttaacaagatcatcatctatatagcatgcctcctgctgagatggccctaaacagctgcagccatcctggtgatgtcagttaataaatatgatagatgagggctgcagaaagttccctagcactgccattatccaagttaacatcagggagacccagagagcttggttttagggtcggccaggttcattagcctggcacaaagttccagaacagttttgtggttacagtcattcctgcctcccatgtaccaatatgctttctgattggagcactcttagtgacctcagcctatcctcacaaggctgatactgatctgggtcaaaactaaattgtatggcctcaaagacttaaggaaccttagagatacacagcatatggtattgacagatcaaatcagtagtatgccatgacagggaacatgtaacttattctgtaccaatttattcattcatgtatatctgcatttctccatgttctctaaatggtttccccttaatcctccacattattcaactcaacataaagtttccatgattccagtcatatttgagtgtatctttgtagggagccgttcctacatatcttttttttttttttttttttttttttttttttttttttttttttttaaaatcggggttttttttgggggtggtgtgtgtagctatgaagcctatcctgccagtcgctctggagaccaggctggcctggaactcacagagatccacctgcgtctgcctactgagtgctgggccatcaaagcccagcttgagtgtatatttaaattagaatgtgtatgcaacaatatggcatgtttggaacttgtacatattccagattataatatataggaagattgagagtattttggatcggtagatgcagggaggttggtccaaagaaaggaaaaacaagggctctaggaggcaatttaaagtgtcacacactatgtatgatataaaaattaagatgcctgttgtcttagggatactattattgagatgaaataccatgaccaaaagcaacttgtgaaagaaagggttcatttggcttacatatcctgagtcaccatccatagaaggtattcaagccaaaccggcacctggaggcagatgctgatgtagggccatggaggagtgctgcttactgaattgcttctgatgacttgctcagcctgttttcctatagaacacaggaccgccagcccagggatggtgccagccaagggatggcaccaaccacagtgggctggtccttccccaatcaatcactaattaagaaaatgccctacaggcttgccacagccagatcttatgaagcattttctcagttgaggttctctcctctcagataactcaaacttgtgccaagtagaccacaccaggtaatacctttccataaatggagctgtatgaaggaatatagtttgtctctctagaggtaaggattggaaagaagtaaacttatctcacatagaaacttctctctgtgtactatgtctaaagtcactacagcatttcaaaaatttctactatattgtattatttatactaaatattcagatttttcaaggtattgatccaataacacaagattttctcttatgtatacttttaatttctttttattgaaaataagttttttgcatataatatcttctgattatgatttttccctcccactattcctcctagttcctcttcacctcccttctcatctggattcttagcttttctgtttcttgttagaaaacaagcaggcatctatgcaataacaataaagtaaatcaaaataaataaaaaacaaacaaattagaatgtgacaaaacaaccaaataagaaaaacagccccaaaaccacgataaaagtatatagacgcaaagacacataggctcacacacaccggaatcatataaaaaccccaaattggatgtcataaaatatgcatgcaaaggacctataatataggtaataatgccctaactttccagtgtgagacaaagaagtttcaatgataccattatgttcattttgttttggccatctactgctagacaagaggcttatccttaatttttaaatatatttcactagtccctatagccaaacaattcaaattcatgcttcttcaagcaatggtgaataattacaaatgaagcagtatctgtagatttactataaatttctttaacagtctttccttaatgtcctttatacacaagtcaggtctctacatgaattaacactcaaataagtaaagatattaaatattttaaagatgttagcatttcaggaaaatagaagaaatgcaaagtatagcaggatcattattctttaaagatcagattgagtttctcaattccttcaaactatccaagaattattaaaagattattatacagacaagtcttcaataaatattagctgcttgccctactgaaagtgaacattatttctgttactggtaactagccactgtagcataaaatgataacatattgttctggtctattgaaagtcagatttatcttttacaagaatgtcgtgatttgtctaagctaactatggcaactacaggcctcctcctcttgcaactgtctttagaaatagcatacagcctgttatggtagacaacacacatcttaacattgcctcagagatttcataggagattctcctacctgatgaagtgtatagattcattttatctgctcacactgctcagcaaaggtgtgttcagtagctacatcatttctggcctttctgtgagtgcatatttgccagcatagaaaatgggaaactgggtgaagcaaatggttcagcatcatccagtccatcgaggctctagataagcaaagaacaaggagggacaattttgttatctatgtgacctaagacatccatgttctcttggccttaggcacaacagttcacagctctcaggcattcagactcagacagtggctcactccatatttctatcccatggtaactgttcctcattctttcttagggccaaaggattcccagtttcagcttgtagtaagcagtcacaagatttctgcctctgttataccatgaggcaatgtccatagttaattccttttgtttgtagtgatatttagataccctgctggttcttttttgtagagaaactacacatgtaggcaggttaatcacaggagctagccttttgtttcccccaatccctgaacacatttagtgacctgtgacttctgtaaatgtacagtcatctcacaaatatgcaacatcagcaacaagctacactgacctgatcaagagggtaaaatgtttaatgtaatgaagaagaaaagtggaaacatcaaaacaaaacaaaacaaaaactaccagtttgcctccccagaggtgttcagtcatcttcacacatacagtctgatacatcaccaaaatattatacttaaacagaatgctcatggaacataaagcatatgaatattttttgcagatgttttttatttgaattagaaacaaggttattttacatgacaatcccagttccctccccctcctcccctaccaaccccccccaactagaaccctacttatcacatatcatttctgctccccggggagggtgaggcctttcatagggggtcatcagtgtctatcatatcctttgggatagggcctaggcccacccccatgtttcttggctcagggactatccctctatttggaaagggctcccaaagtccacaccaatgctaaggataagtactgaactactacaggaggtcccgtagattttcgaggtgtcctctctgaaacccacgttcctgggatctggatcagtcccatgctggtatcccagctatcagtttggggaccaagagctcccccttgttcaggtcagctgtttctgtgggtttcaccagcctggtctggacccctttgctcatcactcacccttctctgcagctgggttcgagttcagttcagtgattagttgtgaatgtctgcttctacttccaccagctgctgaatgaaggctataggattgcatataagtcactcatcaatctcattatcaggggagaccatttaatgtagcctctcctctgttgctggtgtcatctttgcagatctccagacatttccctaattcttgatttctctgcgaacctaaaatgtctccctctattatggtatctcctttcttgttttcttctatccttcccccaactcaacctttctactccctcatgtcctccttacccctcctcttctccccttctcattctcctagctccctccccctcctcctgtgctaccaaaagcatatgaatattaagtatagaaaacaactatggagaatcttataattaatcaaagcaaagggtccaattattatgtgatttctttcattttgaggtctatatagaagggaattcattcattttataaggtttataactaaaacctgatgactcatatatctaaattaaaaatttttaaattaacataggatataatagtcttcattcaaaaatatattaaatccaatcatttggaaattggcagttgaatcattaaatttctactaattactcaactagtttattatatactggtgcaaaaaatcctttaggccataagtcattaattaaaaatttttaaattagtaacaaagctctaattaaattatttatttttggaaaacaagattatgattaaaaactgcctcaaggattcgtcattactcctgttacacattaatgtaatttcataattagtaataaagtacttataattatatgaaggctttaagttcagaaaaatcacattgctttcatgctaacaattattttctcatatttataatgagtattattcacagtaaaaaccactgtgagggtgattttccttctactagatgttttctaaccagctctctgagcctctgcctggatcctgtaccaaacacaatggatccattatcaattgttgtgcttgcctgaattcccagcaatcctaggccactctgggccatcttgagagcagcgtgcatttcacagatggtgaatctcacagagccttcctctccttagcatattccatgtggtggcacaaagtttaatcccagcatggtaaggccagcatagaggagtaatacagtcagaaaacagcttatgtacacctacaaccacacccacaagccctcacacactcaggagaggtggggggagggaagcagggagggagggagggagagagagagaggacagacagacagacaggcagacagagacagggaagtactcaagttgcttttcattgacctattacacataaaacataattcagaggcagaaaagttttcgctgccacttttctccttaatcctcctctgcattcagcgctataactatcatccaacaatgaactaaagatgtccctaagtgtatgtctattaaagcaggttttctaatccaaaattttattaaacttgacataaccacatttttggtttcagggtacctggtgtgaaatagcatctaattgtagagaaatctgcattcctttgctggaaatgtatccttctgaatatttttatagcttttagacataaattattagttttaatttgtatatatactttcatcaggatatttattcatattatttgacaaatttatctctttattaacataatttgttatagaaaattccctttactgttaatatttaagttttttcaatgttgataattgtatgtttatatgcttgacagtatatactctgatggtatcatttacaactgttatttttgtttaattttagtttttttctttcaaaggtaacttttcctcccagaattattattttgttacataaggtatgagcattgctagcctatgattttagtatattctctctctctctctctctctctctctctctctctgtgtgtgtgtgtgtgtgtgtgtgtgtgtgtgtgtggtttnnnnnnnnnnnnnnnnnnnnnnnnnnnnnctttggaggctttggagcctatcctggcactcactctggagaccaggctggcctcgaactcacagatatctgcctgcttctgccgcccaagtgctgggattaaaggcgtgtgccaccaacacccagccaagtatattctcttttttacatttctaattttcacattattttacattccttcctcatactatttctgttgtaaacaaaatttgcacaaaattttgggacaatttctccaaaaagcattactatctactttttttccattgtagcagttataaattgtattgtttctttatattcaactgttcttatgtttgtatctccttatttttctctctagaacactgatgatatctgcctggaaatttgtatgtgacttgaagatagatgttttcattttttcctttggtaacctagttttaatttatttcttttgcttgccttattgcactgactgaaatttcgcacaatattctagcaacagtcatgagagtagacagcattccttttcttactggtcaaaggagaaaagactcattacttacctttcaatataaacccagccagagttgctctgtaagtggcatcatgggcttaagaatgttttaatgtattcctgtattatctgatagcagctttagacagatgatgaattctaaatattgttctttattgttaagttatatcatgtatttttcttcagtatgttagtgtgatggagcacacacattgatttttgaatattgcattatattctgtacctaaaatatatactaattattagttttatgaaattctctcttttgccttatatttacatgtatataaaccagagtctcatgcatccatgactagataacaatgacacagaacttcagaactttctttccccatatcccaagtagtggtataataggcctgtaccaccatgaataaatcatatggggttgatagttgaacacagggctttatgtgttatatagtcaagaagtctaaccaatgggctccaaaccaaaagatatttcataccgtttagaagaatttttacccatatttgtaagagatcctcttatgtctgtattggtaacatataacatcacagtaaaatttgatgttatcataaatttcgtattttgaaattatttctgaattcttttttttctttctccagattttttatttgaattagaaacaagattgttttacatgacaatcctagttcccttctccctctggtcctcccctaccacctgttcccaactaaaaccctacctatcacatatccattctgctacccagggagggtgacgccttccataggggtcatcagtgtctatcatatcctttgagatagggcctaggcccacccccatgtgtcttggctcagggagtattcctctatctattcctctaatgggctcccaaagtccacacctatgctagggataagtactgaacaactacaggaggtcctgtagatttccaaggtttcctcactgaaatccatccatgtccctggggtctggatcagtcccatgctgttatcccagctatcagtctggggagcaagagttccccgatgttcaggtcagctgtttatgtaggtttcaccagcctggtctggaccccttggctcttcacttgtctgcatctggattctagttcagtttgatgattatttttgtgtgtctgcttctaattccaccagctgctggatgggggctaccaggtggcatataagtcagtcaacaatctcattatcaggagagggcatttgaggtagcctctcctctgttgcttagattgttagctggtgtcacctttgtgtatctccagatattcccctagtgcctgaattctctgtaaatctaaaatgtctccctctattatgatatctccattcttgttatcgtgtattcttcccctgactgaaactttctgctccctcatgtcctctgcatccctcttcttctccccttctcattctcctaactccctccccccttttcatgtgctctcaatcagcagatattgaacctctccccttctccaggggatcatgtatgtctctcttagggacctccttgtttattagcttctctggtattgtggattgtaggctggtaatcctttactctatgtctaaaatctgcatatgagtgagtacataccatgtttgtctttttgtgattgggttaccttgctcagaatggtttcttctagttccatccattttcctgcaaatttcaagattccattgttttttgttttttgttttttgttttttttcttttttctgctgagtagtactccattgtgtaaatgcaccatctattctctatccattcttcggttgaggtgcatctaggctgattacagtttctggctgttacaaatagtgcttcagtgaacatcgttgaacagatgtgcttgtttcttgaatgtgcttcatttgggtatatgcctaagagtagaattgctggatcttatgtagattcatttccattttcatgaggagttgccatactgatttccacagtggttgtacaagttggcactcccaccagcagtggaaaaatgttcccctttctccacatcctctccagcataaactgtcatggtgtttttgattttggccattctgacaggagtaagatggtatctaagagttgttttgatttgcatttccctgatggctaaggatgttgaaagctttcttatgtgtttttcagccattttagattcctctattgagaactgtctatttaattctgtacctcacttttaattggattgtttggtgttttggagactaccttcttgagttctttgtatattttggagatcagccctctgtcagattgtctatacattctgcctggccaatcagccaatcagggttttattcatcaaccaattagaaacatatatatagaaagacatctcccttggtgtgtgtgtgtgtgtgtgtgtgtgtacattcatatatttattgatttgcgctgatagttgattagtgaaagtttggattttgtcattgtttatgattggtgtgcatgttagtgcttcatagaaaatacatttttacatttttgctcaatattctttgcttgctcagtccgatccattttgacttaagttatgtacatggtgataggcttgggtctatctcgagtcttctaaatgtctgcatccagttttgccagcaccttttgttgaagatattctctttgttccatcgtataaatttgcattgtttgtcaaaaatcaggtgttcataggtatgtggtttaatatcagggttttcaactctattccattggtctacctgtctatttttgtgtcaataccaagctgttttcaggactatagctctgtaatagagcttgaagtcagggatgatgatgcctccagaagttcctttattgtacagggctattttggctatcctgggtcttttgtttctccatagagagttgagaattgttttttcaatgtctgtggacaattgtgttgggattttgacagggattgcattgaatctgtagattgcttttggtgctttctattctcaaggtttgtggagttcatgtctaaatttagagtgaagaagagctaacactgtttcctgccggattagtgaagcatataattcttgctatgccatactgtgtcattcattgtttcaattgcaacaaagcattccttttcataatagggacttaaggatatgttcttttcttctgacccttttattatgaatttaaagacctatctcaatgccagtgtacttggaatgaacctttgaggcgttggtgatgcatgcctttaatcccagcacttgggaggcagaggcaggcagatatctgtgagtttgagtccagcctggattccagagtgagtgcccggataggctccaaagctacacagagaaatcctgtctcacccccccccaaaaaaaagagaatgaatatttgaaacacagtaggttctcaaactttggaacgaaaattttgtaaaatatttttaagttattaataaaaataagtcacatatttttccttatgagtaaggattgtgtgtaatcattaacattatcttgtggtgcacagcattggaataatctgcaatgaaaatcagaagtgaggagggctactgacattgtagtcacagtaatcagagggccactaaaagacaatgtgtaaacaaaaattctgagaacattaaaatgtatccccatgtagtttttggaaaaaataatgaaatttcagaagataatattctgaaatataattgtagagtccaagagagcaacactctaaattggtgttggaaaatattgtttccattaaccatacattttcctaacatgggtataatcacttttgcttggttaagtttcacatcatgactgcatagtttaaaactgtttctcttagttataccattactacctaaatatacaagtagtaactaagtaaatagcaatcacattacacaatagtagaattttcttcattttattactttttatttcttttcataattattttcctgatatttaaacatataactttgtgtataaacatacacaaatatagaaagtatttgctcatttaaataacaccagattcaaatttttctcaaagaaactctcaaagattaattgctgcatttgtttatcattccacaactaaacatttgcattgctataaattttgttgggtaacctttcctaaaatttcccagaatgttccctttcttagtcacttaattttaaataaaaaataactgaagaaacaacatgatataggtgaaaaggagagaatacctcagcatggaggatggtgtttgcaaataggaggtcatttatgaatgtaaatggtagatgatatttgtgcatatgtgtgtgtaacaaggttctttctgccatctgttcccaaggccacttcagccccagtgaacacacagactatattatttttaaaacatgttaactaatgactaggacttattattggctacctctgtcttaattactaacccatttctattaatctaagtatttccatgtggtcatatcttactggagaagggtctagatctgctacttctttggtggcctacattgcaattccatctgcctatgttttctggaattctcctcatctcctagccctgtctatacattctgcctggccaatcagccaatcagggttttattcatcaaccaattagaaacatatatatagaaagacatctcccttggtgtgtgtgtgtgtgtgtgtgtgtgtacattcatatatttattgatttgcgctgatagttgattagtgaaagtttggattttgtcattgtttatgattggtgtgcatgttagtgcttcatagaaaatacatttttacatttttgctcaatattctttgcttgctcagtcatgtttacatgataattttaagaaaatgtggaggtgtgtgttgggtgaggtagttcacatagctgacgcatgaagcatagatacatgttctattatacttaatgattgtcttagtgttttattgctgtgaaaagacatgatcaaagcaactattacaaatgaaaacatttaattagagtggctcacttacagtttcagaggtatagtccattatcatcatgtggggggcatggaggcatacaagcagaggtggtgcttgagtaatggttgagattcctgtatcttataggcaacaggaagttgaccgaaatactgagtgtatcctgagcataggaaacctcaaagaccaccctcacagtgacacacttcctcctgcaaggtcatacattctacaacaaatccacaaattgtagtagtgtcactctttatgagattatggcgggggaagcaaattacatgtaaacttagtagtacattccactccctggccccataagcttgtaataataccaaaatgcaaaatgcaattagtccaacttcaaaagtctctatagtcatcatctcagcaatgtgaaaagttcaaagtctcttctgagattcatgcaatctcttaactgtaataccttttaaaataaaaatttaaaaaagcacatgtttacaacatataatggcacagtatatatagtaccgttataaaacatagataaggaagcatagtgaggaaatactggtccaaagaaaacctgaaaaccagctgggcaaactccaaactctgtatctccatgtctgatttcaaatcattcttcagatctccaactccctttagctttgttgactgcaacttgttatgaaaagcaagttatttttaactttgtgaagctgtgttatatttgtttgattaaataaaattaacccgaggccagaaggttgagtaagcaactagccaacagaaaatagcagggaggaactaagtggagctagcatattttagcaggcttttacctcagcctttgaatcgttacttctatagaaatttaaatgaagtttcctttagcagtcataatagaggagaaagagtgcctgctggaacagaattccctcctagctgcagccattgcagcatatcactgctggaagctgctgagttacattgcaggttgggaaaacaattgcttaaggtgcagccactgtattgaaagcataaaacagcaaaatacttctctctcttggactagttcttcttcctgttagcagctctcctcaacaggtatcccatgactctggcatccctaacatcttgggatctgcctatgtttttgttggtgtagttatcttcattggtttggagttttccttccaggactttcagtagggatggattagtggatatgtattttttcaatctggttttgtcatggaatatcttgttttctccatctatggtgactgaaatttttgctaggtatagtagtctgggctggcatctatggtctcttagtgttggtattatatctatccaggactttctggctttcagagtctccatggagaagtcaggtttaattctgataggtttgcctttatatattacttggcctttttcctttgctgtttttaatattctttctttattttgtatgtttggtgattaggttattatatggcaaggggacttttattttggtccactctatttggtgtttggttaacttcttgtactttcattggcatgtctttctttaggttggaaaagttttcttccatgattttgttgaatatgttttctgcaactttgacgttagtttcttcagatttttctatatgtattagtcttaggtttggtcttttcatggtgtctcatatttcctgaatatttttgttagggatttgttggaattaagattttctttggtcaatgaatctatttctcctggtgtatcttcaatgcctgagattccctctttcatctcttgtattctattggttttgcaagcatccttagctcctgatcatttatccagctttttcatttccttcattccctcagtttgtgttttctttattgtttctattacagttttcaggtcttgaactgtttgaattgttaatgtgtttgattattttctttctccttttttggctttctttaagagatttgttgatttcttgtatttttggtttgttttctcttccatttatttaagggattttctcatatcctctttgaggccctctatcattttcaagaagttgtttttaagatcattcttttctgcttcatctgcttggcatattaagttcttgctggtggagaatccctagactctgctggtgttatattggtttttctgttgttgaatattttttatattgtcttcttccaatccattcttccagtggatgcagttggagtctctacactgcaggtgggtatgggtccaaggttctcttccagtaggtgcaatcatgtccaatactctgatggctttctgcttcctgtgggtagaggaaggactagtcccaggaagttggcagatcctggatgggctcttctacggggacacattcagtgtgatcaggccccaatcctcaggatgctctgagcagggtaccagtagtcaggccagaaacagggacaggctttcctcctctgtgtgtggaggtgtgtctaggatgctggcagtctctggatgggctggcacacagggctgtgtttcccagtgcacagtccccaggcctcaggactgggtaccataagttgggctggaaataggctgaaccttacctcctcctgtgggtggaggtgggactggcatgctgacaggctctggatggggtaatccactggaataggttcccattttcttctttttttaaattgatttgtttaatttagaaacaatattattttacattccaagcccagttccctcttcttcccttcttctcattcaccccatatctctccaccccaccccatatccactcccctgggagggtgatgccttctatggggaatcatcagtctgtcacataatttgtgggaaggcctaagccatcctccatgcatctggggtgagaaagtatccctccatgggaaatgggctcacaaagtccattagtgtgctagggataaatacttgtttcaatgtcagagatcccatagacttctcaggcctcctaactggtacctacattcagggggcttggttcagtctaataatagttccccagttttatggctacagtctgtgggttctcacttggtcaggtccgctgttaatttgtgtttttccaacacagtccttttttattttagaggcactcatatttacatatccatccatccatccttccatgctctccccaaccccccaatctatccttctcctttccagggatagtgaggccctacatgggggaccatcaatgtctatcatatcatttggggcaaagcctaggccctccttgatacatctgggcagcaatagtatccctctatatggaattggctcccaaagtctgtttgtgctctagggacaaacactggctcttctgttagaggtcccatagactgtctcagcctcctagctggcacccacattaggagggattggttcagtccaatgctggttccccacctttatgattagagtgtctgtgttctcactaggtcagaaatccactgtttctgtgggtttctccagcaaagtcttgacccatttgctcatgcctcctccctgtctgcaactggattcctggagtttggctcaatgcttaggtgtgtatgtctgcttatgtttcgatctgctactggatgaaggttctaggatggcatataaggtagtcatcaatctcattataggggaaggacatttaaggtagccccctcccactattgcttagattcttatttggggtcatcgttgtagatctctagctattttccttgtgccagatttgtttttaaacctataatcactccctctaataaggtatctcttttcttactctcctctattcttcctctgactcagtcttcctggtccctcatgtctccccacatgtctttttactccccttgtctttttactccctccccctccatttggattgtgttgttctgcttccttccccattgttctgcttccttcctcattaaagccatgttctctctcactgattttgtcactactgcctttgcagagaaatgatttctcattgatatacctccattaataaaatgttgggagaggattttattaaggtttgtaagaaagacaattcatatctcccattgaaatttggaatagatattgcatgtgaaggtaattcctctgcttcatttgtctactttttatctgaatgttatattttcaaggaattttttattttcccaaccatgaaagatggttatttactgaatatctttttaaaaagaagttttaagtaagaataacttcaatttctttaaagatatcagtgatatatttcactgtagaacatattagtttttctttaaacatgatagtggcatattaagtttatgtctttcaaaatagaaaagacaaactagattcttcccatactgaagtgaatctttcacttttcaccatacaatgtagatatgtagtatatgatatttttattcttctctcatacaacacatcatcactacagctataatgaaatgtactactatcatttaaaaacacctgaaaaattctcaaagacccccttctacttaagtcagtaagttgtgcccaagcattattaatagttaatatttttcagcaaacatattacataatttagataatgaacacctaatacctcatagctttgttttgttaaaaataaagtgaaaaactaccagggagagataagggaaagaaaaatggataatagaccagatataaaatcagaggattaaaatttggtggagaaaaggaccatgaagagtagtgatgtgatagagtttgtgatgttgaatgaaagacaaaaccggatatggtttaattatttatggatagtaaattatgtaattatagcacttactttataaggtcacttgagaaaatagtgaaagtattttctaaagtactgtgaacagataaatactcatctgcattcaataggatgaagcaggtaggactgcttcaaattcagtcagagtgaataaagcatagtagattcattgatgcacagtcatgcttgtgtagcagatcctggctgttattccagggtcttcacaatcataagaataggttggcacctccaggaacaatggagagagatactcacacttcagcaatggctgattctttacttacataagcatagaaacagaaaacagtgtagtgattggcagatttttctagaagctgtgagagaggttctttgcttagcataatgtctcttctctgttcttgaaagacaaattcatcaaacaacccaacaagcaactaattatctaaccaaccaagtagctaaccaacaaaccaactcctcaccaaacagacctactaactaactaagcaatgaaataaacaaacaacaaacaaacgttcataataggatttgagtttactatcacagaatggggtatcattaattttgaaaaataatataattttagttttttcctaactattgttcactcaatgcacaatatttttctgaagcatactttacataattatggataatcttcctgcaaaataaattcttttcttataatttattttccataattataattctgagtattatataaaattttctcaggaaatatagggttcagatgaattattgaagcaacaattaaagccataggtctcagaaaagaaacacattttaaggtctgagaaggaacaagtgagtcacctagtttcctaattatctattatgcactgctttgacaattccagtaaaatagccccagagaagaactctatatatggatgaaattcattacttgggaaacattgacagctctcaaaacaattgatttattgccttttactaatcatgatggtatggatgatgcatatgtgtgcagaaacagtacaaataggagaatatgcatctaaactgtatgggggatttaaggaaatttaggagagttgaagactgttaagcagtgatcttgtctgaatttttcctaatatgatagactctgacatagagtggattgcatttaatacataataaagggatgaataagacatatctgttcatttaagaaacaggagatatgacctgtacaaggggaacacttggttcccagactgatagctgagaaaccagcatgggacttatccagaccccatgaatatggtgtcagtgaggagacctcagaaatctatggggccttttgtagtagctcaatacttatccctagcataggaatggactttgggagccattccacatagagggatactccctgagcctagacaaaggagatgggcctaggccttaatcccaaaaggcagactctgaaaaccccttatggaaggactcaccctcccttgggagcagaaaggggtatgggataggtagtgtgttagtttgggggggcaggggaggagggaaggcagagagaaatgggattgacatgtaaaataatcttgtttctaatttaaataaaaatggagaaaaagaaaaaaaaagaagctttttttaggaccaaaacttaattgttttcaacagttacatcattaaaacctgtgatattttcttaagaaaataaaaagtaagaaacaggagatatacgttaaactactgattgttttctagataacagggaacatagctaactaaattcatgcaattccagtttctgtgagtatcatagtgacttggtggagaacatgagattaagtaaaacacactattctgtaaatcactggatgcaacattttcttctactcagaagtgaaaatcattaattcttttatcctgtaagttactttttatatgtatgataaatagatatttgaaatgggcttttacaaatgtgggtcaaatctttcaacacacacacacacacacacacacacacacacacacacacannnnnnnnnnnnnnnnnnnnnnnnnnnnnnnnnnnnnnnnnnnnnnnnnnnnnnnnnnnnnnnnngagagagagagattgagaaggagaatatccttcttggcttccctagtctttaccttataactaactcttaggctgttcactttctcatggactccctacccttttctgtatgcatctgcataagagctatccaagcttctttttcagccccctgttcaggctcactgggttacttcatagggtgaaaagtgtacaaacacttgtgatagttccagaagtccccagtgacattatactgccaggtaagttactgaatagtttgttttgctggaataaaaaacaatgagttttgtaacaatcacaagtccttaaaacatctcattcccagtgctagttttcatgcattactattttaattaagctcattgtttgataatttcatacatgtataaaatgcattctggttactatctagccccacccatttttacttccttcttatctcaatcaaggccccatcaccacatgtcttccccatattcatgtcttcttttattttgccaaggactagttgtgaccactggtgcagagctattcaccagagttgggcaagctcactatgggaaagctactgtggaacccactaagtttaccaaaggtgagttgtgacctgtggtgtggagttacccactggatttgggcaggatcactgtgggaaggcaactgtacagcctatcctgagctacccattttccaaaggctcactgtacttcaaccctgcatcaggttgactcttttcaaggattttggataccctaatctttgaatttttcaaattctacagcaaaatcagataacagtaaagtttttgcatttgttcctaaagacttattgataagagttaatgttttgagacaagtgaatcatgaatattcccaagggacatctagagtttgtgaatttgtgaaattcttcttgggcagctagtctgtcatgtattcttcaggatgtataacaacatttccttttcctcaagcatcttttatgaaagtaattttagtttaatgttagagtaactgttacagtattcagttaatcttacataactacaatttttcatagtccataactataagaatcataagttgattttatgtttgtaatgacccacctaaatgatgtaattttatctgtttgaaaataggatattatgaattttaaggagaaatattagttatatttatctttctacctttaaagtaccttttctacctttagagatttcttaagcattggtttactttgtgtgtgtgtgtgtatgtgtgtttctctctctctctctctctgtgtgtgtgtgcatgtgtgtgtgtgtgtgtgtgtgtgtgtgtgtgtgtgtgtgtgtgtgtatgttaaaaaggaacagacatgtgctgaagagtgtgtatgtaagcataagtaaactttgagaagtttgttctttccttccatcatgctggtcatggtgatgaaaatcaggttatcaaagttagtcatgactacatttacctggtgagccatctgtcttatgcctttgcttatcattgatgcctttttaatttgggtgtagaacaatgtggaagatagactaggcaaaacagacacaacagtgcatttgagaatgaagactttcttgtcagcatttccatatcaaatcaacatacagaggaacacttctcaaattttggagatctatgtttaaatataacaaaggattattttttcacagtcccagaaaaaatgtatacctagtatccatttagtttgctatatgtgatagggaaatttttataatatcttattttatactatgtaaatgtttctgtacttattcaccactgtccttatagactactgataaatttctgaagcatacaacagagtcaaacattggacatctgagagaacaacatatgtgtcagcaagtaatgaatgctaaagcctcagagaggagtaaggcatggctggcttgtcccagtgtgatggctttcacactgtttgaagctttagagaacttaagaatgagtgctagctgaagcgtcacctcagtaggtgggcttaggaaatttcataagaccttgccaaaggaggctatgagggagaaagtagtagatgggaagtgagcagatggcacttcttaggatggcaacaggccctggagggcaagtgagtataaccacaaaggcttcaagacaatactgtggagaaggagcttttgtaagtagtggagtggggaaaacagtttcagagttactggatttgacatttcattaagctcctacctaccctctacttactaggctctagtaggaccacaaaaataaccaaataaattaaatatgcacctattcatatatgtaccaaacaaaattaaattctttatgacatttttgaataaaacagtttgaacaaattttaaactcactgatcttttttaaaatattttgaggaatagatagatttatttcttcattttgcaaacagtcattgcatatgaattgattagttagaaaactctggtcagtagattgtttcactttctaaatagccgatatatctaccctgttgcatcactttatacagaatgagttgactcattcattcatttcagctcttgagtaagattttccaaaagttcagcagaggccattagattccctaaaatatttcctaagaggctagagctcatgaattagattctctatgcagagaactctgtagttaacaagagatggagcagtcaaagatatctgtcaaggggaattgcttcttactgatcttattctaagcagacatacaggttagttcactttctcactcaggctggagcatcccaccaatcatatggttccaaattccttagcatataagtatacttagtcaagctgcacaaagtcagttgaagggaacacagatgcaatccttgctggttgttgggactgtacaactaagtcctgagattctgattgaatatatcatctcaaatgtgcttgcgttcagagatagaaacaattcttcccagcatggccattggaggctcagttctgtgcatgcacctgtgattgttgggggaagtgccacaatttgtcttatgtaagctgccttctttcattctgaagcatctattggggaaacttcattgattttttgggggtgggggtaagggtttgtggtataagctgattttccttttgcatctcccatttagccagagaaactggttcactcctggagaagactaattctcctgcttttcgaattcctnnnnnnnnnnnnnnnnnnnnnnnnnnnnnnnnnnnntatgagtggaaacctgtggtaattttctttacacattagtatgtaaattggtgctgttcttgttgaagtcttatttagggagccatattattatgatattataggtgagattccctgtcatttctcacagaagcaaactcactgaatacttttgcctttttaaaaaatttaaattagaaacaagcttctttttaatgttgatcccagttccctctccctcccctcctctgctgtccctcaccaaaaccctatcccatcccctttctgctttccatggaggttgaggccttccatgggggatctacagagtctgtcatattatttggagcagggcctagaccctcccacatgtgtctaggctgagagagtatccctctatgtggattgggctcccaaagtccatttgtgtactagagataaatactgatctactaccagtggccccatagattgtctagacatccaaagtgacttcctcgttcatggggtcttgaacagtcatatgcttgtttcccagctatcagtctggggtcaatgagcaaccacttgttcaggtcagctgtttctgtggtttttctccagcctggtcctgaccactttgctcattatgggggtttttgtttgtttttttgttttgttgttgttttttttttttttttgtattttgagacagggtttctctgtggctttggaggctatcctggaactctctctatagaccaggatggactgaattcacagagatccacctgcctctgcctccagaggttagggattaaaggcttgtgccactgatgcctggcctcctcactgaacacttttaacctgcacttttaaatcaatatctaattttttaaaattctttaattactactcatatttacacatcaatccccccattctcttgccctcccattctcccatgttccccaccaaccccccaacccccccaactcctccccagggatggtgaggccctccacgggggactgtcaaagtccattatatcatttggtccaggccctccttgctgtacctgggctgcaatagtatccctccatagggaatgggctcccaaagtccatttgtgctctagcaataaacactgcctccactctctcatagactgtcttggcctcctagctggcacccacattcagagggcttggtttggtccaatgttgtttcccagccttatgactagggtttctaagctatcagtaggtcaggtcaactgtttctgtgggtttctccagtcctgtcttggctcctttgctcatccctcctccctctccacaactggattccagtaatatggttcagtgcttagctgtgtatgcctgttcctgcttcaaacagttactgaatgaaagctctaggaatggtaaccaaggtagataccagtctcattacaggggaatggcatcaatggcatcctccccaccactgcctggattcttagttgggttcatccctgtgaatcccctaatattttccctgtgcaagacctctctctaaacctgtactgtgtctctctctatcaaggtatctcctttcttgccctcctctattcctcccctgtctcagtccacttgttctccttcccctccccttctacttttaagatccattcttagagcttcatgaaacttctttgcctcccttgaataattttttgaaactgctcacttttttcccaatttgaaagcctgctttctgtatttatatatgtgtttttagaatattcattctctctgagttttttcttctttccttgtctttaaatctatcaccatgcacaaaacttaagtgcaaaggatcaaagatatcatcataaatccagccacactgaatcttctagaagagacagtgggagatacccttgaatgaattggcacaggagaccacttcctgaacataaccccagttgcacagacattgagaccttcaatcaataaatgggacatactgaaactgagaagcttttgtaaggcaaaggacactgtcagtaagacaaaacgccagcccacagaatgggaaaagatcttcaccaaccccacatctgacagagggctgatctccaaaatacacaatgaactcaagaagctagacacctccatttatttaagggattttctcatatcctctttgaggccctctatcatttatgaattctctatagaggaatctaaaatggctgaaagacacataaaaatgtgctcaaaatccttggccatcagagaaatgtaactcaaaacaactctgagatatcactcacacctgtcagaatggctaaaatcaaaaataccaatgacaatctatgctggagaggatgtggagaaaaaggaaccctgctccattgctggtgggagtacaaacttgtaagaccattctggaaatcagtatggcggctgctcagaaaaatgggaatcagtctacctcaagatccatcaatctcttgagcatatacccaaataatgcatgttcatacaaggacatatgttcaaccatgctcatagcagcattgtttgtaatagccagaacctggaagcaacctagatgcccctcaactgaagaaagaatagtgaaaatgtggtacatttatacaatggagtattactcagcagaaaaaaaagcaatgaaatcttgaaattcacaggcaaatggatggaactagaagaaaccatcctgagtgaggtaacccagtcacaaaaagtcaaacatggtatgtactcactcatatatgaactttagacttatagcaaagtattaccagcctacaatcctcttcaccaaagaaactaggaaacatgaacgactctaagggataaatgcatctaccccaggaatgggaatgggcaggaactcctgagctaattgggagcaggagagtaggggaacgggagctgccataatgagagcaggagaagaggagaggagaggagaggagaggaggaaatggaggagcagaaatattgagttgggggaagaatagaggagagcaggatgagagatatcatattataggaagccattataggtccaaggagagatctgacactagggagatttccagagagctacaaggatgacactaactgtcagtccaggcaatggtggggaggataacataaatgcccttcccctaaaatgagattgatgactggtttttatgccatcctagggctctcatccagtggctgatggaagcagaggcagacatccacagatatacactgagctgaaatctggatcttagttgcagagaggaaggaatgaagattgaaagggtgggtaccaggctgaagaaacccacagaaacagctggcatgaacaagggggaacacatcgaccccagatgctgtctgggaggccagtacaggacttattcagacccctgaacatggatggatgtcagtgaggaggcctctggacactaggaggcccctggtagtggattagaatttttctctggagtaagaagggaatttgcaagcccatctcatgtgaagggatgcactcttgccctggacacatggggaagggcctaggcccagcccaggatgatgtggtggactttgtggagcccccattgatggccctaccctgcctggagaatggagagtggatggggaggggagtaggtcgggagttgagggacggagaaggagaagggattgacatgtgaaacaagcttgttcccaatttgaactaataaaaaaattataaaaaataaaataaaataaataagctttcttaatagtggctatttaatgaaagggatgatttaaatttaatattacctctatttttttgcaaaacttaatttcatgaataggatttctctgtgcctgtgttgtgcatgaaatcaatttaagataatctgaaggggtatagatgtggatctgttgatagaatgcttagttaggatacctgaacccagggctgagtcctgagcatgatggtgcaagttgtatttcttgaccaagaattcaagatcatcttcagctacatactgacttccaggccaacttggggtacacaatatcatgtctcaaaataagtaaatagaaattaattaagaaaaggaaatgaaacaaaaatatttattccataatgtatgatgcacttctcatatattagatatataattcatctgaaaacattttatggtatgaattataagacaaatgtaatatgatatacaatgtgctgaacatatatatgatatacaagaaaatggtatattttagaatgtcattttaaattttgaatcatcagttttcttttttatttgggggggaggttttcgagacaaggtttctctgtgtagctttggagtctatcctggcactcgctctggaaaccaggctggccttgaactcacagagatccacgtgcctctgccttccgagtgctgggattaaaggtgtgtgccaccaacacccggctagaatcatcatttttctttggtgcaacagcaatataccatgtccaggaatacaaatccaacctaatttgtaatgagttagctctacttcaagacttcagctgccaactttggacttttcaagttctacaattctcttaaatcatacacaaaattagaaaaatgtgtgtgattacagagtccagtttatataggaaatatgttaaagtcaggcaaaggatggtaaaaggaggaagagtgtggaataataacttgtgcaattactggtgatcatttgttccagagagcatggatactgttattcccacaacgccttttcttgatgaaatacacatgaaacattgtgctaactacaggtgaccagctcctaaaagctcaagttattgacttcacttctttggaggttgaagctcgctttctttgtctcaaattctctatcttctatcagataactagatttaaacagggtgatacttgaaatgcccagataaagaaatggaagactcatatacagtatgctattacaaggacttacggctggatttctaagttttatcatgatccccatggtatggaaattgccctcaaccagtaggaagcagtttggaatgaacgacagccaaattcccaaatattgtttatgaatgtttattttgttcaaatggggttggttataaatggtaatgatcacagtcaatttcttttttaaaggaaaaatgggtgaataggatatggaggtaaatactttacattgatatggattttcatttattgatacaaattcaaggtcaaatttgtgttatgctttaagtgaagattatatagtcacctataatactcaaaaattataattagtttaattaggttttctagatatacagagatgtagttgagatggactggtattcttcaaacctttcaaagacctacagaatatatggcatttaaatggtttagggtttttcttgacaatgagaaacaactgctcctggcacaccaattgagtcagaaaggaggatgggcataaaaaaaactccttatagtgtttgctttcaacatggcaagattagccatttaggcaataaactgctcttgcctggactgtttgttgctatataaattagacatactcgactcatgagaaagtgactgctaaacttaaacaagacagtactaaagggttcctgttgaaatggagaagtgtgccagacacactgtggcctataggctgaagatggatgccccaacattacagaggaactttgggtggctgtccaggcagcaagatgtctctgttagttctagattttatatattatcctgtgttctttgatggaattgaagacggatagttatggttatagttttcttcatttattataaaagataacttacccttctttttatttagacaaaaaagaggataggattggggaggtccttctgtgtatatgattgtcttattggttgatataaaaagtactattggccaataggaaaacgagataggtgggactaggtgtcaaacaggattctgggaaggtaggagaaagcacagaatcaccatgtgagcccaggaagacaggatgcttccactggcgtcaagtaagtcttttaaaatatatagatttatgataattaagactgagctagcagatgagaaatcgtagtcattggccaagcaatatttgtacctaatataagtctctgtgtgttacttgggaccatatcatggtggcaggcgtaacatgggtggcctggtggaaactatccacatggcagcagggctcgggcagcttggtggaaagagttattaccactatctattatgtgagggtgcacactacacctacttagttattgcaaattctttagtgcatactccatcacctgactttgtattcaaaataggtttagtaatgcattgattatatgttgtttaattgcaaaaagaaaatcaaggcatattgtggcattaagactgaactattaatttcatgcatttactcataggtggattgataacattcagcatcatcaaagattctgtctctatgagcagtgaagaatgtcttaatccaccaagttgaatgaatctgcagtagctgtgaaagaaagcactaatctctagtacttcttacttctagcttctcctcatgctgtgccagcctaatcaaaggtttgctttcaatgtaggagggagtcttgtagagagacagtgtgcagagcagaagcttccatacatcaagtgtggggttagtcacagtcatttctccaagtcctaaacacaaacgtgttagcatttaaagacagcttcagtaccactgaaaaaacataaacttgtctaaaaattgatttttcagaattcacaaagcaacacagaaggcaagagaaacaattcctcataaaattaaagtggaaccaaatcataaatgagatatttctatttaactggttacttgtacttaactcttattgtgtatcatttgactgaaataaactatttcattttgtcattggtttgttttcttaaatacactaatctgaatattcctggaaatgatttattttgtgctgcattatcactttttggcttatgacagatgggagctagggagatgcatgtggcttcatgactcttctttgttccttcacatacagccatgttctatactgctaagcacagcctcaactccataaatggggtttctaaataagatgcttttctcttcttagattcatggatccatttgttacccctatatgacaaaagtattgagaaacagatgtaaggaaaaaaggaagaagagacaaaaaaccaactggataagaagaggaggtggtgttggagataagaagatataagagaagggggcagaatcatgagaaagaaaattaggaggagaaagagaaggatgaactggaggatggtggaaataaagaagcatgagacaatggactgattaaacccagtcatcagtttgaatctcacttagaaaccaaattagcagttctccttggacaaatcatgaaattattttttaattcaaataaaaaagtacttctaccaccctggtgccgggtaacaggtgccaggtattgcaacaggaaatagtactatgaaggagaacttgatacccacagccactactgctggaaatcattgaactcttttttaatcaactacttgaacaaattctctctctctctctctctctctctctctctctctctctctctctctctctctctctctctgtgtgtgtttctctctttccccccctctctgacacacacacacacacacacacacacacacacacacacacacacacacaaacacacgatgaattctattttcatttagcataatcaaatatatcacatatattttcttttcagaattttctttttcaaaattttgttcttgaaacaggtaggtaaaattgcaggcggtccatcccctttagtgatgttggtgaaggaatgtaaagctttttcctaatctggaggattatacgatggttgctgtttattcatataaatcatgttttgtcatttagatgaaatcaccaaggaggtcagcctatatgcatgcccatggaagatcaaatttatgtggtgaactgatgtactaagactctcctgctgtgggtaccattccctgggttgggatcctgaactatataaaatgagagtaggctgaaaacaagaactaatattttcttgttacttgattgtggatgcaatattatctgatgattcaagttcctactgctttgatatccccactatgatggactgtgtccttgaattatgaaccaagatcaactttatcttccttaagctgctttggtcagaaattttatcgaggcaatagcaaaatacaaaaaggcaggcattatagcatttacatattttaaaaaatgccttgatttacttttgattaattagactaagagtccctacaccatcatgtgcatttctgtaagaaagtagaaaaattagcagtgatgaggataaaggaaataactattgtcccacttcatactacagtggtacaaataaagaatttcataccacaccagtggttaaaataataactgtgatatttcagcagaactaaaatctgaaaagaaatgataggtgtcaagcaggactagtacagagaaagggattcgtactaatgtctctttgtccttaacaggatgatctaagtgaattggaggatatgctattatcctcactgagagaagcacacaaaccctttatatgactcagagaagagagaaaaagattggtggaggtcactggagtgcaggtttggttctgccatgcagtcagatgatatagatgcccagaggaagtgccatatgctccaggaaaatgtatatatactttattttaaactttccaagttcttggaattttatttctcaacctaacctagaagtcaccagaaaaatgtggaatatttactgtgtgtattttgtgtgtatatgtatgtgcaggcctatgtgtatcattatgcttatatggaagtcaaagtacaatttgcgagagttgcttctctccttccagcatgcaaagtccttcgggtctacctcaacttatcaagcttagcagcaagcactgcctatccatagccttggctactagaccattttgtgtttactgaatgaaatgcagtgatttgactatcaattccattgttaggttataaaagtctgtgatgccccattttggggatttcattaagtctttttatcattctaaatgacagaattaatatcattgctagtatttacaagagcacaacccaagacaatgaagtatcttacttcattaattaaattttgatccatatttatgaggatcatttgtgaggctagttatctacaattaatatgtaaagccacataaaatacaggaagacattcagagaatcttgactttcaaagaatgaatatataagtatttatttttttttaattttaactgtttagtattgattatatttcatcaacaatcaattaataacaccaatatttgtaactggaaataggatatgccataattgggagcaaaagtggaggaattatatttggaattctttgagaacagattaaacactaacatgcaagcaagcaaacaccacaaaaatcaacaaaacatttaaaattcaaaaaaaattagtttaagtattgaaggaaacgtttctggaaattgctgaacaggagatctttgttatctggcagaaaatagttctcataatctattagtggctatgtagaaagtataaaatatattgaataattctggaaacccagataaagagaatttaaatacagaattgtcacctgctatcctctttaagttgtagagcaaattgaagaagataatgggtaaactataatgaaagaatattgggaagtgttaaatactagaaggtcagtgcatattttgaatctgtctagtctcttcagaaggcagaagatgtttaaattatggaaggaaatatttgtgagtaaagatcaaatggagtttattgtaggagtaatatactccatgggtaaagactggagggtggctataaaaccttttattaactcctcagaaaggtcaaagtgcttttctatgagagccttccaggaagacaaaaacccttccaaagaaattaaatgtgtacctctcaggtcctctcaatcaaagaacagcaattccattgaacttaagtacttgggtaatctccgcagaggagacttttaaggaacaaatatttggttgtattttctatcgagtgttgtaaaagtgatttcgattgtaatcaaaattgtgcatgagttcagctgaaagtactgatatcttggagacaaccagataccatctccaagctgtctggaaactactaagttatcaacaatgtattatttttttcaaagaaaagaaaaggtcagaagccaggggagagaacatgcagttagatgcaggagagccattcagagaattcataatttccaggtcagattgtttttcagggagggaagtcaaggagctttatattctttctacagagttttgaagttgtttttagaattgttaattaccatggcttctctctgttatagatagatatcattgagcttgtcttggttaattttgaagtgaatgtcatatgatcccaaggtattttcaagcccctaaactcaatgtgcaaactttatattctgtgattctgcaggacttaatacaggctccattaagaagtgctggataccagttttattctagagtttcatgatcattcaaatattcccatttgatgattactgaatttagtcttttactaagatattaataatattttaccttaaaaggtagggaatcatgacatttatgggaaaattttgttaattttgctttaatcttgaaaaaatctcccttaaatatctttaatttataacattgtggtaattattgcttaataaatcttgcactgtttaaactgcatgagtaaaacccgttttctggcagaaaacttagcaattgcaatgcagtttaaaagtgcagtctattttcatttctggttttctaaggcctgtctgaaagatacaacactttctcattgtcttggcattgttttaaagacattgaagtctgaaatactattgcatgtggggcatgtataattatgttgtatgcttattggtttcaatgttttctgtgctaagagatggcaagacagcttagtgaataaaggaaactgcttcggaacctgatcactggaagttgatacttgggacacaaataatggaagaagagaatctatttccacgaatagtcctctgacttctacatatatatgttgtggctcccatgcccaaacataaacacacaatataaagaaaatacagagagagaggagagagctttgtacacataggccagaggaggggcatcagatcacctggaactagagttgcaggcaattgtgagctgccttagccatcaggagaatgcaaatcaaaacaacactgagataccatctttctcctgtcagaatggctaagatcaaaaacaccaatgataacttttgttggagaggatgtgggaaaagtggaacactcctccactgctggtggaagtgcaaacttgtatagccactttggaaaccagtatggctactcctcaggaaaatgggaatcagtctaccacaagatccagcaattccactcttaggcatgtaccccaaagaagcacactcatacaacaaggacatatgttcaaccatgttcatagcagcattatttgcagtagccagaacctggaagcaacctagatgcccctaaactgaagaatggatgcagaaaatgtgatatatttacccaatgaagtactactcagcaaaacaaaacaaaacaaaacaaaaagaaaaacaatgaaaatttgaaatttgcaggcaaatgaatggaactagaagaaaccattctgaggaagataaccaaatcacaaaaagacaaaattgtgtgtactcactcatatatggattttacaatagagcaaaggattagcagcctacaatccacaccactagagaatttaggcaacaaagaggatgctaagagagaaaaacatgaccccctgtagaaggggaaagggacaagagctcctgagtgaattggaaagatgggggaagaggaaaaggagctaggagaatgagaaggaagaacaggagtgctgagtactacataagggggcaggaagtttgtgtatggggaagaatagaggagagcaaaaataagagataccatcagagaggaaaccagtatagggttaatgagaaatcaagaactagggaaatgtccaaagatctacaaggatgacacaaactaaccatataagtaacagtggagaggctacctaaaatgccctcttctaatagtgagattgatgactaattcatatgccgtcatatagccttcatccagtcgctgatggaagtagaagcagatacccacagctaaacactgaactgaactggaatccagttgcagagaagaagaagtgatgagcaaaggggtcaagaccaggctggtgaaacccacagaaacagctgacctgaacagggggagctcttggcccccatactgatcactgggaaattagcatggaactgatccagactccatgaatatggaggtcagtgtagaggccttggaaatttatgcggcttcttgtagtagatcagtacttatccctagcataggaatggactttgggagcccctttcacatggagagatactctctctgcctagacacatttgggagggcctaggccctatttcaaagacattacagtctctgaagactcccccatggaagacctcactctccctggggagcagaattgttatgggataggtagggtgttattggggtcaggagaggaggtgagagagatggaattgtgattgacatgtaaaacaatcttgtttctaatataaataaaatatggagaaaaaactataaaaattgagtaaatcttcagagattcaatgttttgttcttactgcaataacacaatttagtcagaagtacacagtatgtttgaggtacaatgggaatatatcaagtctcatttatttttcttgaaaattcctgtatctaatgaaatatattttagtagaggaacaatataatcacccctgtgactctctttttaatttgagaaatcatatgatcttgtgtccaatcttcttgtttgaaaataatatttatggtttctgctttatttcatgtttaattttttttacgaatctatgttttctcttatcctatcttacatatttctttacattttaattaaacaaattttatggggaagaaaattaatggtatataatcctatcaagtgtagttcacattttttaattttcttcacatagacatgactaaaatatttgtaaggaatacttctatgtagaagaatgagagaacttttccaaggtgtatcccttagtcttcatatgaatgtcttcattttttctctaaataaaggcctcactttattttttagtttttgttttcctattatacccttcaatttctgtttcatggctatataaatacgattgtacttttaaaaatttctgactataagttatattttgatgagagatgatagcattatccatggaggatctttctcatactttatttttaaaccccataatgtgaatatgatgatcttgtatgaatttctcaaattatgaaaataaatttaagaaaattccagaccctcattttccttactatttgaattatacacaaatattttgattgctgctctatgttgtgcataatagtctccttcctcatggaaaaataaagacagacataccaagtacataaattaccttaaaaagaatcctgaaggaacaaacactgtcaaaaattattttgaagactgtttgatgcagcatgacggaagtagcagaatgcagcatttcctgaaaggagaaactatgtcctttaagttggaggcagaaggctgaagacatttagctcccttaaactgtgaagaacatcaaaggatgccaaaaacaagaacccaagggtattaatgagaccttccattaacccacaatgaatttctttgttattaggtattatgtgtaaagtgcatgtgttaagttttggagatgaaagcaagaactaaatgtgcacatcatcaaatccatgttctttccaagacacccacagagcacctgttgctcctaaatatgaatgccttacacttgagctcactaaaagatatataacagttacgctgctctctaaactcctgaatcactgttggctttgaaaacagctggagcattagttgatggatcctgttggctttcataaatccatttatgatgttatattttcacagagctttaggttttgcactgatgttgaaagttcaccaataaaacacaagctatatggttggtgtttcccatatgcagaataaattctgaaaagaaaaccaatattttatctatgaatctcaaataaccttttttggataacggtgtaagcacaggttctcaggcttgcttgcacatgataaaagtgattttatgaggctatagtttctgtgtttatattatgagactacatgtttaattttaaaaataaaaagaaatttaaatagcaaagctgttatttctaagtgttttgataccttctctcatctttccattcacaacctcaatatgtaattatattcacatattttacatttcctgtcatgttacctaataagcacacatgacaactcacataaattaaatatgtccacatttattcacctcatatcttttcaatctcaatatatagaaaaagacaatcctctacaattaccaaaaccacgtggaatgttgttgaaacacttgtgtagaaagccgcatggttttcttatttcgtaagtttttcaaacttgtaataaatgtgtactgtttaccacctaaataattttaccttgtgattgaaaataaatgacaaaatatgttggttaatgacagtgagacatggataccaatcagtttggatttctgtttttctttgagatagatgaaagaaactttagacacattcatcgtatgccctggtaaatattaacccactggtgttgtattgagcttctccctttaaaagattatttcaactttcaggttctcaaaatagcttctgtaaaaactgcatgttgagattatctttctttaaggagagatatgactttctattccaagagcaatatacaatggaggctcattctctttgttctaaagaggaaggagagaaggcagcatttgggcatgctgaaaatgagcatctcctctcctgtagccatatgctacaggcaagaatactgttccaggaaaatagaggaaaatgtaccattattctcttactgacactttcaattgccttaaactgaaatatataataaatgagcatgtaaattagccaggatctttgtctatggtgtgactttctgatttaacttcctaaatagggcaggaaaaacaatcagtgaagatcatatttgataccctgcccccccccccccccagctaattcccccgccagatgaaaactttaagtgctgtggaaatggtagaaagaaagttgtgaatggtggaaaagaaggtaaggagcctggaaaacagacatataaaagacagtattgtgggtttgttttcctgaagttattcaggtgatgacttctgataggaaagtagtatattatgtttcccagcagtgcttctgagtcacaagaatagaatacctttatctcagatgttattgttttcaaaatctattgtattaaattaggctcaagtcaccagtgaatcacacaccatagaaaatttactctaaatcagttttaattgtatacattcaacttctcagtgtgtttgttaaattaaattgtaaatctcatcatcttattgcactaggagatgtttaattttattatgctacctttgattaattaaatgtataaatgtaggcaggtttattgttaagcaaataaatataatcattttggatttattattatatgaaggaaatttctcctatagatttttattaacattgtaaaaactatagataatagccaacaaccagacattctaaaagacatcactagcatatgagcatgacagagnnnnnnnnnnnnnnnttccctagctacatatattttttaagatataaaaaatacccttcattctagaggtaagatttttaatctggaatatcaattaaagtcaagttaacaattacacatttagggaactggtctcaaagtcctagtgtgaacatggattccctggtgcttatcactaatattgaacagttgtgctcaaaagtgctgcctttctgtcttttcccttttctaccatgaacatacttggtataaataacccatctatgtatcagctttagaagggaacctctgaagtcttctaaagattatattactcagttcaattttacctgcaagacaaacacagagtttaatgtaaaagcaaccttcctatgcttgcctgaatttctgtggggcagatgtctgttctggaaggttctggaactgcacaaatgagacatagcataagaattatgcttcatttcagaaaacaaaactttctccacaatattcagtgtcacatattgagttttttcacccaattggtataaaccaagggatttgtttgaaaggatgtatgtcacattacaatttttcctttgagaaaatgcaatagtaaacatttgttagacaggctatttgccttttcatgtccattgagtttagtttgaaaagaacaccttgaatctatatttaagcagaattttaattagcaaataaaccttggcatatctttgtctgtgctgagtattctgagtcttttttctcaggtgatagtcagtattaattttatcattagcattcctatgttttacacattttgaagtcaaagacatgatattcttgttggcctttgccattttatattaattctctgttaccaatattgggagcttaggtagacattcagaagtgtacagcatcgactgtctaaccaaattccaaaataaactgtgttaaacagtgcagtttctaatagatcacagcatccttagctagtgtaccttttcaacaaggaaaaggttaagatacacagtcttgcctctgattaaattttaacagtaaattattaagacattgtcctcacaaatgttgccgtgttcagtacaacattaactgtccagttcaatagtagcaatgaggcaatgtttccagcactaaccaaatgcaaccatagtgaggtaagcactgatagtgtacctgaagactctacagagcagctggaccaaaaatgtcaaggtgcaaatgtaaagaagaacaggaccctgaggactggtacacaggaaaacaatacattagagatctgtaaaggcttaaaagacatgacatcagatgtttattggcctcaagagctatcacaattattgcatatggcaaagagtcccaacatctaagacctgactgagatctgtaatacaagaagctgctgcatattgctaactactattcactatggcttctacacaatgatgttagagcccaaagattataattgcgaagtaaattcagtagtaaattccagcatgatagtaatatggttatcaagagacacaaacctggttgctaatatctcctactatgtgacactctcaaaatattcttcttctcatgatgctggcaacaattgatttttgtacacaaaatcactgggataagaaaggtacctaaaccacagtacttttggatccactgaacctcattttgaaagaaattttgattccaagttttttatttgtacttagatttaatacagattataggtttatggactgtagttgtactgtatatacataaaagcttttctatttaatattttgatttaatttttggaagaatatggagagtgattttcaagagtttcttctttgcaacttgaattttggagactgaattaccatggtcaggttttagagggaagctctttcacctgttgagaaatctctccttgtctattgcagataaaggtttttttctaatttaattgatagtcaacattctcacttaatattttcaatttatcataatttaaggattgcacccatgaacaaacttcataaacgatttctgtagttacatcttgtgatgttgcttttaattagagtctgcattatcccaggagaatgaagcagatgagaatggttacaaagaactggagtatataaataactctggtgactggagtgtgcttgttagaggtcaaatgttcgtctcactattctgaatccaaggaggagaaatgacagcaatgtgattagtaagaaacttgataaaataacaagcctggattctttagaatgtaaaggttatggaagacaaagatagcctacaaagaaaatgtgtcagattgaggaatgctgaattgagatggcaacttgctgcaatgtgggattctaaaacagagtgcagacagtcagcatatagttgctgtattatattgttaaatagtaactttacaattttttgttttgttttgttttgttttgttttttgagacaggatttctctgtgtagctttggagcctaccctggcactcgctctggacaccaggctggccttgaactcacagagatccatctgcctctgcctcccaaatgctgggattaaaggcttgtgccaccaatgcctggctacaatttctaaatttacaaattgtaaatatattgtaatttcattcaacttcatcatgtaacatagattatataatggtacagtatccattgtgaacattgtatatttgtatatacattattcattaaaaatatgttaggttacataggttactgtacttgtaacaaaagaacatatctataatggattctcacaaaacaaatgtagcacagtagaaatgtagaaatgggcagagtgtaagccaataacagaaccaagaagcatctcatccatgactatgctgcttatggatttttttcaatattcccactctatttttagagccaatcaccacactgcaattaaagcatagaagactttgaaaccaacaatcattcatccatattgtcaacatctcaaacacttttatggggctccaactttgtccagctctgttcattaatggcagtaccacaatacaagacagattccaactttaaacacctttttgcaacttttgagctaatcttcactgaatcattagtaaatatcaattttgacacattctatcatggtaacatatgtggtctcactagggtcttaacactatgtggaaaccttattgtatttttcacatagtgtttgtgtgaactgacaagaatcatgtcagattgtgttcatattttgcgcataatgttctttgtcctctcccctttttcctatcaaatgtgacatggtatttccacatctatcaaacacactccacactcctcagtgggacaaccatgaattgaacaaacaaccagggcatttgaaccacacagtttttcatgattatatgagtgcatgtacctgccaaagtcagaaaagcaccttttaatttcgtgaattaccttgtcatgctagagttagaaaattatttgttctaataataaagatcataatagtgaaaaggaaaaaattttttacaagtgctcaggagcacctagtgttagttctgggaactgaatttgtgtcctctgcaagaacagaaagtgttcttaatcactgagatttctctccaacctcaaaagagtcaagttctgaaatacactaccacctgtttaaacatgaaagctgaagttaaagtgaaacagatgcaaaaggacagagcatgcttgctgtgcatagtaatcacctagaaggtatgaaatcacagacacagaaagtagaatagaggctacaagtgacttggaagagagagaacttacagatagtgtttaatgagtacaaagattctgtttgaaatgataaaaaatgtcatatattattactaagcattgttcatacagttaatgccactgaattaagccttcgaaatggttacaatggaaaatgtatgctatgttgattttaccaccaagaaagcaattcacatttactaatgcatgtgttctggggcatattaagcaaatgtttttaacttcaccactctgccctattaaggaaaaatgacagttcttatcttggagtgctttaggaggtaataaattaattgcataatccatctagtctgtcacacatggttgtatagaacatggcatccttgtaatgtaatatccacagcagtaaaaaaaaaaagtaagattcagtgagacaattggtcttcagacagtcatgttcctaccatagtattttcaatgtctattgtgcaacaggactagctccttcctccaatgcatttatttgaaagagaaaatgtgtttatgaaatttggaatgttataatcatttattagacattgatagtgaatttgtctcattaagatgtgaaatttcttgaatgaaatatattttctagctggcaagaagctagcatggttttgagggtttccccattgaagcctatttaggcttctttttttcttgaatactcacccaactgtaacttcccccaaggacttttacttcttattttggactgatatttaaattatttcagaatttttgtatttatcatgttgtgcctgtgttttaaaaaggagaaaggccttccccaatgtgtatcaacaccgttcctacagaattccttcataacattattcatctagaaacactgctaatttgaggacaatgcagatttcctttattacttttagattgctctaataatacttcttgaacatggaaatcttgaaataccacttctggagagagctcagcagttacttgagtgtatttgctactctttcagaggacctgagtttttagctcccagaacccatgtgtgggggcaaaattctctagaactcctgtagtggggatctgaggccctcttctgtcctccattggtactgcattcatttggaactcagatacagaataacaaacaaaagaaaaacaaataagcattgaaaaataaaaatatatatatatgactaaaattggaaggtggcatgatgggcaagtctcgtggtgtttattcttagagagtgaatagatcctgggagatcagagctgaaaaatgagatagaccaaagtctcatgcagcagccaactttattcagagcatcagacaatttatacaaagggttaagaagaatctgatgagtaaaatgtataaccacaaggaaaagccgcaggtggcaagaaaatgttttcctttccatgagggcatataaataaataataatagccagttgtaatgaataatgtagtatcctataatgaagcaaattataatattagaacagtgaaatccttgtctgtaatatgctgccatcaagaatagatattcaaacaatggccagtacaattagtaacattattacattgaccagaaaaatacagagaaatgtctaaacagagaacgatatgatgagtagttcctgtgtcctttagaatgtaagcccatatttgccctctaatagaaacacaaattttaaaatatcatatgcatagtggaagtgattcaaagcccaaggaaaattaaaaccctgtctcttctccagagagattaatgggtctaatattgtcccaaagtctagtcacaaacacggagttcttagtaaaatcacttcttccttggtgcacaggaccttagcctggttccagaagggaagacttgacttctgatgatatgggcatagtcactatgtcctttttccatttagttggaggtttgttatgtttctggtgacttccactgtctcctcaccctctaccatggtccttggcgcatttgggcttagggagccaaaggagaatctgtatgtttttcagtagatccatctgaaatgacagatgtataccccttcccaattttcttctggagaaataaacataggacaggtagtgtatcagctgcttattttcttctgcaacgaaaaccagggaggtttgagtgtgcattatgtatgagtctattgctggaaataagcctgcaacataagaaaaatctgaaataatattttaggtcttatgaattaactgaagtagatgaaacaaagtaggcagttctaccagttgggccgaggaaaagaaaatattagtaaattgatgaatatctggatcatgaatccctcctacagcctcaggtgaaacatcagtgaaacaagcatctgcctgtggaataggagatgttgggacaactttggtactcataatccaatccatatgagaaaaccccatatcttactagctagataataatttcttaaccttacatagtaatctgtgaataaaatttgaaaatccttagagttcaataatgttcttaaagactgttagtttagggtcttataatacagcaaggagctgatcaatataattgttgacatcaggtcctaattgaaaaagaagggtacgacaagcagttactatattattgcctttatggtgtaaataaatcattttcaatggtttatctttgtgtgctataatccctgtaggagacaattcattagggaaaaataagtcagtttaaaggaagtgaaggatgcccttgatacacaaatgcctcttgtagtctggattggaaaatgaatttctttttcctgccatgatctggctttcctacattgtaaagttgctttttcatagactttcctaggtcttcattaaaaagtgtagagaattcaaggttagattgcttatgaaattcctcacgccttcagggtcatcttcaggcaatgaaggatacatatctaaattgtcatagttggtggtgatgctgtttttactttcaattttgcctgaaagggaaaataaaaatcttgtgttttgcttcttttatcaattgtacagtttgattacccagtttgtattcattcaagatattaggtgtcccttcctcttgactatttcctatttatcttcctttagtatttttttagcagtccaaactaatgcccaagtgtcccaaataaaatatgtttatatgccatttcaataatcttttggactaccccatatttcttcatctaaaattccttcttctggaaatcaggaataataacaatgaacaacttgtaagcaatctaataattgtgattttcatacttgtagtcctccttccttataaaattatgcacgagcttgacattaagtcaaagccttctgtgctttctgtcccattattatcactaaacttctgtgagacttcccactttcttaccttatagccaacatcagctccctgattcatggtgccacttgtttacttctctagtggtggtgggaatagggagagcagaacctaaaaatgactcgattaaagtctcatgcaatagccaattttaatcagagcatcagacaatttatactctgaggattaagaagaatcacctgagtaaaatgtacaatcacaaggacaagtggcaggtgggaaaaacatgttttccatgaaggaatagcaacaaatatcaatagccaattgtaataaataatctgaagtaaacttacacttatctgggagcagcacaaaaacactttccaaaagcgatatcatgttttaaacaaactgaggctcacaagacttttgtcttattttattggagttttcttgaatttctcagaattctcctcacaaggctccattcttggagcatcttctgacaatgtggggagttggagagcaatgtagggtgcacaggaaaaaaaaacacattttctacatgaatataatttccaaagatgacattaaatatattctacaaataggaatggataaacagatcatatcttcttatcaaacacacacacacttgtaaattgaacagaaacctgtaacatattttatagattttactttataataattaccctatgctggttttcaatgatgacaaaagcaaacccatagagattctaggagagaaactgtaaatagctgggcaagatggaggacagtcaatctcagaagtctgcaagttaatttctgttaaagctaaaattgctctaggactaaaatatgacaaagtgtttattaaaccaaagaaaggaaaactgtgttatgtttctcagcctgttagatttccaaggaaggtcagtaagtgctttgtttgccacagaaataggagcactttaatgagtcagaacagacatcacctactaactctagtccagacaggttttgattacctaaaacttgtgaatctgtatgatgcattagttggattaactttttataataacatttcataaacttgtattaatgtataatatttatgtacttatagtcaagatttaatataagtgattggaacggacagggtgtttgcacaaattaaaataaaaatgccaagcaagtggtgttctaggtggcttcagtccctgtgtagactactgcaactataaagaagccaagaggaaggtttcagtttataccttatcaagaacatgtgtttaacaatgttttcctcatttgagaaagcatatttaaaagtacttatatccaaaaataataagtgaagtaagtgttatactattaagtaattcacaccatcattatcacatcagtgtgttgcatacctgtgggtatgtgtgtgcatccatgtatacacacacatgcatacaagcacacaaacacaaactctctctctctcagaccaagaatgcaaataacacttcaagcttctactcaggaatgttgagtatttacatagttaagagaaagaaatgagacacttccttttgacaaattgtcatgaaaattatcattcctacaatgtgaatttaggcttttagttggtaatatgaagatctctgtcacagctagctgtgacacagctttttatgcagcacatatgactcactgttccatgtatctccatatctagaagaatgttggtcagattttatagactaacaaaaagacaacaaactagcatcctacagaaaaacatcactgcatgcttttgagtaatctgtgaggccaaggatttgggatgacaggggcatgaaggcaagcactttggagggaaatgagcaatggaattctttattgagctgataatagcgagaagcgacaggtgctaccgtggttactctaatcattcatttcaagtataatttatctctgtattgagagagccgagtgagactatcagctgtcttcagttgattgaagtgtgctgtcaggtatcctggtttcctcctctatttctgatttggagtttagagggggaattgggtttctgtggctgaagaaagaacttaaaaacagtcatgatagccccaatgaggacttgtgtgatgaatttatgaatgattattaaggctatgagacatgtttgacaacactatcatctgcagttgctaacaccatatcaactccagtgtgacaaaacattattatcattgttttcctattgctgctgcaatttcaacaaacttcatagaaaatttgagagatggatatccacctatttctttaaatcaaaagcaataagataatttaaaaatattttaaatggttatgaaatattggaggcatttaacaattatccttggggtttaattaattctatatcaaagaaggactcaaggcatccctcttctaaactacataatgcagtcaggcatccagaaaaaaataattgggagaacacaggacaggattttatgttgtcacaaaaaaaatctgtcagtatattcatgtagaatgaagttaaatgtgattattacttattttaaatgtttttggtttaataactagatactcttttaatttaagaaggtctgattaagatcagctttacctctgatctccttgacaatgttaagcaattctggatgaataatatgatatagaaacgcaagtgaggttacctaaggttcccttgagggcacattttcattttcaacatcgctggatttgggatctccaggagacacatatctgctcatctttgagggagactacagagagatgtgaatgaggagatgacatgcacccttaatgagacatagcaccatcccattgggctgcaagatcctggacagaaggaaaaggagacaaggaggcagcctgttggggttcaggtctccctgctccttgttcatggctttagatgtgaggagtctcagcagcatgctcctaccactataaagaaagcgaagaccatctgtagtctgtaaggttaagatatctttattcagataaacaccagccaaacgcaagccagagcgtgcccagaggcagcaggctagcgaggccagagagaagaggctccccacgtgaatgtggctccttaagaatcccccccacacatcctcaacctcccctgaccacgctctgatgggcgtggccaggcacacctttagtggctcctaagaggcggggctagagtgtctccctacacaccaccatgagtctgccatcctttccaatcccagggcaccatatactcttcaaccatgagccagaatagacctgcttcccttaaattgcttttgttggatatttgcttacagcaagaagaataattaacatggagtctaaggtggtagggaaattactttatagtctgtaggccctgatcaattgtgctaagaccttctggttacatctcagtctattctcacagaatttggttatatcatacattggcagtcatggttaagtgtttgtagagtaagatgctacagttggtgtactttctatgtcagctagaatgtgggtagtaggtctctgtggaataattatgatggtaaagcttttttccctattaataaaacatgtgcccatccctttaacttgagtttacacagttcagttcctgtaactaagaaggaattgatccttaattatcagtttttgtttgtttgatttgttgcagtttctcaatatcttggtgctcaggattaaaagactctgagaattctcagcacatggcacattgatgaactgcacacccagctttcaagatctcattgcaatttgacagattattgttttgacagaagataaatgggcaaacattttcagtagttctgataaatgtattttgtgcttcaaaaggcatttaacctttctccccattgtcagattcatctcatctttgatgtctattaacatgggtggttctgataatcaccttaaaatgccacataatgatttattagcaacctgttttgtgctattacaatgaattttaaagtaacagaaaaatgccttcaaagagattttcatttatctaagggttgcttcccttttattactgattcatttttttttgtcctgagttgcagaatagctcagataaaaaatatttcattgtaaaactgctctctacatagtagatagggaagcttaggacttgtatattttggatagccatggatgtttaaatgattaatatacagtaatgtatattctttctttgaattttatcagaatatctgtgtattttctctagtgcttaagtaggtatgctaatacatttaatttttaaaaataataaaacacacaaatcaaaagctacaatgtaatgtgtggagataaacaatgggaaatatctaagaacactgacagctttagcacaaaatgtacattattttgactgatgactttaaggaatgttcaaaataattttcctagagagcagatagctatgtaatcagcaactaattaaaagtgtaaaatttaagtggtatactataaaatgacttgatagtcttatggaaaaatagatgcctaattaaacttaaaaatgataaaagtcacaataagcacttaaaaataaaacttgtcattcttctgaattggaagattgccttatatctgaagtcagcatgaactatatagtgaaaacctgtttcaaaaatataaataaaatggaaaatgtaagaatattaaaagataagctataacatcagcattttggcaagattgaaaagatagacagagattgatagaataggattcaactgataatttaaatattataatccagaacacagtgaattaagctgtgtaaaacacccaggactccattgctgagatatcagccaaattcctaggactataaagaaaaacacactatgtggcttttgcttcctgaataaaaaaagcaaaatattgaaatcaacgcttcgtattttaacgtgtgtgtgtgtgcgtgggggtgtatacttggtaggtacatggatgtcaagtatacatattgagttcagaggacaatacatgggtgtctggtctctttcctccttctctggagcagaacacagatcatcaggctagtatgtggaagtcttcctgccaagctatgttgccagtcccaagcatttatatattattccagaataattcatttattcattctctcttgcatgaagaaagttaataagaaattatctagaagaaaatctagttgttgttatgaggaaaacactgagcacagagaacattagactgcaatagcttgacataattcatcccatcagttagcaagtgtagattagcacttgtgttcattatctcttgtactggcttgctgatagggctgaaaccattatcacatccactccatggacaaagtcaatactatatcccatagacacatttgattgatgccagaagagatagctaagaacacttatttttattctggaagaatcagttatactcttagcacccatgatgggattatcctcaccaacggaatcagatgccctcttctcatgtctgcaggtaccttctgaaatttagtatatactcacacacagccactcatgtatacataaacttaatatatattaaatattcacaaattttggactcaagtctgatgtttttgaaatattcaaaccatttttgctactattgacattcttagttcatattctcctcatttataaaaaaagatctaatagtacttcctacaaaatgtttcattcacatttactgtcaaatgttatattttagaactaaaaatttttctttaaaaaaagtgaattctgacagcctaacaaagctgcatcatagtgtattcagaaagcagaccagtatataatcattacattcccccaagtgtataagtgtgattggtgagaaagtttatcttttatggagttaataaaaatttcagtaataaaaatgccaaacttacacagagccctatcaccaatgtaacaggaagagtggaagaaatcagagtgcaactgggagatggtatggaaacaaatcacgtccacccatggaaaaagactgatggtttacactaagtccacgggaggctagaggaaagcaaatgtggtttgaatactatacttttgatctcagacttccagagcttagaaaacaacggagccaatgaaagtaaatgtaaatgtatgtatgtatgtatgtatgtatgtatgtatgtatgtatgtatgttcccataaatgtgttaatagattgaattcttttagagaaagccaactaaataattaaattatccagtatggcttcatgtagtagttgaaaagcaaccagtgactcttaagcctgggagtgtaatcctcaacagagagactatgagatggaataatcagtttagtttcttgcattgaggaattaccaaatcatcatttgcaaagtagattcagtggggaaaatgtaatagctaaaccttactgggggaaaattgtaatctaactctatcaaaacctgtgatttaaacttagacatgtagattatagataaatctagaaatcttttaaaaaaacacatgttatactcctaaagtttttgtaataaaagcaaaattttaagactttcagaagaagacaatagttgggaggataaaatattgagcagatttcagcagttatagagaactagaaatcacaatgagtatcacattgcatacacaaggcaatattaattagtggttatttaaatatatgtgtataaacacacaacacacacacacacacacacacacacacacacacacacacacacacacacatatatatatatatatatccttagtttcatatatatatatgaaactaaggaagacatgttgggaggatgggctcgaacattgcgagaagaggctgaggatctatatcataaacatacattgaataaataaataaatactagctctgtcaaaaaataaacatacagtgtattcatacaggtctttcctaaaaattcaaataataaataaaaatatgaagaaactgaagttgttcttgagaacatatgaggaggatgaggtgtggcgaccagagaaggctttaagttgacagcacacagacttggaataagagctgcatccaagaagtgtgcagaaattaaaattaaacatagagaggcaggtggcattgtctgaaaattctaggctgaggaaacaacgagaccacacttggatcatgctgatctccaatttagttttgatcctgaacactttgatgcatcctctatgcctccccccacccaccgtagtcttttcctttagagaaaatgtttaacccctttccaaataccacttttctcaccctagctcccttcctttcctgataatttccttatgttactcttaaagctttctttctcagcatggtcttcaaagtatccctccctgcagatactgaagtttaaatatacaatgtgtatcccctcccccagcatgattattagtttaatctgacttgaaatctgtaagaccctgtcatataatttgccttcttgggatatacctcccctgtgacaaacttttctgccttaattaatttgtcctattttttaagtgtatacaaatgtaaaatctcccaaagcatctttagatctttataaccaacacaggagtctaatcatatagcaatcaactccacaagaagacgagtactgaatttattactgtagcactaataataaaaacccagagacagatattggggttcaagctgaagatcagaaatgcaaagcagccaaaccaccagatagctcttagttctctcaaggctggagcaatcctgtccttaatgtgttgggagacaaattgccaggttataaaaccatgctcctaccttatatacctctctagtgctaagattaaaggcatgagctctgtttctgttttagccggattcactctcatgtagcccctggtggccccgaattcacagatatccagctgcctctgtctcctgattcctgggattaaagttgtgtgccaccactgctggtctcaatggctgactagtgtatctggctttgcattctgattttcagtagctttactagatcataaacagtatatcaacatattactctctataaaagaaaagtctacattcaatattatttctttcaatatcattatccaagcaaaaattatgtcattctaagatgtcagatcagataagtaaacacaaaagaataaagtgttagtagatgaatcattctcaatgaagacattagaaactgatgcctctagatagccatattaaatgtgtgcaaatgagagggattgtaaaattaatgtaaaacatggagtgttttaataaatcctagtgatttattaaattcactcatgcaaatttgtgatttcatggaaagaatgaaatttagttttcaactgaagtgtagtatcttatgtgacattaaaagaaaacttaatagaatggattttactatctgtggaatatacagagagtattaatgaaattcatacaaacatatgtgtgtctctctgtgtgtctgtctctgtgtttgtatgtgtctgtatgtgtgtatatgagtgtatctatgtgtctgtatgtgtgtatgtgtaagtgtgtctgtgtgtaaactcacaaaataaaggacagacgattatgattaaataacaagatgtataagaaaccaatgaagggactggagagatggctcagcaaataagaggactggctgtttttgcagagtttgatttgattcccagcacaaacatggcagctcacagctgcctaactctggttctaggggatgtgatactttctttccaccttcataaggaaccccacaaacagatggtgaacagactcacaagcaggaaaaacatccataaaataaaaataaagattaaaaaacagaaatgtgacagactatcaaaaggtttaacaaccacattttttctcccacaagaaaaatagtcaaaacctatctgaaaatggtatttgcagaagcactattttatggactttaaaagaagtttcgtaaggtccatgtcagttcaatgtgtgatatgtgattgtattgtcatctctaatctcatttctagggatcataatgagtgaggagttgtggtttgagtggacatgaaccacacaggctgctgaagatatctgggagtttgtggagtatttattcagtgtagtatttgctgaagaagtgggtcacttgggattgccttaaggtagtgagcccagacagactccctggtctcttttagcttctggcttgtacatagaatatgacctacaggccttccaatccttccacaatgtcttctctgccatgatggaaaccatcttccaaatgaaagccatagtcattcttcctttctgaatctgctgcctgtctgtcattatgtccagaaaggagaaaagtaactggtgtatattttagttaaggatgcccattttttctatatttgtacttgcataggcaataacagtctgaaaatatggacaattcaagaaatacattgtaagttttaagctgtgaactattcaaattctgtacagatgtcccctcattctatcctacctaaattgtgaattgatctttgtccagtgtattggctgtgtatatgccagccgccaatcagttacttggggatcattcccagtattaggtgtactattcaagagcacacactgtgctacagaatcccttgctgtgttcaacacttgtcctgaagaacaagagtgatggcagtgatattttgctgtcaccattgctccaacttattgtgtatttcttactgtctagttcataattcctatgttatcacagatatatattactatatatatgttaccatatgtatttatgcaggaaaaaatcaatatacaggaagctttgtactgcccatgtgtggttagtgtcaacattgtgtctgaagatgtaagaagtactcctgtaaatgcaagagcatgctgctttgtcttatccatttttatttgcaataaatttcaccatagtcagaattattctgcagattttggctattcatcattaatgtctagcagaaagcacttaatagagtttttaaaaaattaatgaataagcattatgtttcattatgtggtttcttacttcctttcttagaatatattgtccttaatggtcaaggcaatttgtcttactagttataaaatttctcctctttagttgagtaccttaagcatccagtatctatatatccattcttcaaaaattactttgttttgatagaatgtcaattatttcttgccctttgaactagtctattttgtatccttaaaagtaattcattgtttttcccatttgtctaaatggtgttgtttgggaaaatgcatctcttagctgcttctctagagcctaaaatattaacttgagcacaatagatctcaaccatttcctcttaatgaagtaaagactcccagaaaggaaaatgaagagaaaagtattataagaatgaaatatttccagattagtattcaagggtttaggatttttccctatggattttacaatttcaacaattttccaaaattacctttaaatctaaataaattaaatcacttctgctctaaaggagggctccaaacaaagactctccactttctgtcttgaaattatgtcctagagtgtggattctgtcatatacctgggacatgatattacttctcttttcataagccttgtgcaattcttcaaatgctcacttttattttgaatactgtaaatctagcctggagcgcattccaaggttttaaaggaaatgcttaccaggaaatttgattttgtgttcccttcctccatggaaaaaaatctattcattttccatacacactcctcagtgtcttcagttgaaatatttaaattagtataatttctaatgctgaacctatgtgtttattacttacttacttatttacttaatattttccctaactatgatctttcaatcaaaaagtttgcccttgtcagagataacaattctattttaaacaactggctctggaaatcactgtacacatccaagatttaggatatggtatcctaatgttcaaataactaggattagattaactctaatgtgcttggaaatgtctactaacagggcttaataacaccttgtcagcaaacaaagctgactttgcagatgacactgcctccccatgtcccatctggatctccatctatctcttctcatacctttgcattattttattttaataaggatacctttgcattattttaataagtgaatatccagggattaattagtgggctctgggaagcaaataaagtatcccgtttctcctaaatatatacataaaacaataaaggctttgggattctacacatgatctttctaacatattaagtagaaatagaagccacttataatttctcactgatatcaattttgccaaaatgtttagaaaatatatgaataaatctaacttaattggcagaacaagaaaactatactccattttaaaagattcatttcatttttatttgtatgtgtgtgtttccatgtaaatatgaggattgtgtatataggcccttggtgtcctgaaactgccttccaggactggagtatagattagtctagatatccccatataagtgtgggagatgatagtatattgtgtgcttctggattctgtcaagttgccaatcaatattcattactacactataattttctgtccaaagcagttgaggaagaatgcctcagctatgtctgtgcctgaggataccaacttttgaaatgttcagtgctagctagtggctgtggtatgaactcctttaggatgtggcaattttctcagttgcaggctttcttagttcagtgactgttagtggtggtgttgagctggtgattcagatgagctgtttacctcatctatatatacctatgcaatgagcatagcaaaagatgcctttcagatatataaaaacagcttactcaggatccacactatactcatgattgcaaataataacaagaactcagtaacatcattcagtcaagattaccagacataggtctacaatgccctgatgcccagtagacagtatataagcagacagcaaaacaatgctctgctctgcacaacttgtcactgggaaacaagcatgatccagaccccgtgaatgtgggtgtcagtgaggaggccttggaaatctatggggcctcttgtagtagatcagtacttagccccagcataggaatggaatttgggaccccatttcacatagagggacactccctcagcctagacacagggggagggcttagaccctatcccaaagatacaacagactctgaagatccccatggaagacctcactctacctggcgagcagaaatggtatgggataggtaggttatttgtgggggtaggggtataggggatgaagagagaactgggattgacatgtaaaacaatcttgtttctaatttaaataaaaaatatataaaaaggaaaaaagtgagtatgcttcttgtctccacttataagtcctcatgtagcatcgcagatcatgcctaaaatgattggttctccaacagctattggatgaatgaattccccccaaaattaccctgttttctaaataagagggttctaaagttaatacaaaactattcacaataaggaaattagcaaataagtattatttcaatagttgtcctagtccctaaagtgtcttagctaagttatgagaggaaagtagctgtgactatatagtctttaaccccatcaaagaccagaaggaaaaatgatattgcctgagtaactaggaagtacaagcaagtgacttccaaacatatcacatggatagtcatgtgtgaagttaattatggatcatatttcctgaggtggaacagctgtgacatttctcctagagttgcatgaggaactgaacagccaagagaatagtaataaggacagatcttaaatttgaaaaactgttgaatcaggcctactctgccaacaaaataaattagtacttaaaataatgagaagtcaaattcctctattatttggcaatctaattgacaaaatgaagagtttaagaggagttaagaaaatgaatgtaaattacaagaactatcccaggggtagatgggacaaaacattttgcttattacaacaaaagttacctaggctcaagaaggaacctaaggttgatattccattgtttcattttttaaccccagtggttgttgagctcttgtcagataatgctgatccctcagaggtactggtgttctaatgaaaattgactcagataatgtgaaaggcaaacacctaaatggtagcttggcagaatgatggagaaaaaactctttcagagaggacttggaggcacctgataatggcccagtcatatgcctcaatgaaaaaaggatatatctatcagtaactgccagtaaggttaagtcattcaacaagtaatactcatgtgaccaccgaggtagcatccagaccaaatataaggacagagcttcagcagatagataagattttgctcaaagaggagataaagatgcatcctctgaagcctgcttgtagcaaaaggcagctgatacagtaatgctaatctcagtgaaaatgaagagaatctaaaagatccccatacatttgaagatctggaatgaattttagatatagtcagaggagaaacctacccaccattaattggattgggcaatggctgcaatgaatcagtctttacctatactttatctaaatcaatttgtggtggaaagacaatggaaaaatatgaaagaaccaattgaactgactagaaactgggtataatttacttaatttgccataacagcccaacaccacaggtgtcacctcttctccctgatatgagaaaaattctcattgacattaactctggccaattgccaaactgttggagaagatgttaacttcttcaagcagactaggaaactagagacagataggataatatttttccagtctaatgtacagaatctaaccaaagcagcaccatggaaaatgtcacctaaactgtggccatttaggaagaggttgtgcagcactacaacccagacacaattccacactctgcagaaaacccaggacataaaaccattgggaagataaggtcatatactaataagacaccagtaaggtggacccagaaacattccttggcagattggacaaccctggaatcaaggaaagactccaggtccttctagcaaccatcagcaaagatcagggtccaacaaataaattgtctgataagtatacagagagtgatttgacaatttacaacatttacccagtctgacaaaccccccaaaagtatgtaattatggaagaagtagcaggaaaactttttaaagtagtactataaaatacatgattattagtccatagcttatctctaaatattcccacattatttatactagcacctaattgtgtcctggggatggatattccacccaaattacttctctaatggaattacattaaaaaccttaaactcttgggctgtagcattacccaagcccaaattcttcctatagagttccctaaaattaagggatcatttacaaagcaataccctattatgaaaggtgatgaaccaatcaatgacacataaataaattattgaaggaagatattactgaaccaataaaaaccttcaacttcagtagttttgtttggtcagtaaagaagccaaacagtcaaaggagattcacaatagattataggaactttaatcatttttctcccccaaataccaggaaatttacctaatgtagaagatacatttttaaagattacaaatggtaacacaaaattctttggcaccatatacttatcagacatgttctttagcatactacttcatgtggatctagagacattactatttttacctggaataataaacaatatatattcaaaagagtgcttcaagactataagaatagcccaataattggtcatgtgacactaaggtggtcactggaaagactacttaaattatattgcttacttttaagctatgtagatgatattttgattatataattcaataaggatggtgtttaaaactatatggagacagtaattgataccctggtacatggtggctggaccattaataaacacaagaagagaggtccagatacctaaacaaaaattttaggtgtgttacagatatctgaaggaatcaaggtccccaatagtgtattgcatgagattttaaatgtctagcctttcagggacgaaactcagatgtaactcccaattggtaggtttgcatatttaaagagttacataccatacttatatattattatgaaacccctttgtgtggttactagaaaggcagctgatttccagtgcagacaggaatgaagaaaagcttttgagatacactggaagctcatctctgagtatgccaccatgaacaatattaaatcaaatgctaccctaattatgaataccatattcattattgaactggggattcttcataaagcagaaggaagtcaaccaacaacttcctgttgacttctattgaaattacttcccttatgtggacaataaatactctctctttgagataaaatctggaccacagacccctacacccagtcagctccttatggtcataaagatacccattccaatgatggattggatctgctagaaggcagtgtcattcatagagttagtcacaaaatgaaagaaattaaagtggaaattgtatctatctggattccttcatgattagaatgtggtagaaacggtgtctgtgtcttatcatattgaagaaatagctcagttacctataatccccacccctaagccactatcccctctcaaaaagaggcacctattggactgtaggggccaatagaatggtcacagatttttgcctacatatagtttactattggttcatcaaccactgttggaacctaaactaaatagaaagtggcagcctacaaatcataggatgaaatgtctattgctgaggaaggaaccaccaaatcagcatgacatgctgtaataataacaacactattggctaaaatacaaagagctaaggaagacaaaaggaaaatctgcatcttctctaattcatggtacctgcaaaattgtatagctatttggtaattaaaatggaaaaccaactggcaggtaaatgacaaagatatttggtcaaggaaggcatggatagaagtgtagcaaagaaatcaaaattgatgtagctgatgtagacacccacagaagcaagacaaacaagacatccaaacataatgaaatagcagacaaattgctctattcaattaaggctagaatattaaatttttctagggagcaaattaggaacaaatcagcaagaatggtagatcacatagtttgtaaacttgaaagattaccccaacactaaaaaaaagagtagaaatggagtactaaattaaaccaggactatcctatgaaaatgactattaaaagtaacccagacaggaagactaagaaacctgagagctgggcattggtggtgcatgcctttaatcccaccactcaggaggcagaggcaggcagatctctgtgtgtttgaggccagcctggtctccagagagagtgccaggataggctccaaagctacacagagaaaccctgtatcgaaaaaaacaaacaaacaaacaaaaaaacctgagagtgttagcacaactattaagcaataaatctcaggattacaaaaaacattggtgcttataggcatacatactttgttcctgtagtttgagaaaaggaaccttcaggtttaatgacaggtctataaacaggccactggagactgccacctttatccagtacttaaaactacattcagacatcaagtgccagctataacatagtctcctaagcagtgtaattataacctacacatagatttcattggtcccttgaatactcacaggatcctatattcctgtactcttgtagatgtaagtgagggcttgtgttagccatagaaagtcatagaccacaacaattggcaaaatacacacatcctgatgttggatagtcagatgtggcagcccaataataactgagtcagatcaaggaacacacttcacattatctaaagttcaaaggtggttcctttgtatagaatacaatgggacttcaatccagcatataacccaactgcagttgacaatatagaaagatgagatgtactgtgtaaaaccaattcattacaactctaagacaccacttaaataaaggttatggaattacattctatctgtaaaatattagaccaagatcaagtagaatttctccctcagaagaagctattaaatcagactttaagctaaagcaaccaccagatatttctagaccatgcagaataattccccatgaatgtatttatagggacaggaaacatgagacaaagaatacaggaacgtgacacctagatctggcaatataatcttggaccacaaatgagaagggaaatatgaaccttagaaaattagataatctacaagcataatgtgcttaggataccttacaatacattcagttttcactttcatgacgatagtaatagttttaggattaattatgatattggtgatttaccctatcatactttggatggattttaaccagaatacttctatcatgaacacttcttgctaagcctcatctatgttatagctattgtgttgaacagaggaaggctaatgccaattttgtaccaattttgagagacatagtcactattctccaacagcaagctaaaacatccaaatttaaagaaagagaccaattgaaatgccatttaacacaaatttggatcaatatcacagaagcagcatacatctacaatttccactggagaacaatatgttctgaaatcatccttccaccttataatgaacaacagggagaataagatttgaaataaaagacatggaagactccactttcactgtaattagcagcaaaaacaaatttcctctcagaagtctttccctctacatatggcagatgaaccctgtgtttggctaacaggattgaaaatgaaaatatataattatccagattgggaccagaatgaggagacaggttacttgacttacaagacatcaacacccaccacaacaaaccatgtcaacccctggtattggagaactgtaaatttgacccagacatggataagtgaacaccatgaaagcattttctctattggaacacagtggcaccaccatatggatcaaatgcccagttcactttctaaactatattcagtattgtgcgtgaccaaatttcccaacctaccctaatatgaaaagatggacatataaaataaccacttaatatggaaggcagaaaatttgcacttactattgactggcttgaaaaagcattcaggataaaaattatacatttccattcgttttgactaacctcccgccacaacccttcacatcttatgaaactgaagctccatcaactgagaagagccatgtatatacctaaatactctgtgtgtacatggtgttataaagacttcaggttatacaatagcatagtcaataatattttatatagccacatcctataccccactaaagttttgatgcaacaggcctcaaccactgagatagaatctctgggatccaaattgaactaatgtactgactattgttaccttttgcatgttgaacaacccttcaacacaatcacccaattgacactgtacatgtgaaggcaaaactattcaaattgagttgtagtccattaagggctctaactttcactggaccaccacaatacaaggcttaatataccactaacaaatccacatgtctaaattttggaaaaaaattcagagtaacctaattgatctatcagtcttttttcatataccactccagaagatttacaactttataatacattacagacccattttaaggagaattatgaaatcaaaggaactatggagtccactaattagcagtaatacactagaacctatctttataacaaaaatatgcttgacaaattagaaagaatttttggagctgtgataccatgcccacactctatgacagtgaaatgttagacttcccaattcctctgcatatacatgccagggactctacatacttttttttttcctgcacagaatatggaacattgattcccagtctgatgaattcccatccttgattatatcatcttccaaaatgtttgcatcagtccaagaatagatatgatattaattttaatcagaggatgccctagagcctatgactccttactgctaaggtataacattttaataaatgaccacagaaacttacattggtcaaaaactgcaggtttggacctttctaaactggagcctgtggaaacataccatggctttccaattatttctaaatgattcttcaaccaccacacctcaaggaatgaggcactggagacttgctgacccataagaccatactcaatatatcacatgcagggactctgaatagaggactcctatttgatgaggcatatatgttccccataatgtagaaatcctgtggaatcaaagaatgcagcacaacctcatgcatcattgatagagaagaatgggaagagaaaaaatgctataaagagcatttgtcaacctccacactgtacttccccagcaatgattaccagagagaccatggtgatacctgaaaacttatagttactcctaggatccagaagatctcatttacttttaacctaaaatcatggctcctccctgaagaactctgctatgagccagaatttagaataccagtcttgtcctacttttaggataatagtttgctgcataaaagatgtatacaattgatgactgctggagctattttggttgcctctttactctgaactgtcattctgttcattcagacatcaatgaaaatataacagacatcagaaatgttactaaacatcaagcattttctattaatgtgttgtctgatggattagttactcttcacaaacagattacaccccttcacatgaactaaatgtattaaagcaatcattggcagacatgacaaatatatagctgaaaacttgcagagactggatatagccaataagatctgtcaaaattatctgccataacttattccaaggaacagcaaagagaagaatgtaaccaaagaagacttgcttttcaatgagtggaggcatacctgcctcagcacttttctacaggattttgaacagaaaatgagttctataagactcaactggaaacaaggaaaacctcttggtgtgagcgtggattctataaagtaagttttcttttattctataatgacaatgcaatgcaagattataacacatacctcacttggggatggatttatattacccaccgaatctttcctatatactagttggactaatacagaagatgtctacaacctacagcatcataccatctcacttcaggtcaatacctttgtggcaatccatactctgtcaaatgaactccaaatgtcagaactaacactttcatttgttgcaaactaactcagagaccttgacaatggagtcttttctacacactctaggtaggccttcaacctcagagttgatatctataacattatcatggatagcttggactctactttttattctgcaaaatctgattgaatggctatataaaatgctactaaagttacagttcacttctaggaacaggtaaatatatgcaaaatctctaccctaactttttaacagaggtgtgtttttgactcaggttcccaacataataatgagcataaagatgacttgctaggaaagccattttgacatttccagtgttctctcctttaacaaaccacaattacagtcagtggattgtgtgattcctagggatattaagatccggggaggacagataaacagagttcaacatttatcagcagcactcaaagcagatactactgcctatatccataaagttaccaaccttaaaaaaatgctctttatcactgctttcaaagtgtctcataagtttgggtatgttgtgtctacattctcattgaattctaggaaatctttaatttctttttttatttcttccttgacccaagaattgtgcaattgggtgttacttaatttccatgagtttgtaggttttctgccatttttgttgttgttgaattcttactttaaagcatggtggtctgataagatacagggggttattttaattttttgtacctgttaaggtttgctatgttgccgagtatgtggtcgattttagagaaggttccatgtggtgctgagaagcaggtatattcttttgtgtttggatggaatattctatagatgtctgttaagcccaattaggccataacttctattagttcctttgtttctttgttaagtttctgtctggtgttcctgtccactgtgagagtggggtgttgaagtctcccactataagtgtgtgcggttttatgtgtgatttgagttttagtaatgtttcttttatgaacatggatgcctttgtatttggggcatagatgttcagaagtgagacttcatcttgatgaatttctcctgtgatgagtaggaagtgacctccttcatctcttcgattgattttagtttaaagttcaatttgttggatattaggattgctaccccacccctttcttggatccatttgatgggtcaatcttttcccaacctttaattcttaggcaccatctgtcttggaagttgaggagtgtttttttgtatgaagggtaggatggaatctgtcttcttatccattctgctaacctgtgtcttttcatgggcaagttaagaccattaatattgagggatattaatgaccattgattgtccattcttgtttgttttggatttggtggtggtggtgaaattatgtgtggatttccaacccttttatcttttggttcttggtaaagtgtgattatcaattgcctatatttttctggttgtatttaacttccttgggttgcagttttccttccagaactttctgtaggactggatttgtggatatgtattgtttgaatcctgttttgtcatggaatatcttgttttctccatctatattgattgaaagcattgctgggtattgtagtctgggctggcatccatggtctttgtttctaatgacacctgaggaacctggatttctgggttaacagcctgtaaccagtcatttcccagtgaaacatatcacatggttaatcatgtgtgatgaggataatcatgtataatcaatacttccatagttccttgtattatttcagcaaacccataagaataaaaacactggagataccttcatatccttacaatgccatacataatgcttgttgtattccttttaaaaatattttaattgtttattgttttgtttatttttttctttaaggcaaggccttgttgctgtcattaaattctcatatttctacctcaaaatacagtcctttaagggctaagacattgaacccttctagtttattttcctaatgctttctgagttattggccacatataagcacattttctattttatgaaatatttcagtttccttagtaaaaattcttctgctgtgcagatttccggattatggttccttcaaggaaattgggactaccacgctcttggagaggataatattacatattaatattatggtaaatggaaatattaatataacatggaatggggcactgctttaataagtgctagcactacactccctattgtccatgtagaacttgttggttacattataaagaccacatcttcttgctggttggtgcagctatgggttgtctagtcattgtcccccatgtgcttctacaggtttctctgctccaaaaaaaaaaaagctaatgaacacattcctgccctgaaagtaattttttttcatttttaatctaattatttctaaattaggttgaaatttgttatagcttgctagcagatgttgacagatctagctttataatttgactttttgatcagcacaaaatatttactagttaataaatgttataaaaagccttactttattgtaaagggttttacatcagttgatgcaaatatctggtgtttggtgcaattttttgtgtgttgcaaaaaatttcttttaaacaaatacaaactcaactggctaagttcattattttaaataatatcatggtaagtctgataaaccataattagaggcattattaaacaatttacattgggtctgcctctcctctttaaaattaagactacaaactagtaggtttcattttcaaatgagcacacatacatgccatgagcttctctcatattagtgcctcctctttcatctccctctcactttctctcactgaccacggaaaacaggagggactatttaggggaaagaaagaatggtaacaatatgtcttttttgtaatactatttggcattttctagatgctcacaatgctctctgttttgctggtattgtcagcatatacagattttgttctacaattgccatttttttctggagaggaatataagtccttccctactaagagaccttcatcctctgcccagcttcatcctttgcccagctcatgctcattatgttagtgaacaacttgagaaaaaaaaaaaacaaaaacttcatgactgagcaatagctttgccccatgccatgttctggggcagacaggactcattccaatgcagctgggatttctagcctgaggcccgtgagaggactccaggctccaggtaccaggcatttaggcctaactgtatggtaagcaagtatggcgtggggaggttaaatagagagagaggggaagaggttcatgggctaagaagagttgtggacctgaaaaggtgaaggtgatgaggaatgggcagacatgaaaagctacttgccacccaaattcaaggtgatgtctgggtctgaactagcaaagagccaaatcttggaccagaacccgaaagcagctgaggggtcttgagaagaggtctatagctcctattgctaccaagggctatgcaggggcctatagtatgagctgctatatgtggtcatgttggtgtccaaggaccatgctgctctgaaggccatgccaatcagagtggtttgtgtgctctcacctatggcatgggtacatctggacatgtgctgagagtcatgtctgggtccatggccctactgcagctaggatctgcattgatgtctatttctccttgtatcactgagggccaagccaatgatgggtggtctgtgggattcactgcagtgggggccatgccaaacctgtttgggctgcatctagtgccatggtttcatccatgcctgaactgcttgcttagaccctgtctggatctgcggttctttcacagcctgggcctatattaatgtctgtgttcaatgttgccaccaaaggccacagggatgacagagatgcagtccataatcagtggcatgtgggtgtccaatggctatgcagccatcagggcaaagttgctctgaatggccttatgctatcacttgggaccgcagtgtcatctgcaactggactgctactgatgaccatgtctgggtccaagaccctactgcagccagagtcaaattgatatttgtgtctcttggtgccaccaagggctgtgcagatgccttggtcagccacctgagaccaagctggtgtatgaagaccatttcactgcaggggccatacttaactgggagggagggatgaggaggggtgacaatgggggaaagctcacaggttgactagtccagctgacatccaagcccaggactggggctgtgagttagtctaccccaacatgcatctcatctatgaattgttggagcataaaaggaggacaaacctgcggatccaaggcatcatgatctccaggacacaggacaacagcaggatgtccagataagacccaatgatagtccattgtctatgttatgacaaagtacagaggcctcagaccagaggaatgactcaggcaatgatgcttgcaagtgaagatgaaagggtaaaatgtgtatgtgactcacctggtcatcacctcagcctctcagcttcaaaaggcttcttcttcttcttcttcttcttcttcttcttcttcttcttcttcttcttcttcttcttcttcttcttcttcctcctctcttcttcatctcctactcatttgcctcctcttttttctgcttctttttcttttcctcctcctcttcttcttttctttctggttctgctttgttttgctgtgtttcttgttaggttttggtttcactttcaaattttgttttgttttgagtggtaaggttgcaatgtcaaatggagtgtggatgggtaatgggctgaatcagaatgaatgatatgaaaaccacagagaatcaataaaagttaataaaattaaaacaatgtgaaaaacttaaaaatatacctcatgatcaatatatttcagaataagattttggcataaagtatccttccttcatacatgaaataatttgtagttatttgttatctaatgtccattttattatgtagcacccctgaagatcaggtttatctgagaatagatttgcactatgctgaaattctgtctggtggaagctgtataatgaaaatgttatcaagaaaccattctttgcatgcagaggtcatgagggagcagaaaggttgagtcaggtgaagaatagaagaaagggtatgtgataggtagggttttagttttgggggcagggaaggacaggagggagaagggaacccagattgtcatgtaaatcaatcttgtttctttttcaaattttaaaaaaaaagataaaaaaaagaaaccaatctttcttccannnnnnnnnnnnnnnnnnnntctttctgggatttctgaggagagtggtgtatgaatctgtcattgaccttgggatctaaagtagactaatgaaatattggatgctctctgtgatcagccttcaataacttatgggggatgtccttctgtgtcatgaatactttgtcttattggttgatgaataaagctgttttggccaatgaacagaaagtatgtagccacacagaaagtacatatgtggggctaccagactaggagaatgctaggaagaggaacacagagagtgagttgccagaaaaattccttgtagctggtgagagacaagaggcttggaattgctggtaaaccaagaccatatggagatacccaggttaataaaaatgtgttaataattcaaatagagctagccaataagaaacctgaggcataggcctaacagtttataattagtaaaagccccatgtgtgtttatttggtactaaatagccaagggaccaggcaggacaaaaacctcatacaacaaataactgtgtcagtgatacaattgtgataaacatgagcctaaaacactactcaaaatcatataaatctttacccatgaaggcactaactgcacatacaggaaggtaccttgagacctaacacatatttcaatgtgtcttcaaaatgtatgtccttttgtttcaactataaatgtatgacacatgctgagcatcctcagaagtattctttgggacctttaaataggtgttctatggctgtgagataaatctggccaaaaaatgtgtttgtcgtcatttattgtcacattgttgctctactgagtatgctcacaaatgtgcccaaccttcaagtgctttcccacatgaaatgtggcatctagatttgtttccccagcccacttttacaagaaacatggcactggaaattgtgccttcactgtcattatcagctataaggaactgatctttctatactctctttagcttttgtcaatgttttcttctaaacaaggtatgaacctatgggttctggttacaaacagagacttgagaatttgttatgagctgagtgttctgttttcatcataagcttacccacttctttgagcttttaaaaaggatggactagcttcttatatatagctataatttattaaaacaaaagattctcctctatcattttatccttacacattttctttcaattgaaaaatgtagtattgtacatctttctttttggttattatcaacattactaattgtagagctaagaaacttcttcttaggtcagaactcaaagctcccatttatcaatttttttaactaaacctgacccttatcatcctctttcttgccagtacctccaatatcattctttcagcagggcttgtagttgctgttgatttgggttgaacttacagcaaaaaaaaaaaaatagtctttttagatcaataaatctgctctaacaaattcagctaatcatttttctttactttaaaacttttaccatgatgcaagtactgagtaatttattaaccaatattttaattttnnnnnnnnnnnnnnnnnnnnnnnnnnnnnnnnnnnnnnnnnnnnnntatgaagatatttttatcataatttctgtattttgtagtatatttgagtcatatgtacacatatatacacaggtatatattttcacacacctgagagagaaactgctaattgagcataattcttgcttaatataaataaaatttttcattcataatatttgaaatatcgttcttagaaaaacagactatgatttcttaaattctaagaacaactaaaatccctttgactttttaaaggagtcttccaacatgggttgacaccacactgtgttagcaaagtgtatctacagtcttcattacgttacttctttggagaattttgaaaggacaaaaacatcacagtgtgccatgtagaatttgggacagagtataaacatatatttctgtcactattactgcctgcatgaagcagtgcatttttgcacactaatagcaaagagatggatgtcaatgaggaggcctctgcattgtaggggacccctggtagtggattagtaattttgctcggtgtaagaagagacttggaaaacccatctcacctgaagggttgcattcttggcctagacacatgggggatggcctaggcccagcccaggatgatgtggtggactttggagagtccccatggagggcactaccctgcctggggagtggaaggtggatggggtgggggtaggttgggggttcaggagatgggtgggggaaggggaggagagacagacgggactgacatgtgaaacaagcttgttccttatttgatctaaaaaaaagaaaataaaaaaaatttttttacaatagctttagatgcttgtgtgacataaaatattccagtcttcttttctctttctcatactgtgttgcatatggaaccctagttagataataccataatgagaaaataacaaaaaaaaaaaggacaggtaaaataaaaagagggtagtggagaagaataaaaaaacaattatatttatctactactaaaatatacagatgcattgaaatctttgcactaatgtcttaatcatcacaattgtccagatgcatttcatacatagtatgattatgttggagaggcctaatgacttttccagtatcaaagaccagaggcagagtgagtcacagaattcactttgtacctttgttccttcttgtataatcatgacactttctatatccagtctcagtataactgtataacgaggatactacttcaacataacttgggatgcatgaatataaaagttgaccacacctattttttctcatttcactgttttcaaattctaaacttcaatagatgaaatgtgttttcttaatcaagaattttcagaattctatgaaaaaatgaccatgaaaacagccagtggttactataaagttgtaaagctgaaaatatcatattctgacaaagactattctttattttagagcaattttgatccactctctgagatattacaattccctttcttatgtataatactttaaaatttcttttaaatgcaaaattgaatactatgatccccttaatgtaaaattataattacataataaactttaacaatctacatgtagctaatctgcattattgttattatagaacctcagatttgttctgtatatggcctcttatacagtgaaaacttaaggtaattcattaattctcacaatttggaggtaacttgatttgttttataatgtattcttaattaatgtgttttaatgaaaaagcctatgtttgaaggtattgcctaacacaacatcttctgtgtattgttgtcagttctgtgtttatttcctatgcctttgtattaatgatatctgcatgatgcctacaattaccaccaatgtactctcacattgccatttaaatgtttcatgtattatactcccaccattccctcataaacacatgttgtaacagatgggccaggcttaattatgtcagtttagcaaaagaagaaagtgaagctcaaggaaatagaatgtttattaagaattcttcaattattaagttatggaactggaatcagaattgggtccttttgtcaatctgatgaactttcaggtatatggtaccatctgcaagttctcagtttatagagaagtttatcattttgtcaagtactttttgcccataacagaagtattattgtataataaaggttttaaaaataggagttttcataaacaatttgtagtttattttggagacaccagtaccctactcttgaatgacaagtgactatgactatggccaataatatcaaatagctgacatgtttcatttagaaggaaaaatttctacctattccgacatccatacccagaacctaaatggggatgtgctgagtatgttcagaatgactgcaaccctttgtttttataattaatttaatatccactccaaagcataagcaactagttggcagctaacaaatttactgaaggagtttgagatttcatttgtatcctaagtgttttatcaaaattctgaagcaacattcaatgcctaagagaggcactcatctacataactagcagcaatatgtccataggtgtaattttattaatatattctttagctaaataatagcagtagttttccccttaggaccaatgacttttctagttgcagtgtcatgttctatctcacagaatctgcttaaaatccaatcaagatgtagttactttctcccataatatttgtgccactattgtaccagtatgccaacaggttactgttatagattgcaaggtttgtaggtacgtgatatggatgagcatttttctctttccaatagtatacaaagtgccttcaggccaccatgaatgtaactcaacagtggtgaagcttcttgttgggtactagttcatttcgtatgtgttcaatgacataagttgtgtctttagtaatagggtctgactatcaattaacaaaagtaaattaacacgtcaaaaatttttaaggattatcctgattttagactatagatacagtctgatttatgttataaatactatgggttttgtgatggctttcataagaatgggccccataagatcatatatttgaacatttgattgtcatttagtggactatttaaggaggattaggaggtatgacttggaggaggtatatgactaggggtgggctctgaattttaatagcccaatccagtcccagtaatctctcttcctccattttacagataagatgaaagctctaagatacttttctagcaccatgtttgccctcttacctacctgccatgttttccaccataatgataatgtactagccctctgaaagtgtaagcaattaaggtagtcactaatctgattaaaggggaaggtccattcagataccctctccaatattactaagagtcttagctggggtaatccttgtggattcctggaggtttccctggcaccaggtttttccctcaacccataatggctcttcctatcaagatatgtctttcaatgctctcaccctctgcccctcctccaacttggtcatagaacttacagccagtaactgatagaagcagatgcagtgatccatggccaagaagtggggtgaattcctagagttcagttgaagagacggaggagggttcatatgaacaaggggagattcacaagcataatcatggagacatctgaccagcactagtgggagctcactgactctgaactgactgctggggaacctttatgcaacaaaacccagattcagagggcctctgaatctgggtgatagttatgaggattgatctgatggggagacaggttcaggtagtaggaccagagcctatcctgagtgcatgaactggatatttggagcccattcttaatggtgggatgccttgctcagcattgatacaggaaggaaggtattggtcctgcctcatctttctgtgccagattttgttgactctgaaggaagtccttaccttctctgagaagtgtatgagggtgggaaaaggggagtgggggacgagagaaggggagggagggagaaattagggtggtatgacaaatgaaaaaaacttttaagtaaaaatcaaatgaacacagaaaaaggtgtaaacatgcccttcaattaaatgatttcttttataatctaccttggacatggtgttttttgatagaacagcaactaggacatttggtgccagggacttgggtaatgctgtgtcaggtcagaccatgcggttgatagaataatgtggaagatttgggaattttgaactagaaaagccattacatgctgtaagtagggcttaatgggacatcctagtaggatcacagaagactgcagtgatgaaagaacaattctcaactttatatagaaaaacaaacgtctaaggataggcaaaaaaaaaaaaacctataaaataaaggaatgtccagagacatcaccatccctgacttcaagctctattgtacaactatagtcctgaaaacagcttggtagtggaataaaaatagacaggtagacaaatgtaatagaattgaaaaccctgatattaaaccaaacacctatgaacatctgatttttgacaaagaaactaaaattatacaatggaaaaaagaaaacatcttcaaaatatggaactggtgcaactggatgctagcatgtagaagactgcagatagatccatatctattgccatgcacaaaacttaagtccaagtggatcaaagacttcatcataaatccagccacactgaaccttttagaagaaaaagtgagtggtaccctcgaacaaattggtttaggagacagcctcctgatcataacacctatagcacagacattgagatagacaataaatgggacctgctgaaactgagaagcttttgtaaggcaaaggacacagtcaacaaaacagcaaagcagcccacagaatgggaaaagatattcaccaatcccacatctgacagagggatgatttgcaaaatatacaaagaactcaagaagctattcacaaaaacaccaactcatccaattaaaaactgaggtacagacataaatagaaaattctcaatgagtaatcttaaatggctgaaagacacataagaaagtattcaaaatccttagccaccagggaaacgcaaatcaaaacaactctgagataccatcttaggcctgtcagaatggctaaaatcaaacaaaccaatgacagcttatgctggagaggatgtggagaatgggaagcactccgttgctggtgggagtgccaacttgaacagccactttggaaatcagtatggagattcctcaggaaaatgggaatcagtctaccaaaagatccaacagttcttctcttatgcttatacccaaatgacacacattggtacaaggacatctgttcaaccatgttcacagcagcattatttctaatagccagaagctggaagcaatctagatgcccctcaactgaagaatagatagagaaaatgtggtacatttacacaacagagtactactcagcagggaaacaatataatcttgaaattcacaggcaaatggatggaactagaagaaaccatcctgagtgaggtaacccagtcacaaaaagacagaaatggtacgtactcactcatgatgggtgatgtccttctgtgtatatgtttgtctcattggttgataaatacagtagtcttgcccaataggaaagcaagatagctgggactagaagtcaaggaggattctgggaaatgtagtaaagaagtctgtgatccagacaggaagtgacatagcaggcagacttagaatataatcagggaattgctcttttgctcttgttcttccttctgttctctgctctggtcaacaccatgtgagcctgtcaagacaggatgcatgctgctggcatcctcggtcagataagtcttataaaatatacagatttatgataattaagactgagctatagccaggtgttggtggcactcacctttaatcccagcactaggcaggcagtggcaggtgagttcaagaccagcctggtctataagagctagttccaggacagcctccaaagccacagagaaaccctgtctctaaaaccaaaagaagaagaagaagaagaagaagaagaagaagaagaagaagtagtagtagtaggtagtaaaaatactgagctagcatataagaaatcctagtcaattggccagcagcatttgaaactaatataaatgtctgggtgatatttggggccctaaagaggcagctggcagtagtgttagaactccatgtaaacttcacaaaagcttaaaaagaaattttagcagcaaaagagcagagacaagcacgattttttgttagcagcattttcttggaaggtctctgttttttctttcagagagatttcctgactcagcctaagtgaaaaaaatgcacttctctttttaaaaggtctggctagctcagtcagtagagcacaagactcttaatgttggttcatgtcccatgcagctggcagtggaagtgaccatatctcaagcccgcagcctgctacttgatggcagcatagataaaggtattgagcacagctctcagtgctgatggtaaacatacctctgccatcttggaaacatagcagctaagaaagtcaccgctttaactttagcagtgttgtttaccagataaaagactgagtgaccatgaaaaggtaaagatttacaataaaaacagatgaagaaaaacctctaaagttttacaatgtgtttaaaaatatatgtaggcttctaagaaaaaaaagaaacaggaagaaaaaaagagtagctgtatgtggtggcacacacctataatcccagcacttgggaggcagaggcaagaagatctctgtgactttaagactagtctggtgtacacagtgaattcaaagacagccaaagttacacagagaaaccctgtctcacaatatgaaaaaataaaagtaaaggtaataaataaatagccacgtaaagatgaaaaatacacaaagaatttggatactgtatgctacattgttgtctttaaattgtttgattgccaaggaagaagcaatagccactaacagatatttgatttatcaatgctgctaaattaatccaacttacatattttaaaaatgctttgacttcaaaacttaagtctaaggacaggctacctggaaaaataatttttgcttttgtttacacagaaaatgaaaagctatggatttcttccagactaatatggtttgatcaagcaataccccctgaagcagtggcctaactgatactacatacaaaatagctgagatgatgcagccatagatgactatggccagatttctgtgttttatcatgatcccagggtatggacatcaccccaaccagcaggaagcagtttggaataaatgatattcaaatattgtttataaatgtttgttttcatttaaatgggtttttttattaatagtaatagtcagtcaatttctttttaaaggaaaaaagggaaataggatatggaggtgaatattttacattggtatagatttttattgaaggatacaaatttaaggtcaattttgtgatatacgtaattaaatgaagattatatagtcaggtataatagtcaaaacatacagttatattagttaggttttctagatatacagaaatgtatttgagatgggtagacattctttaaacctttcaaagacctatagaatatatgacatttaaatggtttaggtttttttcttgatagtgagacacaactgctcctggcacaccaattacatcagaaagaaggatgggtatcaaagaaacttgttatggagtttgcctgcaacatggaaagattagccgtttgggcaagaaactgctcttgcctggactgtttgttgctgtataaactgaacatgcaagacccacaagaaagtgactgctgaacttacaaaacaagatgaacagtcctgaagacttcctgcttcatggaaagttgccagacacactgtggcctatgggctgaagatggatgccccaacattacagagtaactttggatgactgcccaggcagcaagatgtctctgacaattctagagtttatatattattcttctgtggtctttgatggagttgaagacagttatggttatagttttcttcagttattacaaaagacaagttacccttatttttatttagacagaaaagaggaaatgatgggggaggttcttctgtgtatatgtttgtcttattggttgataaataaagtactgttggccaataggaaagcaagataggtgggaataggagtcaggaaggattctgggaaatgtagtaaagaagtccaggcaggaagtaacatagcaggcagactcagaatataagcaggaaattactcctttgctcttgtacttctttctgctctctgctctgatcgacaccatgggagtcccacaagaaaggaaaaacaccgctggtgtcctcgatcagacaagtcttataaaatatatagatttatgataattaagactgagctagcatcttagaaatcctagtcaattggccagcagcatttgcaaataatataagactctgtgtgttacttttgggcggccacatggtagagggaatctggagactggcagaatgatttatcattacaaacttatatatggattttagacctagagcaaagtattactagtctacaatccacactgccagagaagctaggaaacaaggaagacccgaagagagacatacatggtcctctggagaaggggaaagggacaagatgtcctgagctgtttaagagcatgggggaaagggtgagggaagtagaagaaagagaattggagaagaggaggggcgaggaaggcatgagataccaggaatatttagtcaggggaagaatgttaaagagaattctggcactagggaaatatccagagatctccaaggttgaccccaactaacaatctaagttaacaatagttgagaggctactctgataatgagattgatgactaccttatatgccatcttagagccttcatccagtagctgatggaagcagaaacagaaacccacagctaaattctatgcatttacctatgaaaaagaagaggaatctatacaaaataaatgttaatattacaatgtagcatgattaagttctttcgttgttggtccttctaaccctctcaggaatatgaagaacctcaggaatattatctgggaaaggcatcacggtgtatttactagcatattagaattgctataatatttcttattcttgttcctaaaatataatctaagttaattttcagagatatagttatccaatactaccaaattttatagtatgtatttcatgctccacaaagagttatcaaatagaagatcatcagagaaattgagacaatgttattactcctccaagggaactcagtaagagctctgggttgtactagagatcttgaaaaacagttttgaatgaacatttaggagcagaggtgagttaaatattaggctgtttctaatttcctagagcaggctcttgaggcacatcaaaaatatatttgcaaagatttcagtggcaaagaataaatacaaagaattgctcaacgtataaggattgatgtcctagctgtagctgcaatgacttccagaacatttagtgagttacttttatagagagaataactaattcaaagacaagtgcttaattgcaagatttccagtatatatattttcttgtggcggagtaatagctaatttcatggtctgcttatataatgctcataaaatctctatttaaatccacagtgctcagatgtatccaattactgtttctcttacctcttgatttacccagaaatgttacaacaaataagtaaaagaaaacttttcaacaagaatatatgttcagcccaccacagttgtacaaaaacaggataacaaaataaaaatcctttcagaacccataggacataaggcatgataatgtcttctactactatataggaccaggaagtaaggaaacatttgagaaaagaagaaataatgatggttgatacattaaagggatatacgagtcagctaaaatgaatcacaatgacccaaacaggaacaagttgagtgatgaaacaaataattttggattgaattgtaataatacttgggctaaaaaagtttgggttgaattcaaagaacaaaacaaatattcacatatttgttagaaataaataaatagtaaatggtgagtaatgcactagtaattcagaaattatttacatgatgtatctgtcctgactaagaacttaaccttgtatttctagagggtagacatcatatcagggcagtttgacaatcccaaacttctgtccatgacaatatcaaccctgtaagaccaccttgaacactcattgaagtgttatgatctaattccattctatgattgatgtagcaaacttctttggcctcctttgtacttagctcttcagtgatgaaaaatgcaccagacaaacccaaaggaagttcatcttaagaaataaatagctagcaagatcatcagaataaagcaaatctgggaaattgttccagtcaaaaggagcccaaggaacccagggaacacacagtccacagtgcacggagggaaattagagtaacaattgctaagccactgatactgaatcactgtcacaaattctcatgtgtcatccatgaaggcatagtagttactatactatgcagtattctgtaaatccaaagaaggtcttaagagtttagtttaaatggagaatattggctacaagtggtatttttcacagaaatatacacattcgtggtgttaccttccttgagcttcttttgaacggaatataacatgtttatttttctgatgttctcctttatgaaaaataatgactcttgggtcttgtaagcaggtttaacatgaaagtattccttatatctattgcattcagcttaatcatagtgatgtttagctaccatatttctgaaattcaaaaatccatgttctgagactgctacacaaaaaatagtacagtcttctttagttaattttggggtggaacatgtcattaattcctttgcatataatattgatatacagtgtattgtacccttctgtgttttttatgatttggaacatcccttgtttgagtttcaggtgcttctcttattttttgaagtgccactgtgaagaaaaactttatgaaaatattattcatcttacaaaatgcatttatgattttattcccattttgaaattgattagatttacatgtgtggcagtttgtactgtaaatcattttctggcttaaatgatgatttttgttgcaacagtactgaatcagcatttttagtttcaaagaggagttctctcctctaaattttataagaattaaaactttacaagaaggatttattccttcacaggaaaaatgtgtccactctttcaattagaagacacctattaaattcctttgaaagacattggttagttttcattgaggtggaaataattctaatgaaactattttctttgaacaaaagcaatttaaggctttgctttctgtggggagaatgagcaaaagacaagcctttaagaaaatctgtcttgataattaagcatgcaagtgagcatacataattatttaacaagcatgttccagaaaatagaacatttcagactaattgatggaaaaactagaaaatgttaatatctgcagggcacaactgtacatgtatgtgtttctacgaaatattacttttaattatcttcttcatcctggagaaatgtaaagattcagagtttcagtttttctttgtttacatttgccatattattacttctgataataacatttttattagctcttaaaactatgacttttttctaaatccagatttcagactgaaggaatacatggacaagttctttcaatgtgtcacttctataaactgtgtttattgatatagttttgagctgatactaaatgtccagcattgatgctctcttctgagaactacatttacctcaccatgttttaaataatattaagtgaaatggcttattctccctaagcatctattcttgggttgtttggaaatgtgaacctaaggtgtacacaattaaagtcattgagtcctttgctgggatagatgaccttggtttcacaatacagttaaatcgtgtttacctgtggtatatgtaagtgaggcacagtgaaccaccaaattagactactctgtgggtagaaaaaaacaattgattggggaacaaactgaagggctgtctcaaaggaatagaaatcaggtggattttatgtgacaggagagtgggatctttgagctgatggttcagtttgggtaaccaggacctagacatcattgcccaaggcagctgagtcttgggatgtggataaaaaaagtagtggctttcttggtaaacagaaaactgtcttgaaaattcttgagcaatgatgagtttatgtttctgtttacttagtaacaatccttttttaccaggtcagagtccccctgggttatgtataggtagtctgcttagggccctgttaacaggacagtcatttgggatccctgatactgatctaatagtgcatcttcctgttatactggaaggtgttatataggcaccagctcaagaatccagcacatgttgcaaacagaaaacatacctacatacccaatacattaattatcttttctcttttgtttctctggctcactggtacccatcttcttatcagacacaataatttccagcctggttctccaaatctttcttcatctgatcccacaatttatttttctgtcactcatgtttcctaaattctaaatgcttatggaaacatgccaccaactctaaaatcttgtccttgacttctagggatgcttacacaacctagaaaatcaaaaggaaataaaatcatcacaaatatctcaatgcgatctgctgtacagaagtttctgttctgcctggtactgcaaccatttagtaccaagtaaacatacagatggttatattaattataaaatgtttggctaaacagtcaggcttcttattagctggctgactcttaattattaacctatttctattaatctaagtttttccaaattgtcttggcttaccaaagaatgcccaggcatcctgccttcggaatggctacatggcaactcgcttgtggctcttctctgtgtctctcttcccagcattctccaagtctggtagcccctcctaaacttcctgactggctactggtcaatcaacatttattcaccaaccagtacagaaggacatcaatctggagtttcaaatatataaattccattaccctaggatgtgatttgttatctagcactccctgcaagactaaactactggtggaactgtctctgaaatcctgctttcctcaggtttcctccctattctctttttcccaattcccccttggtgtgtcctgtaatgtcttatttcagaattatgtatactcaagaactgatcaagattctacttctggtagatcaagacctcctatgaagctaatttttctctcaagttattcagagtatttccaaggctttggtataggtcccttttacttaaatggagagcacacttttttttcctgccctttgcttgcaaagaaaatttagacagaatagactcttacccaaatattgtcagtagagcctgaacattccaacttgacaattgtgagggtgatattattataaaatttgcaccgtctactctagtagaactggagtatgtgaccaaatgctgacatttgagttatttccagcagttatatttaatttaaaatttacttatttaaaactatgcttgaactttgaactttaacatatatcttaacttcaaaagtcacaaaattttataatctattgttaacttgcttagatgatcactactttcaactttcttatatgctgatcttgcaatatactatgtttctcttttctctatttaagaaaaatgatcttcatcacaaggactcatcctgaaattcctttctgtgacataatccaaatttctcactcataccaaggtgtaaatccctaagtttggaaagatcctcaggctacagcctatgaatgtcagtcactgtgacaggaaagacttcatcttgtcttctcttctgcacaatgccacatggttcttttttgctattttgtaacttgagaagatgtgtttccctagcaacacatgtattttctggacttttttctctggcttaactagaagataggtctagactcctatgatatgggggtggggtcaatactacagaaaatgtaaactaattcatgtgagcattgcttgagtttaagtctatcagaaagaacaaagggctggctttccctctttgactgtacttccttaaccttttatttacttcccttcttcctccagtcatatctgattcataaagatgatatggtaacagtacccatgggcatgaatagtttactgactgcagcaattggtggcttatggaagggataattattagcaaaaagaaagtacatggtgctgttctctttgtatgggaaaatgttatataaacaagcctcccttcctttcaccatgcttgctctatgataatggaccatgactattcatcccaggcataagtgacttattgttagcatgaattattactattaatttgcttccaacaaggcaagcctctgactcccatgtatcgatagccttctcccaaacaagttatagaagcttcctcgccttaaattaatatgtgagtattttccaaactgcatgcagatgatgcatgatttcattcctgtttaatcccttctcttgttttgtatttacttattctacttatatctttgtggataaaatgcattaaaagtctattatttatttgatcttaaaaactaaagagaatattttctggatgaaaaatatcctgaaatgctcaatttatattaattttcaattttcttttagaatcagcagcaatagtcacatagaggaatccatgccaataatgctgctggttttcacttcaatttcaataggctcttcataaacattaacatgagtcaagaactgcaaggggtgatttaaacagactgcaggatccaaagatatcagaatcctttcttccccttcccccttccccattttctccatctccttgtaatcttattctattccctacataatgacactacctctagtctttagtaaaattgcagtgctgattgtgacaatacttacaggaacatctatttactttaattatagttactgtaagaccagagattctattgcatactctcaggatgtattttctggttatcataatattccagcttctccatatcctcaaagtcacatgaatctgtatttctttgctaggccacacctgtagtagattacaaagcagaaaatagcatgtccttatttccccttcattttgaagaatccatgatcatattttgcaaaatggtgaagacagctgagtctttcacaggcatttcctgactaatttctgcctctcaaataaccttttcctgaaatagaatacattcaagtatttaaagagattatttttgaatcaaattatttttatactaaacatgcaattatagtctttaaattttattccagattttgtagaggattagagaaaataattattttttaaaaacctactcccaacatttaatattttggtgtattttcttcccttttaaagcatttaactattttagtttaatagaagacaaagtattttttaaattcagtctatgtcttagtgaatctgagatttaataaagcatctgtgtgatagtaaaatcactacagtgcaagaatttcttttgtttttgttgttttgcaatgcttttctttaccatgatctcattgaaaagcttgccttgatatccatttgatttcagtgttcccaacttgtagcaggtgttctttatacttaacacaaattcagttttgaatgttctctctttgagttgcactgacattgtttttgacaatttaaatatttcactaaatctctattattgagagtaaagattagaactaagcagatttctagataacatacaagtcttgaatctcaagaaaacacttaaactgggacagtgatttacattatatactgttcttgcagagactggagtatagatcccagtactcaggtcagatactgaaaaccccctgaatttccatctccagagtatctaatgccacttttaggtatctgcaagcacttaacactggtatacactgacacaattataagtaataaaagtaaacacttgaaaatatgttcaaataagtgagagtagaaatatnnnnnnnnnnnnnnnnnnnnnnnnncacaaaagaatatttcagtcatcttcaccatgtgtcagaaaaaaataatctcaaatcaattgctgaacttaaaaagaaggaagagacaacaaatcatgcaaacaaatcaactgaaatcattcaaattatatcaaaagaataagtaacataaaaataacaaaataaatgaaatttaaagccaatattaaaaaactacatctaaaggctggttctttgaagaaaaataaacaggcttctaagcagtttaactaagaacagagagaagagatgaaaattataaatatcaaaaatataaaaattacaaaacagcattgtgtgtcttagatatatgaacaaatttgaaaacatatacaaatgttcagttccttgaagaccaaacctgtaaaaactcacaccaaagaaaaacagctatcctaggaacattattaaatagttgcattagtaatagtcttccaaagaagagcaacaactctagatgacccatagctgaattgccccagatatttaaggaagtattcaagattgtcaaagaaaagctcttgaagctaagtggttggagcaagtttgcttgagaaaaaatatctaggactcttacaagagacacagcatacacttagttgtcgaaatgacaaccatttgtttctctctactttgggggatgggagatactgttttgtgctacaagatcagtttctggcagaggatctgaggctagagttggctacattcttgctgtatctctttcagctaaaaaggtgaggaaggtgtgttgaatctgtccaatagagttatattcttctgttaaaggattctatatgctgtcaatcagacaggcatcataaatgatgcaatggcaatgaggtaaactttgtttcctgttgtgtcagttgtggtggcacatcataaaaataattaccaagatctccccttcctccctgttgtagaaacatgaggggcctaagaatgccctacaatctacttcttcctgataagaaaaaggctacatggtgaccccaaatcttacaatggatgagacacttcttcagaaattgaagaatatggtaaatcgctctaaaaccactggaagaaatagcatgaaagaaaatatatttcaacgattccttgctgatttctactgttagtttggactctgttgtcatttgaatgtaattcctgaatgctcagtcacagagtcacttatatcaaatgaagggcaataatatttatttggttgttacattcagcacatataatagtaagaacttaattaggcaacttcactgcccattgctttactttcagaggtggcatgttgctgttcatacaaagattaaaagtaactttgcttattgctgaaccaaagagaggtgaaaacttcaaaatatgggagaaaaataagaatctctaggccttggtggtcaacaacttttgtcctacaaatcaggaagcagaggtaggtagacctcttatttcaaggccataatagaatacagagtgtgatccatttccaggaaggccagggttacacagagaaactgtgtcttaaaaacaaaacaaaagaattacagccctttttggaagcagagagaatagttcagagtgcagggtatggtccaaggatcagggttgattacagaaataaaacaaaatctttgtggtcacagatcaaaaggatttatagttttagtaagtcttagaataagatcagtaacatttagagaaagagaaaaatctataaatttagctgggtgtggtgacttgcactcataatcctgactcatgaggcactgtggcaggtttgtcatcacactcaggccattctggcctctatgctgtgatactctcaaataaataaataaataaataaataaataaataaataaataaataaaacattcaatgatgtattctctctgtcatcagaacattattgtaactattaatcatgttaggatacagaaaagagttgggcagtggtagtactcgcctttaatcccagtacttgggaggcagaggcaggtggatctctgagttcaaggccaaccttatctactgggtcagttccaggtagacacagctacaaagagaaaccctgtctctaccctccattctcaaaaaatattatcatgaagaaatcttacaatttaaatacaatttaaaaagaaaatgtactgacaacgcattaagagaataataacttccaaaaaagccatagagttcactttgttctggccatctaatcctaggcatgggcctgtccctaggagtcttttatatcctcagtgagactctgttgaagaaaactggatgttttttgcaaatgttttaatttatagtagcctctgggttaggggtggaggcttgtgtctatatccactctcagcactgggaccacaccaacaggccaccttgcatgttgatgcagtctgtgtgagttcctatgttcactggccttttgtgtttagggggccttatttccttggtgttctctatttcctctggctcttacaatctttctgtctcctcccctggaaggttccctgagcactgagggaagtcatttgatagagatatcccatttaggtctgagtattctaaggcctcttactctctatgcattttcagccagtggattactgtatttgttcccatctactgcaggaggaaatttctctcaagatggttgagcaacattgcttatctattggtattgcagaaagtcattaggagtcattttatttctaaattccttttgcaaaacagtagcatttcattttcccataagtccaaggattattttgttcccggtgcttggccatccaagcagtgctggggatggactccatctcttagagtgggccttaaaccccatcaatgtatgttggttacacccacctgctttgtgtcactgttgtaccactgtatttttcagtcaggccacccttttagatcacagggtttgtagctggtttggtgtttacaattctcctctggtaatgtgcagggtattatccagtaccatgaacactactcagtaggggaagatgcactaggtaggaactaattcaacttctccatgttcagtgagttgtgtaggtgttgccctcagcaagagaaccttaccatcagtttgagaagagcaaccaaagttgtgttgcttggtgcttcctttggggcccttctggccaacaactgattagatgggatccattcttggaactggaggcttcatttgatgaaaagaaatatccagttgggcctcctactcctcattatttagcaattcaatttaggttatcttcatgtatgcatgtgccttaggaagcttctaccatgtcaggtttctataaaaacactcaaatggccctttgttttagttgcccctcctactactccaatcacatacccctcttccctgtccatcccatttgatcctctcatccagtcttccacctcccagtctatcaaaaactatctatttattctatttctccttcctacaaagattcatctgtcctgctagttatcttggccattctcattggtataagatgaaatatcaaaatagctttcatttggatttacctgatgactaaagatgttgaacatttcaagtgtttttcagtcatttgagtttctccttttcctaaatctgtttagatctgcaccacatttttaaatccagttacttattttcttgatgtctagctttttctgttctttatatattttagatactaaccctccatcatatatacagatagtaaaagtcttatcccattctgtaatctgctcctttgttccaatggtgggcaatgtcatacaagagcttttgagtttgatgtggttccatttcttttcttaagtcttctttatctggatattctgttcagaaagactttgtctgtgctgatgattttgagactcctcactttctcttctatcagatttggtgtatctggtcttttcttgggatctttggtcctttgagctgaggatcagattagagagaggagaaatacttaggtttacaaatattgtaaaccaaacagtggctagtatctataaaataattacccagaaacagatcttagtttaaaaattgctaacaatattttcgaaatttaataaaatcatccatttatccacaggtgcatttgacagataagtgaatgaggggaaaataaaacatacaaagtattttatagtcaacctactgaaaatccaatacaaagagaaaaaattccaaactgtgagaataaaacacactgtagggagcagagttatctgatctgagctgcagcccacagaacaataggtaatctctgagaccctgaaaacacttagcaaatcaagaattctacattcaacagacaagtctccaaacaatggaggtgaaacaaaaacattttcacataaaagctgaagagatttgctgctgtcttatctaggagacaaaggctgtcaatcaaattcctgcaggcttaagaaggagtagtgacagcacaggaaaggcagggacacagaaggtaaaatggaggtgccaggcatccacttgtgaggctttctgaaaagattcctgtgttctttgaaatcccttagatattaactcactgttcaaagaaaactatcatcatcttgtttaatgtgaattttgcagatataaaacacataagaagaatatcactagcactggaagaagtataggtgtgagcttcttattacatttcctgctaactataaagtggatacacacatttttgttgttgttgttctccctagagaagctattaaaatgcataaaaatcagaatatttaagtgtatattatatagtgtatgtaatctttacatagtctattacaccaaaaaaaatgacagagtcaggtgtggtaacaaccccataagccctgtactcagaaaatagaggcaagaggattgctccaagttagaggtcagtcttgattgcgtagtgaattccagactatatgctgagatatcatctcaataaacaaagatagtaacaaaagcccaataaataatcaacaacaaaaattgcaggaaagtagcgaattgttggccaattctgatgagacctacacgtaccttaaatattaataagatggagagaaattgtgaaatttggtttaaatagttcgctctcactattttactgaagatatatacatgagtagaatagatgtgagtttaatgaacacatgcctcacctgaactatggagacggagagtcagagcctcttatacaatccccattcatgagctggattgaagaaaaataattttgtaaaattttagattttattttattttacaatatgtgcttttcctgggtatttgcatgcatgccttgtgtctgtctgcttgcctgcagagagaaagagagtgagcatcagatctccttcaactagagttgcagggcattgtgaaacacaatgtgggaactggaaaccaaataatctgaaaagcatcctgtactcttaagaatgagccaactggccagctccataactggaacttcttaactggaggaaaatgaaagctagtttgtttgttagtttggttgtattgaagagagtccttggtacagtaatggaaatttttattgctcattttgttttgatcatccccagagggcctttaaagcttttcactagggcatctatgtattaagggaaaggaaataatccaagcttgggatgctaatactgtacagtgggtgtgtatttgaattgtctacagaagacctaagataaaactgtggttcatgagtcagagtagtgtcttatgaaattaagactcattatagagtgcagccagtgttatcccacagatggaccaatgtggcagataaaatgtatcacttgaatcaatccacttggcatagaatgcacctttatattttcacttatctcagagatgtcatgctgccaaaacaaagtgaaggcaccagaagaggttaacaaggaaatgaataaaggaaaagtagctctacattgaacaagggaggtagctcagtctatataatcagttgtcatgaaagcaagagtacctaggttcaaatccccaacattcacataaaattaggcattgttgtacttgcctgtaacaccagaactgagggtaaatgaaaactctcccttgactgccagcctggccaaaactgttagcttctggttcaggtagatggcctgtttcaaaaagttcagtgcatactgataatggcagacatcatgaatcttcctctgataatttcatgtggttgcatgtccacatgcgaggattaactctctccccaatctctctctttctgtctctttctgtctctctctctctgtttctctctctcttacttacacatgcacagacatatcctatgcaacacatacatgcacacatatgtacacaagcacacacatataggtatacatataccacacacacatactccacacactcatattatgtacatatgtacacacatatgtagatgtattgtcacactatgcatacaccatacacacttgcatgcacacacacacacacacacacacacacacacccaaacacacacaaacatacgcatacaaacacacactgctacaatcccagaggcattttgaagtctgtgcctccatcaaggacttagaggctacaggaatgaacaatgattcccatgctattctattgaactcatctgtttggcctaagcagcagatagatggatcctaaagaatggtggatgattattttaaagacacccattttctaactcccctggcagttgctccaccagatgtacttcctttgcttgtgcaaattaacacatcctttgttgcctgatatataactattgatattacaaatgctttttccttatatctgtcaataaagcccacaaaagtcaccctaattaagatgaattgattgcatattttagattgcatactttagacagacctggagtcataggtaaaaccatgtcactaaatttgtgtgcatatacatctctgtctttggatcattgtgtatacagaattcatagacatcttaattgacaaatttaaaatgtattagtggtatcaggaacaacaacaactaaaataaaccaataagcaagtcttgactggtgcatggcatgctacactgcatgggacatctgatccagcagatcaagtgacattcaaattgtcagtggcaaataaagatgccacctggagccattggcaacctctatcattcaataataactagagtccttagaatcctttgagcaaaatcctaaccatcctgtcgatatactagaccttgggatcttttgagccttcgtgcatactcaaatccaccaatttgttgttgaacttctgagtattatcagactcagcaacccataaatgtggatgcatataggcatgaaataaaagatgggcagatactgctggcttcagcgaggccctgagatcacaataaggttcatgaacaactagtacaattttcatggttacaagtattggtgcactgccttctcactctaattgaataaccatggcatcattgagatattcttaaggtcatttataacagaagttgatagtccaaggcctggtttacagatgctcagtacactgtgtatgggctactgcaccactgtactccttccttgaagaatgttgaaagaaagaattgaagtaaaattcttcgtgaattgacctttgaacaatgtgctttgttgtaaaatatccttagatagagaaacaggcagatggattatgaataataataaaagtggattttatagcttgacataaacttgtattaaactattgttgaaaatttggtcaccaggaaatatggggtagtgttagataaattcctccaaatgctcctcaagaggatcagactgtgttttttgagtgctcactatagccacctcattagaaaacacattttagaactgttggatagaaatagctgttctgggaagactagtcagccactttccatggacacacttgtgttgtcactcaagagaatgatgttgtgatgacaggaagggtagcatccccaggcacttaccatggcacgtcttctgatgttcccacctaaaagctaaatctttgagctacagagagggccactcttccagggcatggccatagtatctagggacagctattagctgcctggtggaaagtagactatactgggctgctttttcatgagaagaccagaagtttgatctgttaggagcatgtaaaatatagatttatcttctttatatgatatgcttgcaatgctttagtcaacactcctactcaaggatgtccatgtagcctgcctgatctatggcaataatattacccatggtattttgtgtgaccaaggcctacaatttatagcaaaatcaataaagggttcaaagaagaattctgacaatacctaaagaacttccatgtagataggcagcacacttctacacttctacacagatgtccaacacacttccaaaaagatattcagcacacctcaacacagatgttcagcacacttctgtgcaaatgtgcaacacatttctgcaatgatgggaagcacatgtacaacacactggtgtgcatattctcagaacacttccccacagatgttcagcatacttctgtgcagatgtgctgcaaatttccatactgatgtgcagcaagcttctgtgcagatatgcaacacacttgtacacagatgtgtagcacacttctacacagattgtaacacacttcagacagttcattgataaaggctctttggttaggtggtactcatgtttactctccatcattatttgtcctggaaagccaatgaacataaccacaaatagtcagtacttcagtctgcacagaaaagacaaaatttattcatgtatttttaaaccgtcaccatgtgtctcaatttgtgctgaaaaaaatcactactttagcccaggctggcgttgaacttctcatagaattttgtttgaatgagaattggtataattatattataaagatgatgacaaatgatctaagtctatacatattcccatcctgcaattttatgattttaatttataaataagaaatgaaagtaacaggaaataatttcatcagaatgtatgtagcatttttattcataaaattatgaagtgaaaacaaccccaaactcatctaagaggccataatgaagacatctattgatgcaattgcattatggaataagaatctagggcacagaaagcaatatagctatttgatagcttatgttgaatggcagaaactaggcaaaagctgtatcaatgacacctcacacaaacactccagaacaaggtaaagagcagggatacatcatttatgctgacacaaaacagagcaccactttggtgactgtaataaaaggatattctaagattgtatgcagactctggaatggtcaatcaaagcagtaaccccacctcttgtgaggataagcagggtgatatcccaagtcaaatgtcagcctgagccacagagagggctctagtgtaggataggactcagcctcaaagtgaagagggagaaaagaaagaatggaagtagaaaagatgcattaaacctccccatggtggttaaaatgctcccttttgtgattttggtagtggttggtggtgaatccatccagaaagactcatttcaggtccaagaatttgataacatttaatatgtatccacaaaagcaaaataaagtaaaattaatgtattgtatggcaaattagttaatggaattcatgagattgagaccttgtgcatttcaaccacttactcaaatacattgatgtctgtatggtgtgggaatttcaagcattgataaatattcaaggggatgttgattgacaagcctcagtatggtttcagaagcagaaataactgagatgcttcatagtctgaagatggggtttggatgattttccttttcaaaacttcccatttaagtagctattcatcccacgggctgcaatcaacagtgttcaggtgtctctaaaatttcatgatcttgtaaattaatgtccaaattgaacatgaatcaggtcagtgaattaggaattaattcatcaattgcccaattagaccctgtagatttgatttgttctctgtttagcagaaaaacaagtaatagttttttcagaaatgaatgtccaaaagtacacacacctatactcacacacagatacacacacaaacacacacacacacacacacacacacacacacacacacacaaccttttcattttcagaggttcatacaattataattttcataaatacatatttaatttttaattgaatacactgagacatctgtggatccccagaagctgattttcgatatagaagctgccccaaatatagctacctagatttcctgagatacaaatgtacaatggagattagagtggagctctgaattcccaaagataaaaaaaaacttagcgtcctttttgtattgcaatcaccattcctaatgaggttatattagaagagagtcatgctaccaaagagtgaagtgctttagtatgcaataataatctggtattttgtccttgactcctatttcattatcaaaatcgtcacccaaataccttacaatagagctgtatttatatagagagtttttgcagtgaaaattaaagtacctcactagtcaccctctctctctctctctctctgtctctttctctctctgtctctgactctctctctctctttctctttctctctgactatgtatagaacaagaaaaatgaaaactgataatatttcagtttctttcattcattataataccattggaaacacattttttgtgatgccagtcataatttcttctgagataatgtgctgtcactacaaatacattggtcaatgtggtgataaaaaatattatgatggtgctggagaaattaatctgcaattaaaagaaactgctgctctttcggaagacctgagaccagttcctagctcccacatggcagcacacaaccacctgtaactccagctgcagtggtattttgtcctcttggccttgatggacatctttaagagtgcttagtacatccatccatccatacatacatacatacatgcatacatacacatacacacataaatatgcatataatatatataggtagattttaaaagccattattataatggtaataatggcagcttattttcatctgtttatgttatgaaataaaaatatttaatattcaaagtattcccaaatatatgattatatttttacatttaatattataggtggaaatcaaacacattgaatgatttaaaattttttcatgagtcatgtattataatatttaaaatgatattgcatttaaaaatatttcatttctacttttgagattataatataatgataccccctctttgattcctccaaaccattccatgtaccctaccttgctctctttcaaaatcctgacctctttttctttaattattgttacacaggcacacacacacacacacacacacacacacacacacacacacacacacacacacacacacttgtacttcttccttcctgtcaatttcatggcctcctttttctttaattgctgctatatcaatcctgttttgtctgtataatattctttataaatatctttgcagagctgacactttggtttagataaacaattcatgcactcttcttgtgggtaagtgtagttctcacctctcattaaggaaatttctccttgaaatacaaagagaccattatagaaaaccaaaacaaatgcagagatgcagagctcagtcccaagagaaaagactcacacacaatactcaggcaacattgtgaaaagggtgaagaaagatcataacagccagagtagaaggaagttggttggagattgtgttgagtagtaatgtcagaactacacatgtcaggtcttacaaacatgagttcaaacacaagctgtttaatgaaaaccaacaccactgggcatgtaccatggacatggcatacctcaggaggcctcaatcctacactaagaactggcaacatcttgaagcattttaatattttcctcagtacctcacaagtggtttttttatccccaaagacaaaatattatatatatatttgtctgcagaaaatatttttatgcaaagaatgggtctaagagttcctatgagacattctagcagccatttttaagtaccttaatgttgctgtagctgcttttttgtctcaccaggtcccactgtcacttcagacccaaataaatacatggatgctgaattataaaatgctggccattgacgagggcttcttattggctagatctgtcttaattattaactgatttctattaatcaaagtatttctacatggttttgtcttaccagaaaacaccaggctttttctatcttgccagtccctccatggcgtcaccttctggcacttctctacctacctttcaagaattctcctcatcccctatccctgctgatcttcttaactctttggctaaacaactttttattcaccaactaataggagaaacatatatacagaagaacatccccaatcaccctaagatgcacagaactcaggattgtatgattatatgtagttactttatatgagaacattgagatgtgattattttgatgttaattgcttgcctccctattttaaacatcttaagaaacagctagctccacttcctttcaacacaagacaaataatctgaaaaacaacctgtaatgacatcaaattcacaataatatcccctttctgataatattatgcactttacatggaatatttcaatttgcatcccaatcttcatatgttaggtaacatatttcactttactataatctataatcatcctcacaccatcaaccttgctcacagttgttcctggatgcattcttcctaattctaagtctcacaatgactttggttgaactcattgctataagattccctttgggatcccaagcctccttttatttggatataatatgtacttgaatatctttatctgatcatgtctcatcaagaactatattttttattaaaatgaaacaaacaaactgtaaatggtcgtctttaaaagttaagattttggttttatttctcagcagacaaatgctaattacattatgtttgtacaatacaatgagatgtttttgttaatgtatgtgttgttgggctgcacagatggctcataccagaaaaaatgcttgcatcacagtcttacgttctgttcccaggaactcatatagagactgagctcactggagtatctgtaatatgaatattcttaacatgaaatggaaggtggagaaaacaaatgctttgaattttacagggctagctatcctgcagtgtgcttgcagctcagtgtcaagcaattgaggccctgccttaagtgggaggcaaaggccaacacataaggtgttcttcttatcacaacatgtatttcttatcacaacatgtatgcagtggcaagctcgtgacctcaaattagactcccacataaaagtgagcacacacatatacacacacaattttttaaaattgtaaacattattgtttgattaaacaaaacttattaacatatgtagcatcttgctcacttgacatgcaagtttctatagagtattactgactatagtcattgatatgcaatacttctcaaaatgctttttttagtaatgctcatagaatatgtaatatgtatctattgtataaaatggtgatgttgtgatataatctatgagaatattacttcactgtaatgtatatggaggacagaatctgttggttgttacaaggcacttgggtgtactcaaatgagaggagttgcttgttatatggctttttctttaagcagcaagagttgagctactacaaagagcaagcatatggagcttctgaagaaatggctgctgtgcgattgaaagaacctatctgtagtgtgacccccatcccagagattaatcaggctgggtgctggacaccaacagaagaggcagggacaaaaatagaagtagggggtattgagaaggctcattaataactgaaggaatagatgttgctgtttggggtccatatggtgccagcagagagggagaaagatctgagctgtgttttggagtgagaaatgttttcaaaagagagattattataaaagcagatatcttcaaggattatggcttgtgcctgacataaaattaccactggatttgatgggtgatcattaaagttctaattgtcctctacttcctaaaaccaatgagcacaaagtctgtgaattagtaagtaagcataccctagttttcttatgccaatcatcttacagttgattataattgtgaggagtcaggttaagaaggcattggagaaggttttgccgttcagacttgcttggtactcctcctttcctaacagataggatctacaaattgtgacaggtgcctaaagacccaaaactccttgcctagtgttacctaatctcatgcataatgcaagggggaaacagtttaaagtaagtcaaattacattatagctgtcacttaatttttattaagacataattcaattaattaagctaacgcttttttcaaatgcttgaacaactgcattgggtgtatttaaacaacaagacaagacaaaagcaagagcaaccaaaccacctgcaactgagactttaccaccacagtagctccatgttgatttattacatgctttaataacaaaaaccatacagaagcatttatcaggttctttttatattcccacttgtgacaatccctacatttctgtcagagaacacagcaataaatatcagggtaggcacatatcacacttttgttttctaacatcagaatttatggtttatgccttagagaggtgctattctcctatgaaatcaaaacccttatgaaataacaggatggataccaactcagtggggttttttatcttgtttttttcacatttgtttttttcatgctattgtatgatgatgactgaaacagtgatggtttcctcctgatgagttcaagctcatgagatgcattgacaaaatctgattatgaacctgtttaggaacatgaccattaattacatctagcaagaaacccacccaagaaaaggatgatgtctttctttataaggagaacagtttgccattaagaaaaaaagacaaggagaattctgagaagaggacacagaaagatggatagggtactaaacattttctggtaagccaagaacatatggaaatacttagattaatataaatggcataataattaaaagagagctagccaataagaagcctgagccatcggccatacagtttataattaatagaagcctctgtgtgtttatttggattcaaatggctctaggacccagccagaacaggaacctccatcaagtcttaattttagtctatttatcaggctttacattgcctttcaggaagtcaaacttgtaaacatggggtatacctttgcagtaaaggcacattttttaaaaattctatgatgaagctgtataaaagcaagcatttatcatttgtcctgtggatgtcattctaggtattatataaaaataaactcttaattagcactaaattagaaagcttacattgatgtcactttgttgcctcactatctggcataatcatcaaacagggacctgctacaggaaaaccatattactggtttttaatgagacagttctccaaaacgtttgaagtataatgaaagaaatataatactagatgctaaaatatgatatcagcactactgattttgtatatttcttagaaatttctaagatttgagtggtgcccttgtttttaacagttgcagtaactgttgaatgcatttcacataaaagtatatacctctaaaaactcaccttttgcttattagttttttgtttgtctctaaagataaatttgtgttgttgctgtgttacttttgcctttacttctaaacttttctgtggccgtatctctgctcagagccacttcctgaaagcaggaagtctggtgaagctgctttcctcccaaatcatagcagctgactgtcgccaaacgatagaaaattttcttcccagaacactttttttctttcataaaaataaaaggatgcccacagagaagacaaaggtttaaagaatatgctctgcaggtatggaagccaaggaaactaaattcaggtgagtggtcagcaaaagaccttttctattgttaatgtttgcattgggactggcttctcaacccatacatttgctgtaatttaaaagaaaagaatgcagaatagacctcattctttatagaaacctttagaattggcaaactgccaggcacattctggccttccttcacagacatcaagttggtagtcatccaacaaaggaccaaaatgtaagctttcatccaacacacaaactgtcatctcccaaggagtctacgtacatagtcaaatatacaacactgaaattccagctaatttaaaacaaaatgctcagatttttgaacatatgaggaaaaataattttggcaagttatgtcaatttaattgagattagaaagatgagataaagagtcaacataatgttaaaattattggggtggccattttagtcaggttttatgatgaaagatagcatgtcagctatttctttgtgacttcttgcaattattcaactgaaatgcctaagaatgtccacactttatagtggtaattaataactatgagaataaaaacacacaaaacattacacacaaaaaacacccttatttatgattaaatagacacacctacactgatatatctgcatatattcacatgcacaaaaacacataagcacacatatacacaaacacacacacatacaccaaaaggaatacacacatatctatacacaaatatatgcatatgcacatacacacatatacacacggagatatatacacacaaagacctaaacatacacatatatctacctatatgtgcacatatatacacaagtgacccacacataaccacccagacaatcacatattcacatgcacatagacaaatacatgtatacacataaaacattgttgaagtacttttaaaatacaaggatttgtatatattttatgttagtaaatatactgtttatatttacttggacatcttcacacagattcttcataaatatttgtggttgcccaatacttctaaaagacaatatttgccaaaatctctagtttctttaacagttaaagcataattttagagtcatagtaaagttaggtgggatgtacagacctgtttctcatgccaccattttcacactcacacattagagtcagactcctagtcaaagaagtacagctgctacatctaaggagtctactttcatgtgtctccattgctgaagtccacagtttacactgagagtcattccttgcattttatattctatggactgataaacacatcctggcatatattcagctcatattatccagaagaaaaataacaacatagacatcaaaggaagtgattgctgcatcagaaggcaggaatatgtttatattcccaagagtctggcaaatttctccaaggtggctctgctattttacttcccatagtgagtattcttctggcttcacttccttgcccacacttttgtgttagtgttctaggatgttcattctaacaggcttagaagagtatatcacttccattgcatttaaagtatcttaactacccatgttgaacatatcattatgttattacatgattggcattatccatgtttctacttaatttctaattttaggttgtaaaatttgcaatttcctcatgtatttggaataataacagtatgtcttttaaagtacattctgcaagctctactaaagagatgtagtaatgaaaacaggttggtaatggcacaaaaacagacaggtagaccaatggaatctaattgaagaccatcatatggacccacacacttatgaatacctcatctttcacaaaaaaagctaaaactatacaatgcataaaagaaagcattttcaaaaaatggtcctgccataactgtatgacaacatgtagaggattgcaaatagatccatatctatcaacatgcacaaaacttatgtccaaatggatcaaagccttcagcataatccagccaaactgaacttcttaaaagagaaattgggaggtaaccttggatgaattcgtataggagaccacatcctgaacatagtgccagtagcacagatactaaaattgacaattaataaatgggacctcctgaaactgataagcttctgtaaggcaaaagacacagtcaactagactaaacagcaggccacagaatgggaaaaggtctttatcaagaccacatcagacagagggctgatctccaaactaagtagctagccaacaaaaaaccaaataatccaattaaaaattggggtatagagctaaacagagaattctcaatagaggaatcaaatatggctgaaagacacttatgaaattgctcaacatccttagccatcaggtaaatgaaaattaaaccaactctgagatattatcttacacctatcagaagggctaaagtaaaaaacaccaatgacagtttatgctggagaggatgtggagaaagaggaacactccactgctggtgggagtgccaacttgtacagccactttggaaatcattatggcagtttctccagaatatgagaacacgtgtacttcaatatctagcaattaggtatatacccaaaggatgcacattcatacaacaaagacatccattcaactgtgttcatggcaatattatttgcaatagccagaatctggctgcaacctagatgcctctcaacaagaatggatacagaaaatgtggtacatttacaaaatggagtactactctgagggggaaaaaaaacaatggaatcttgaaatttgcaagcaattaatggaactagaagaaaccaccctgagtgaggtaacccagtcacagaaagacaaatatggtatgtactcactcaaatgtggattttagacatagagcaaaggattactagcctacaatccacactgccagagaagttggaatacaaggaggaccctaagatagacatacctatttcccccatgaagtagaaagggacaagagtccctgaacaaatggggagaatgtgtgaaggagaaaggaagataggagaaagaggagggaagaactggagggggaggagaacatgagggatcagggagattgagtggggagtggaatagaagagagtaagaagagaaacacatcaatatagagagctgtagggagccgtccctgcattctccattacaagatggcgcctgcatctagcaggcaccgaatgtaaagttaatgcgcgcaggctctgggtaactttccattccttgatctctgcctatccccaggcactgaccatgtcacgtcttctgatgttcccacctaaaagctaaatctttgagctacagagagggccactcttccagggcatggccatagtatctagggacagctattagctgcctggtggaaagtagactatactgggctgctttttcatgagaagaccagaagtttgatctgttaggagcatgtaaaatatagatttatcttctttatatgatatgcttgcaatgctttagtcaacactcctactcaaggatgtccatgtagcctgcctgatctatggcaataatattacccatggtattttgtgtgaccaaggcctacaatttatagcaaaatcaataaagggttcaaagaagaattctgacaatacctaaagaacttccatgtagataggcagcacacttctacacttctacacagatgtccaacacacttccaaaaagatattcagcacacctcaacacagatgttcagcacacttctgtgcaaatgtgcaacacatttctgcaatgatgggaagcacatgtacaacacactggtgtgcatattctcagaacacttccccacagatgttcagcatacttctgtgcagatgtgctgcaaatttccatactgatgtgcagcaagcttctgtgcagatatgcaacacacttgtacacagatgtgtagcacacttctacacagattgtaacacacttcagacagttcattgataaaggctctttggttaggtggtactcatgtttactctccatcattatttgtcctggaaagccaatgaacataaccacaaatagtcagtacttcagtctgcacagaaaagacaaaatttattcatgtatttttaaaccgtcaccatgtgtctcaatttgtgctgaaaaaaatcactactttagcccaggctggcgttgaacttctcatagaattttgtttgaatgagaattggtataattatattataaagatgatgacaaatgatctaagtctatacttataaccctcaaggaccaggcattgtggaacgtgcccatcgcacacttaagtcttatttaatcaaaaactagactaaacagcaggccacagaatgggaaaaggtctttatcaagaccacatcagacagagggctgatctccaaactaagtagctagccaacaaaaaaccaaataatccaattaaaaattggggtatagagctaaacagagaattctcaatagaggaatcaaatatggctgaaagacacttatgaaattgctcaacatccttagccatcaggtaaatgaaaattaaaccaactctgagatattatcttacacctatcagaagggctaaagtaaaaaacaccaatgacagtttatgctggagaggatgtggagaaagaggaacactccactgctggtgggagtgccaacttgtacagccactttggaaatcattatggcagtttctccagaatatgagaacacgtgtacttcaatatctagcaattaggtatatacccaaaggatgcacattcatacaacaaagacatccattcaactgtgttcatggcaatattatttgcaatagccagaatctggctgcaacctagatgcctctcaacaagaatggatacagaaaatgtggtacatttacaaaatggagtactactctgagggggaaaaaaaacaatggaatcttgaaatttgcaagcaattaatggaactagaagaaaccaccctgagtgaggtaacccagtcacagaaagacccagacagctcttgcacacccggagtagggtagagtgcctggcttgagcagcccatgagagatgtcaagcaaggcatcgcacagagagttgcccagtatgcaggcttctcttggaatacaaggaggaccctaagatagacatacctatttcccccatgaagtagaaagggacaagagtccctgaacaaatggggagaatgtgtgaaggagaaaggaagataggagaaagaggagggaagaactggagggggaggagaacatgagggatcagggagattgagtggggagtggaatagaagagagtaagaagagaaacacatcaatatagagagctgtagggagccgtccctgcattctccattacaagatggcgcctgcatctagcaggcaccgaatgtaaagttaatgcgcgcaggctctgggtaactttccattccttgatctctgcctatccccaggcactgaccatgtcacgtcttctgatgttcccacctaaaagcttacgtccaaggcggcggttgccagcctttattatgggacgggattcttggctcggggtctccgcttttgtaagcttatgctcttctctctcaagacgcataaagctttactgcagacggatccgagtgtcctgtgttgttcttgctggcaagatgatcacgcgggacgtctggtgctgaaacccaggaacttgttaacatcgccggcaccgtggagacccctcggacgagagccactatagaattacagagaaatctggcactaggaaattatagagaaatcaacaaggatgtccccaactagaatcctcagcaatagtggagagactgtcttaaatccctgccccctatattgagaatgatgactaccttaaatgccatcctagagccttcatctggtagcttatggaagcagaggtagagatccacagccaagcactgaagcaaactcctggaatctagttgcagagagggaggagtcaagactagcctggagaaacccatagaaacacctgacctgaacaagcaggagctaatgaacccaagtctgtcagccatggaaccaacatagctccaaaccaggccccctgaacatgggtgtcagctaggagcaatggggcctctgacagtgtaaccaagatgtatcccctagtgcagaatgaacttagggagcccttttcctatggggggacacttccttaatctagataaacagcctaggccctcccgcaaatgacttaacagactttgatgatcccccatgggagggaggtctcaccctccctggggagtggatgggggaagggatgggggtcttggttgggggcatgggaggatgggaatgagagggaactgggattgatatgtaaaataagattgtttctaatagaaataaaatctaaaacaataccaaaaatgaaacaattcattttccatattcatttcttgattttgttgatatttaagtttttgtttatttgttttatttttcactctgcattgccatttgcagagcagaagttataaatttaaagcaacacacaccagtgattatttgtttcatagggcacatctttggaattatacctaagtgtccttgccatgaaggtcaccttactgcttaccaagttaatattcatcaaattgtattgtgttgtaagttccatagaggcctcagactcatttttactttcattgaataatgctatatgtgtacttatagaaggccctggttaaattttgttacttgcaaaacaaaacaaaaagacatcagcacaggaaaggctgtgctgtagggatgatggtaggctgacagaggttggagggagatgagtaacaggagatgtgggaataatcagaatgcattgtatacacatatgaaattgtcaaagaaaatattttattaataaaaaatctgcaaagtgagtgtcacagtaaaacatttttttttcaaaatcattccaaagttttgacctaatttcacaactattgatttattgctattaagaatggaatcattgtttccttctgcccaaggggtaatctgagcaaacagattgattgcaggatacatgtcatagtctgcatggcccgagatatcatcaacctgaatcacatttctgtctaagaaatctcatattagaaaaagtatggattattggtttgatcattaatataggtgaatagaatgtaataatgcataaggccttcaacaatgaagtaaactgcaatgtaaatacatctcaatttctgatgtgtctggagtcaaataatttttgaaaagatcacaagaataaatgataaagtcaatgaaaagtgtaatacttcataactgttaagtaatgctgaaagaaaacaaaaacctgaccaaatattctgttaagggtgctgggaaaggctcgttcattcattttaagtagtattgaaaactggtactgttactatggagcacagtatggagaatcatcaaaagactaacagaagagctaacatatgctgtggctgtatcctccttgttatgtgcctaaaaaacttgctgtcctattctgagcacttgctcagccacgtgttcattgctcttctactcacaataactaagaaatggaaactaccaaaatgtccttcaacagataatgacaatctggtacatatgcattatggaatatcactcagctgtaaataaaaatttaattatggaatttgctagtaaatccatggtaagaaataaatggttaaatgtagccacatttgctacccaacatttaattttcgctgggaagactatagtataattggcatcccagtacaagatgacattagataccatttgtcagagcagtctcagggtagatggagaaattttgctttcttgtcttaaatttttggaaagcattccttggcttggatttgatggaaaagtgtgtccttcactgtgttatttttagccctcctcctgtttgtaatgtaggaaagcaaagaaaaattctatgttatttaccccataattatgggttatttggcatagatctaaagtcagataactaaccaaataaaatgtataagtacatataaataaatcttagcttcagggtaactattcatcaacaaactctattattacaataataaaaaataacagaaaattgtgaaaagtataaaaatcattgttaaaaataaagcattgtcaattaaataattttgtaagactgagtttggtatgggatatttcatttttcactagatgttttgttcacacagtgaaaaggctcaattataagtgaatgtagtattatattctatctatgtcactttaattcagaaatgaaaggaaaaatatcagaaacatttgtgtcatatacaaaagcccacacacaggcacattacaaaattcctaattattttctagaaattcagtcttcttactcttgttctgaagcacttatgatcacacttccctgattatagttttagagaataactagaaattaagagtgccaaacacagggtggtgtttaaatggaaatgagaaatggcatcaaacacagaaggaaacacaaatctgtcactaacacacatcaaaacatctgattagttggaggaggtaaccaccatatggcagagtattaataaatgtttaatcacagtaagaactgaaagaatagtagcaacaaataacaataattaaactaatctactattgcctgaaccatctaccctaaaattagtggaaacccacttacataaaatagctataaagggcatgtggaaatatcagaattcttgagagacagccacttagaaagtagttattaaatattttattctaatacattgttattgttttctaaattatatgttttgatttgaaaacaattctttatagaatgacaaatagctgtactgaagtttttaaattttaatttccctgggccattggaattctatataatgccagccctcagcactagtgatctaattactctgtgccttcatgttgaagccattttgcaggaaagagcagagtttaatgtagtgcagctacagaaaaaagaagtcgggctggagggcatctgccacgggcataggctccgctcttgtcccggagtgcgcagaactgggagcagcttggctatggccatagccatgctcttgtccaagaggtactccgtgtggaagtccttttgtgcaattttgatgcttttctgcagaactgtgatctccaacccaacagttttagagcctatctactggaattcctccaactccaggtgtgaacctagcaagttggctggatcccactgaagcctaacatggattgattgtcacaactatgcatccagaaacacagattcccttgccagaaccaatgagaaggttgtagcactggacattatgacaattggaggacccacaggtgcaactaagatttgggaaataagggtagacactgaaggatcaaccgggaagacttgccagcattaaggatcatgatgtgaaccctttgacctcggattttggaagtttgtatacaaggctgcttcacaataaaagtgacgaacattctctcagaaacagaaccagacatcttgtggttcatccaaatctccaggcttctgcctgatactcggacttagtggtggccaagaatagtcacaaattgaggtcccactgagaacaggaatgaaatgggaccctgagagatcaccctcagaattctggcaagcaaataaggatttgtgagggtggattgcaaaaggtactggaaaataggtacctcaactccttagagagtttgattggtatagagatcactgtcaatcacacagagaaagtttaaagagacaaggtactggtaagatttcattttaacattggatgaagcaataatgctaagaaaattattaaagaaatctgggaaatctgcctctgaggaatccctcctccatgaactgctccagtcagacgaaactgatgtggtgtgcacaggctggctggagaaatcaattcctgagaaaaagttggggcactatgcttggaagaaattctggttcatcctgtggagcggtaagatgtgtggtgacccagatgttctagaatactataaaaatgaacactgcaagaaacccctgtacgcagttggatgtagccttgactttcaacaaacaagagctccaaaagaggttcatgtttgatatcattatcaatgagcacaccttttacctggtggctgagacagaggctgacagaaataggtgggtccagagcatctgccagatctgcggcttcagtcaaactaaagagagcactgacaccttgagaaacctttctttagtcagtcataatctctgctcttctccagctgaattcagcagctccagtcagcccctgctccgagcagggtctacggcagatagtgaggatgtgtacacggtcaaggcacccagaaacaccctgtgtaaggaatttggagacctcccagtggactcagccataccacccccaccgcaccccaagacactttgcaggggcagccctcaacaaagacctccagtcagtgactacaagtatcgaacacgaggtgaagaaactgcctgcttgtctgataaatcactagaaaagtctatcgtgggtcaatcagacagtgccagctctgattgcaattatacgcccataaacccaggttctgacatcccgatgagcacaatgcctcatcactttaccagccgaagaagtgagatcctcaagcttggcagaaaagcaaagtcagtaccccttgacctgagtaacaacactgtcatcaatgagctcactttcaaatcatttgtcaccaagtcttggtccacattcaaccacacctttaacccaaggtcctccaagtactgcttttgggtctcccatacagactctggagacagtgaggagaactgtgtccctgtgcagaccccaatgtcttcatctcctgtacccagtgtcactaacaacccagctccaaaaaagagtactggcagtgccaattacatagccttgcacttccaggcgctctccccgagacctcatcacaagctatccacatcattgtcatatcagatgagaaaggagaatatgtccaaatagataaagaatagacctaagcaagctccagtcaggccctgctccgagcagggtcagtggtagacagtgaggatgtgtacatgttcacagcacccagaaacaccctgtgtggggaatttggaaacctccacgtggactcagccttagttgccccaccacacccnnnnnnnnnnnnnnnnnnnnnnnnnnnnnnnnnnnnnnnnnnnnnnnnnnnnnnnnnnnnnnnnnnnnnnnnnnnnnnnnnnnnnnnnnnnnnnnnnnnnnnnnnnnnnnnnnnnnnnnnnnnnnnnnnnnnnnnnnnnnnnnnnnnnnnnnnnnnnnnnnnnnnnnnnnnnnnnnnnnnnnnnnnnnnnnnnnnnnnnnnnnnnnnnnnnnnnnnnnnnnnnnnnnnnnnnnnnnnnnnnnnnnnnnnnnnnnnnnnnnnnnnnnnnnnnnnnnnnnnnnnnnnnnnnnnnnnnnnnnnnnnnnnnnnnnnnnnnnnnnnnnnnnnnnnnnnnnnnnnnnnnnnnnnnnnnnnnnnnnnnnnnnnnnnnnnnnnnnnnnnnnnnnnnnnnnnnnnnnnnnnnnnnnnnnnnnnnnnnnnnnnnnnnnnnnnnnnnnnnnnnnnnnnnnnnnnnnnnnnnnnnnnnnnnnnnnnnnnnnnnnnnnnnnnnnnnnnnnnnnnnnnnnnnnnnnnnnnnnnnnnnnnnnnnnnnnnnnnnnnnnnnnnnnnnnnnnngagacctcaccacaagccatccacatcattgtcacaccagatgagaaaggagaatatgaccaaatagataaagaacagacccaatccccacaaaagtccatacaggaatggacaaagatgcgacagtcctgaagatcctccaaagatgccaagctatggtaaggatggccatccttcaacatctactctcctttgtgagtttttttcaaaggatgtatgtatgttctgtatgcatagtgtggccacatgtgtgaatttgaagtgtaatcgtaattgtgtaactgttaacaaaagaatgctattgtgttgtctttaaatcatttaattactagggaaggagcctcagttattaaagtacaggttacatggaaaaattttctgctgtttttccatggagggtgaaaagctgtggattctttccatactggtatggtttcatggggcaggaccccatgaagcagtggctcaggtgatccttatatttgttttccttaaaatttaatcagttagaaatggtagtggtcacacccaatcactttttaaaggaaaaaagaggaataggatagagaaatgataattgtattgaaatgaatccccatttgttgatactttgtattggaatggatcttcatttgttgatattaattaggttttctagatatatagatannnnnnnnnnnnnnnnnnnnnnnnnnnnnnnnnnnnnnnnnnnnnnnnnnnnnnnnnnnnnnnnnnnnnnnnnnnnnnnnnnnnnnnnnnnnnnnnnnnnnnnnnnnnnnnnnnnnnnnnnnnnnnnnnnnnnnnnnnnnnnnnnnnnnnnnnnnnnnnnnnnnnnnnnnnnnnaaaaaaaaaaaaaaagaaaaaaaaagaaaaaagaagtcaatattaccaaactaaataagcaattctcagctcttggataaggtagtgttcaaaaccacaagtttcgatatgtgaaacacaggggctgctgaggcctgcaagggtgtgtcccaggaacacacatgcccctggtgagggtgtataataggaacacataaactcctggtgagagtgtatgacagagttccgtgcacactggttattaccaaatgttgaaagaccaaattaccgagagtcacatgtaagtagagatacactcttctttttggtttttcgagacagagtttctctgtgtatctttggagcctatcctggcactcagtctggagaccaggctggccttgaactcacagatatcagcctgcctctgcctccggagtgctgggattaaagatgtgtgtcaccaatgccctgctaagagatacactcttaacaaatagattttctgctgcttaaatgtcccacagtatttcaagtgcttatagtgtaaatgctcattctcaaaacatagttcaaagaactttatattgggtactaattaaaaactctagagatattgcacttaacattttactagaattgctttcctcggacagctatttgtctgagtgtctatctatcagtcattcttgtttttgataagtctcaatggaaagtacttaaattagcatttttcttcttaaacttttagagaccagattttattgcctatggtgttgttttgttcacttaattttttttctgtttgtgattttgtatccagtacaaatataagataaaatcatttactaaacttgcttaaagtgaaatgtctgtgctctaacaattacatatgttcatggtgatgtttttctttgttaaatattgcattatttacaacaaactttgcacctgaatactatgagggtttagtttcaatgacttactgtgcttttaaatagtttatatgaatagatttattaaaattttctatggataagaacttacttgactccagaaaaaaatattacatatctatatagtttttatatctttagatatttctcatcattcttctttagattttcatagatgagtataatattttgttcatagttactactttgtcctgcaactctttctatgtcttcaaattcttcttttttgttttatatccattgttactctttaaaaaatgtttccatattttataacccttctgcaattacccctccctactacctgctatctgctgctttcctccctaatttctattcagaaaatggcaggcctcccatggaaatcaacaaaacataacttatcaagttatagtaagaataagtacctcctgcaaatattaagcttgggcaaggcaacccaatatgtggaacagggtcccaaaagccaccaaaagtgtaaaagacaacaccctgctcccactgttaggagtcccacaagaagatcaaactatgcaactgtcacatataggcagaggccttaggtcagtcccatgcaggctccctgtttgtcagttcagtctctgtgagctctgattgtgtgggttttcttgtgatgcactttgcccctctgattcttataatccttcatccctctcttcattagtattccaccagcactatctaacatttggctgtgggtctttgcatctgcttccttaagatgctggataaaacctctctagtgacacttggactaggtaccaatctatgaatagagcagaatatcattaggcatcattacattgacattcttgattctatcctagttctttaggcaatccagtgtctgtaggcagtttcaggggagggctcacttgtgacatgggtctgaacctggaaccatcattgtttggccagtcacacaatctcagttctatccttaaacctgaatatcacataagcaggacagaatgcagcttggaggttatatggttaggttgatgtcccaatccctttactgatagtcttgcctggtcacagaagattgctagtacaggctatttcttggagtctttgccttggtcacccttgtaggttcctgtgagttttccttgcactaagtttctatctgatcctgaaatgccccaccctttccaggtttgtctttcggtattctccctaacaatccctttaccaccttatttcccattcccacaagctcccagtccacccaagaagatccaagtgtaccagctttgagccctccttattacctagattctctgggtttgtgcattatagtctggttagcctttacataagagttaatgtctatttacaggtgagtacagaccatgtttgtctttctgtgtctggatttcctcactcaaggtaatttttttttagttccatccatttgctttcatattttttgatgtgattgtttaacagctcagtaatacttccttgtgtaaatatagttacttttctctatcccttcttccattgaggagcatctgggctgtttgcaggttttgaggttacaaataaagtggctatgaacatagttaagcaagtgtttttgtggtatgatggagcatcctttgggtatatgccaaagaatgttatagctggtcttgaagtagattgattcccaattttctaagaaactgccatattgctatccaatgttgctatacaattttgcactcccaacagcaatggaggagtgtgtcccttggtccatattctctccagtgtaagctgtcatttgtgcttttcattttaccaatactgacagaagaatagaagaatcttagtgtagtttttatttgcatttcactgatggctaaagatgtgaaacatttatttaagtttcctgcccatttgtgattctacttttgagaattctgtttagacctgtaccctattttcaaattacattatttggtttcttgacgcctagtttcttgagctctttatgcttttgggaaatcaaccatgtcagatgaaggtttggagaagatattttcccattctgtagcctgccattttcttctactgaaggtgtcatttatgttcagaagcttttcagtttcatgaggttccatttattaattgttaatcttagtgcccgcactactgatattctgttcatgaaggtgtctcctgtgccaatgaattcaaggctactttatactttcactttcactcggttcagtgttttggttttattttgaggtctttgacccacttggacttgagttttgtgcagggtgatagatatgtatctatttgcattcttctacatgccagcatacagttagatgagctcaattcattgaaaatgctttcgtttttctattgtagaattttagcttctttgttgaatatcaggtatccataggtttgtggacttacatttgggtgttctattcaataccatttatctacttgttttgttttatacatcaccatgtgatttttattgctatatctctgtagtaaagcttgaaatcagggatggtgatacctctggaagtttatttttttctttatttttttgtacaggaatttttttagcactcctgtacttttctgtttttccatttaaaatgagtattgttctttcaaggtttgtaaagaaatgtgttggaattttaatgggtattttattgactttttagattgattttcataatatggacatttttactatggtaaccctactgacccatgagttaggcgatctttccatttatgatatattcttgatttttttcttcaaagtcttgaagttcttgccacacaggtcttttatttgcttggttacagtcacaccaagatatttcatattatttgtggctattgtgaaaggtatttctcagcccatttgtcatttttaaataggaactttattgattttgtttcagttactcttgtatctagccatatcactaaagatatttatcagctgtagagcatctctgcaagaatttttgggtcacttgtgtatactattgtatcatctagaataatgatttttttttttacttcttcctttccaatatgtataccgttgatctcctttggttgtcttatcattccatctagaacaccaaatgcatattgaatagatatgtagagagtggacagccttatcatgttcctgattttagtttaattgctttgtgtttctctatacttaacttgatgttggctataggcttgctatgtattatttttaatatgtttaggtgtgtcccttacttaccttttatctccaggacttttattacaaagtggtgttagattttgtcaaaggctttttaagcatttaatgagatgatcatgttttttttttttctttcagtttgtttttatggtggattatattgacagattttgtatgttgaaccatcctggatctctggataaagccttcttgatggtgttggatgatttttttgatgtgttcttggattcagtttgcaagtattttattgagtatttttgcatcaatgttcatgaaaaaaatggatctgtaattccttttcgttttggagtctttgtgttatttgtatatcatggtgactttagcctcataaaaagaatttggcgatgttccatctgttcctattttgtggaaaattttaggagtattggtaatagctcttctctgaaagtctgttagatttctgtgttaaaactgtctgatcctgggctttttgttggggggaggtgactttcaataactgctttatttccttaggggtcatagttgcttaaaggaacttgattaaattttggtaagttgtatctatcaagaaatttttccatttattttagattatgtaactttgtagagtacaaatttttgaataagacctattgattctctagatttccttagtgtctgttgttatatctaccattttgcttgtggttttcttaatttggagtattcgctctgtcttttagttactttggataaaggtttgtccatcttgtttactttctcaaagaatgaactcatttcattgcattttttgtattgttctgtttctattttattgatttcagccttcagtttgtttatttcctgcctattcctcctcctaggtgtgtttgcttctttttgttttagaggcttgaggtgtgctgttaaatcactagtatgagataactttaaatactttgtttgtttgtttgattttagttttctgagacagggtttctctgtgtagctttggagcctgtcctggaactagcttttgtagaccaggattgtcttgaactcacagagatctgctttcctctgccttccaagtactgggattaaaggtgtgtgccactgtaggggataccctaagcacaccacttggggctggttacaggtaatgctagtcatgctcgcttggagacaggtgtccctgaccacacccacatgggtgtggtcaggggacatgaagaaggtttaagagtgagggacatgcagtaggggtcccttctacttaccttgcactctgctgactgtctaggctgatctgagtgaatagcattttcctaaataatatctagacctgactccatattgccatttcctcttcatgccaccattgcccagatgctgcaaattctttttgaaggacttagtgctatgaactttccccttagcaccatattctttgttttccatgagcatgagtatgttttgcattcattttcattgaattctaggaagtccttaatttctttatttcttcctcttcaattggtaatttagtagagagttattcaccttccatgatattgtagactttctgttatttctgttattgctgaaatccatctttaatcaatagtggtctgataggtttcatgtaattaattcagttttcatgtgtctattaagagttgctttgtgagtgagtatgtggtcagttttggagaatgttccatgaagttctgagaagaaagtgcataatttggtgtttcagtgatatgttcttaagtaggtatctataattccatttgaatcacaaaatctgttaacttcagtacttgtttgtttagtttctgtctggacaactgtccattggtgataatagggtatgtaacccctccaacccattatccatgtgtgagaatcaatgtgtgatttaaactttagttgtgttatataaggtagtcatcaatctcataattggagaaggccatttcaggtacctatcgactattgcttagattgttagttaaggtcaaccttgtagatctctgtactgatagcttggaaaccatcataggactgaaggaagaagtcagtttggaggtctggacaatctatggggccactggtaatgcatcagtatttaccccgagtacacagatgaactttgggagccctctccacatagagagacacacaggggagggtcttagccctgctgcaaatgctctgacagatttttaagatcccccatggaaggcctcaccctccctggggaccagaaagactttgggatagagggttgtggggggcaggggaggatgggagggagagggatcttagattgacatgtaaaagaagcttctttctaatttaaataaaaaaaggaaaatataaactttagtagtgtttcctttaaaaatgtgagtatcaatattgctgatgcttgtatttatagttcctgattgctaatttcccatttcctgaattcctaaagtttgtgttttctttattgcttctattttcattttagtgtcttaagcagttttaatttttgtgtcaaatgtttgtcttttcttaattttcttgacactcattaagagttttattgattttctccatttttaattgtcttttccttgattactttaagaaatttcctccttaaacacctgtaatcatcatcataaagttgattttaaggtcattttcttgtgctttagctatgttggaatactcagtgcttacttttatggggagtctggcctcctgtggtgacatattgcctttgctattattgtttgtattcttacatttattttaggcatctgaatttggagtgattataggcctgtggatttggggatttgtctttgttgcctgggtgatttttccctttgtttatgctttctctctggtcttttagctgccataggccatttttgggtagaggatctcaacattagggtcatccatggcctggatgacttctggtcctgcaaggggttgttgcctaagtttggggctgaagttctggctatgtgtgtagtgtctgaacaggctgggtttcttctgggtttaagatcctgacctggattctgatagggtctgaggcttctgcctgattttcagggagttaccctggtctctatattccggatactggcctggcctctgttagagtgaaaggcttccacctgaggagttggtcaggatcagatgacaagagagaaatatctgcctctaaaattcaggttctatcatctctctatctatatatttatttatctatctatctatttatctatatctatctgtcatctatctatgtgtgtttatgtgtatatttgtattcactttcaatgtgtatatatttgtatatatttatatgtacatactttttatatgtatatttatatctatacatacatattttatatgtacataatatataaataaaatatgaaaatatatatacaaatatgtatccttatatacatataaatagacatttaaaatcatgttctctttcagtgtgtgtgtgtgtgtgtgtgtgtgtgtgcatgtatactgttgcttgtatgagataattgtagctgcagaatctcagaacatgagctagaaaatacactaaccatagggcatacagcagtgattcttaacctgtaggtcatgacttctttattgaccctctcacaggggtctactaaggtctcagaaaatgcagatatttagattgagattcatagcagtagcaaaattggcatgaagtagcaatgaaataattttatggttgagggtcatcacaacacgagaaactgtgttgtaaggttgcagcattggtaaggttgagaaccattagcatagaagaaataaatctcttgctcactgaagtttaagaaaccatttctttaattaatagattctttctttctttctttagaaacaatcattttacatatcaatccccctgtccctctccatcccatcctcccatgtcccctagcaaaccccccaacccatgccacaccttctctccaaggacatcagcaaagtctgtcatatcatttaggggagggcctaggctctcctccatatatctggactgaaatagtatccctccatagggaatgggctcccaaagtctatttgtgtgctagcggtcaatactggatccattgttagaggtcccatagccttaccaggcctcctaactggcacccagattcagagggtttggtgcagtccaaagctggttccccagctttaagactgaggtccttttgctctcactagttcaggtagctggttctaaaagtttctccagcacagtcttgactcttctgctcatcagtcccccctctttacagctggaatccaggagttgggcttagtgcttaggtgtggatctctgcttctgcttccatcagctactggatgaaggctctaggatgacatttaaggtaggcatcattctcattataggggaaggatatttaaggtagcctctccactattgcttaggatgctagttgggatcatccttgtggatctctgtacaattccctactgccagatatctctttaaacctataatgcctacatctattaatgtgtctcttttgttgttaacctctattcctctacccacacaatcttcctgatccttcatgttctcttctccaattcttctcctcctctcctctttctcctaccttcctccctccttcccatatgttcctattacttccggggttcttgtcttttctacttcacttggggaccctatatgtctcttttatgggcctccttgtttccttgtttctctggaagtatggattgtagggtgattatcctttgctctacttctcatataagcatatgagtgagtacataccatgtttgtctttctgtgactggggtacctcacttagtatggtttcttctaattaaatccatttgccagcaaatttcaagatttcattgttttttttttccaatgagtagttttccattgtgtaaatttaccacattttgtatccattctttagttgagggatatataggttgcttcaaggttcttgctatcacaaataatgctgctatgaacacagctgaacgtatgtgcttgctgtttgaatgtgcattctttgagtatatgccttagagtggaattcccagatcatgagttagactggttccaatttttcagagaaacctccacactgatttcaaaactggctttacaagtttgcactcccatcagcaatggagaagctttcccccttctctatatcctctccagcataaaccgtaattggtgtttttgattttagcagttctaaggggtataagatgttatatcagagctgttttgacttgcatttccctgatacctaaggatgttgaacaatttcttaagtgcctttcagccactttttgattcctctactgagaattctctgtttaggtctgtaccccacttttaaattgaattatttggtgttttggtgattagattcttgaattctttgtgtatttttgataagcccgctgtctgatgtggtcttggtgaaaattttttcccattctgtgggctgccattttgtcttgttgactgtgttctttgacatacagaagcttatcagtttcaggaggtcctatttattaattgtggatctcagtgtctgtgctactggtgatatgttcaggaagtagtctcctgtgcaaatttgttaaagggtatttcccactttctcttctaataagatcaatgtgtctggatttattttgaggtctttgatccatttggacttaagttttaatcatggtgatagatattgatctatctgaaatcttttacatgttcacatccagttatgtcagcaccatgtctacccgtttatttttgtgccaataccaagctgtttgcattactatagctcaatagtacagcttgaatcagggatggtaatgcctctgaaagttcctttattatacagggttggctatcttgtgtcatttgtttttccatataaagatgagtatatcctttccaggtctgtgaagaattgtgctgagattttgatggggattacactgaatctctagattgcttttggtaagattgccatttttactatgttgatcctacctatccaagagcatgggaaatatttccattttctttaaagggtcaaagttattgctttgacaggtctttcatttgtttgcctagttttaccccaagatattttaatttgtttgtggatattttaaagggtgatgtttctgtgatttatttctcagctcctttattgtctctatacagtagggctactgatatttttgagtaaatcttgtatcctgccactttgctgaaggtgtttattagctgttgtagttcccaatgaattgtaggaagtcttagaatgttttcattatttattcctttacccaggagtgatgcagttgaacattgatctatctgcaatttgtgttattattgaattctcattttaatctgtgggggtcatataagatactgagcattatatcaatttttttcatatctgttgaggtttgctttattggtaagtgtgtggtggattttagagacaattccatgttgtgctgagaagttatattctttgggtttggattgaatgttctatagatgtctcttaaacccaattgggtcaataatttctgttagttcctttgtttctttgttaagtttctgttaggtagtccttctttgctttctttaagagattgttgatttcttgcattttttttttgttttttcttccatttctttaagggattttctctcatcctttgaggttctctatcactttcatgaatttgtttttaaggccattctcttatgcttcctctgcattgggatgtccaggtcttggtggtgtagaatccctagactctggtggtggcttggcttgtaagtctttctgttgttctatgtgtgaaaggtgagcttgttggtttaagataactttattcagaaaaataccagccaaatgcaagccagagcatgcctaggggcagcaaggaatggaggccagagagaaggggaagcagacggggaaaagagactcccatgtgcccgtggtcccttaagagcccatgcggagtcatcctgacctcaccttgaacacgccttgataggtgtggtcaggcacacctgtagccagcacttaggaggcatggttacagtgtctccctacaattccccttttagtctaaaacaggattaaaacttaacagtgtaaagtatccagaattaacaatcataaaggtgaaatacaagaaatctgctattgaacattctaaccatgtctattccagctaaaccctaaagtcatctgaaagaggtgtccaaatatgaacacctccttccaatctcaaccctaaacaataggaaggtcattcctaactaggcttaaactattctaatagacaataatggtaatggggacattattgtctaatagacaataatggtaatggtaataatagcatcctccaagttactttctgctgaaatgggacaatggtagccttttggggtcctgtgggggaaaatgttattatagtgaaagtctctaatggattatatccagtccaggttagatgggatttgttggattgaagatctaggttgaaaccctcaaattgattgaagtcagtacttagaagctctggtctgagtactagtagaaaaggaataagttggatccagtgcaatctaggagtatggcccaattcattttccagagtatccagggattattttcaggcaggtcttcattggctgtttgggactcaaacataagtgttagcagagaaatatttgcttatatatgtatgtatgctggaaaaggcattcatggaaaataatgattgtgagatggtgtacaccttgaaggaaagagccaagaaagacaaagacagtccctaaattcctctcttgttctgtattatatcaattggctctttgatatattacagaaattctaaaatttagttaaacaacgtgcttggattttagggaatgaaagccaagacctacactaaatccagaattgatttacttgaataggaaataaggagaaaaagaattatttgagagacagatgtaaagtttactgtatggcatgttccttatgtttgatggttatagctaccttctcttcttaagcatctacccatgtagagttcttggacttctagagatgagtttccctgtgaagatagaaagaaagcacttccctttcctttgggaggtatttatttagtttatgatatatacctcattaaatatctgtcattcgtccttgtcgaggggtttgtcttttacaactcgaatcttgatcaactttgatggtatctaaagtgtttcttctcctgtggaaacaaatgaaaaacccctaccccaacttaacacatgtccaggcttccataccaaggtcaggacattttttaattatactggttgatttagttcagcagttttttccatagtacagtgtctttctgcagctgtctgttctttgtcattggcaataagaaagtttagtgtcaataaagcattatgcaacctatgtttgggttttttgtttttacttaccagcttgtctatggagcatctccttaagtgttctgttggatctctcaacgactgcttgtcctgaatgattgggtggtataccagtgacatgctttatgttataatatttgaagaactcttccatttttgtggagacatatgcctaagcattgtcagtttttatctgtgcaggtatatccataactgccatcacctctagcaggtgtgtaataacaaaatcagctttttcagagttgtgagcagtagccgattgcaaatctgagaatgtgtctgtagtatgatgcacatgtttcaaatttccaaattctgtaaagtgaaagacatccatctgccagatctcattcctgtgaatgcttttaggataacagccttctggcagtggaatttggttataaaaggaacaagtaggacagtttctccctatctccttggcttgttgccgagtgatggagaagtcctttttaaaacctttgctatttacatgattttttaataaaattctgagacttctagcacactaccaattaacaaacaatcagtctcgtcgttgccttgtgctattgggcttagcagatatatgtaatgtatagaggattgcttctgtttctgattgtttcctgtaattgtaaaaacaacaaggttaattccgtattatcaggaatgaattctgcagtctctatgtgtaaggtgactcactctctgcatattgggaaacagtaactatgttaagaggttctgaaaaatccataagcaccatgagaattgcatataattctgccttctgtatagatgtatacagactttgaactactttttacctcacctgctttataacctgcctgacctgatttgttggcatcagtgtaaaaggtaagaactccagaaatgggtgtttgtcttacaatatgtggaaaaatccagactgattttttatgaatttaattttgtcagttttgggatagttgttgctaatcgttcccaaaaaattagtaagatctatttgccaatattaattatacttccataaggaggaaatttcctcattagttaagggtactgtaatttcacctggatcttttccagtcagttgacagaggcttaatttgccatttagaatcaaatcagaaatcttttctatacatgtctttaactttttattctgttcatgtggcagaaatatccactccaatatggtgtctttcctctgcatcagaattccaggaggatattctctggatggcaagataaccagaatacagtctaaatcaaggtttatccaatctacatgtgcatccaatatcctgttttctacccattgtaaccctttctctgactcagcagatactattctcagactgtttaggtccttatcacctttaagggccatttttaaatgctttaagacatgtccttctaccccagtaatcgtctgtaattgagaaattttcccttgcagcttctgaagactattaagagtttgataacaaacccttataatttgtacattttgaggtttgattctttgtaagcctatcttgtaaccgaaatagttaatagaatctcctctttgtatttttctggggcaatctgtaacacccttctaggcagaacttccttcaccatttccaatatacattccaaagtctctttattagaatctgataaaagaatgtcatccatgtaatgataatttcttacgaattacttccataattctgtacatagtgttgacacaaagtaggactatttagcattccttgtggcaaaaccctccattgatatctcctaactgcctgtgaattattaagagttggtagagaaaatgcattttttctctatcattttcctgtaatggtattgtgggaaaacagtcttttagatcaatgactatgataggccatcatttaggtatcaaggaaggcaaaggcattccaggttatagagagccctttggttgaattaacttatttgtggatctcaggtctgtcagcattctccacttatctgacttctttttgataacaaatacaggagaattccaagggctggtagattcctctatgtgtccagcctatagctgttcctgtactaacatttctaaagcctctagcttctcagaggtcataggccattgtcctacccaaacaggtttgtctgtaagccacttcaattgcagcgcctttggctcctctgaaggtccatcatttgtacctagtttctgtacagcatggatggttggtaaccattttccatagcatcttaccagaccttttctactatctaatgattgtacataatttgtatctgacaccggaggaatattaatctgagtattccattgctgtaaaagataatgaccccaaagatttatagctatatctcccacgtatgttttctgtctccctttctgtccttccattccaatgcagaacaccgagtgaacactctgtcaatctctagatagagttccaattcctaaaaattgtacatttgcctctctaagaggtcatttctgaggccaagacttttgggtaataatagtcacagccaccccagtgtctactaagccagtaataactttttattaattttcactttcaactgagtccttttatcattaatagaagtttgccaaaatatgcttctctcattttctccagtcacatttgtttcttcatcactattcaatctgccatctagagcagtatcatttttcacaataggcaaagaactatccattcgtcctgtgagagattgtcttccatgaccttttgtgatatgtgggacttcttgagtcccctctaggggtttctcagccttaccaggtttccttgaatgtccctggtcgatctacattcattggtccagtgtctgctcttaccacatcttctacacaatccagaaggcagtggctttccatatgaagcattgttagaatttgtttatctacagtttctctttgtataacccattctaccacagctgcaacatcaaggttcctggagccttcgtggtctcatggctcttcctatacaaggttctggttcatagtattagtaacttctagcctcttggtacctattttgacatgtgtaagttgcttctccttcccaagatcttgtgtcctcacctgtagaacttttaatctcctgttgcctttttaaaccttttgagatggcttcacctatcaagctccagcatcttgcacactgtagtcagtgttggctgcatgcaaaacccattcttctaggggagctgatctgatctttaaaggcagaaatattcttttgcattttgggcttgcattttcataagctattgtatatataattgatagtcttttttctggatctgttatccgaaattctactgccctagttaacctttgtaagaagtcctggaactgttctgtaggtccctgttctattctggtataagcttctaggcgttctcctggctcacgaaccttatcccaggtttttaatgctgctttcctgcataaagatagtatatggtcatcatattcagcctgagcctgtgggttagcataaataccctcactaagattcttatctagtggggctacaaaaccttcctttatgccttgacactcaatgcggttcacttcctccctgaccaatgccttccactggatttggcatacattctcaagtacagctgctaccaatcattcccaatctgtgggtgtcaccctgttaaaggttgcccatgaatgtaatagctgttttatgtataggctatggagaccatatgaaacaattgattctttaatattcttaagatccttcagcttcataggttggcatacataagccatctgtccttgggggtgtttcttagtagatggcctttttaccatggtagctgggtaaactaatggagtatgagtaataaccttacaagaaaattcatgatacctgtttgtattccaagcatgtttgtgaatctttaaattgatctaagtgctcctctacactggatggtatggaactgccttctaggtattggagtctagattctaggtcatgatttgctgattttgtgtcctcagcaaatgactgtatggacctatctagtctgtctgccttgttatataagttatcttctaaacattcgaacctatattcaaatttgtgatctgctgccttagatgcttcaataattgatggcatggcattgtccaattcttcaaccgtatcctgggtattttgcacctttgcatctagtttctgggtaacagtgcctatctgagtttctagctggctacagatattcttttgttcgtcacggtcctttgacagcctagcctgtaacgcttctgtcatggaggatctctctgtgtttatcttatcataaatatgatgcatctcatcttgggtaacagacagctctgtctttagcatattagacacagagccaagcttatcatccaatttctgttccacttgctacacatttgtgcaaaaacctcattgcataaagctgttatttcctgtaggtaggtggagaggttatctttgtccctgctcctgagtactctggcttgtaatgttatttgtaccagtaagctaactcccatgcctgcatataggccagtaattggcagattagtgtcctcctcaaacattgaattcatgtaataagcaaaaatattaccaattttagcaaatgataaatcttctgctatgattttacctaatggctcctactccagatgcagtaaatatctttgaacagcaagtggcagaggtgtacagttagtcagcacagcttttggcagtagtcagtcaggcaagatggcagcagtggtggagagaggtcaaacaggcggctgtgattagcttagagagtttatggctgccaaggccaggggaacccgcaaaccctgctgaaagccaaggcctactcccgaggcctactcacctcaaggacaggaggcctctgggttcaggtaggcttcagttcaagccagtcacttgcacgcagctagaaactatgacagtaactgtggggaggtttgtggatgtctcccagctgggcagatgattttgagcatttcagcagcagtgggaggcactcatgtggcacagcaggtcagctacaagctgggagcacctgtggagagagggcgctttcccagcctaggccactgtcccggtggaacctgcagggtctcccaaacagggactaggtttacaatatcccacttctgacaccagataatgtgggaaattaccaatactgggccaggtaaaaatacaagggaatttaatagggaaaagccttacttacagagtgacctagccagctggcacacagcagtaagtacaggaagctgaagatgaaaatgaaagccggcttccacctaagcgtccctcctcttaaactttccctatgtcaccctgaccatgccctggtcaggtacaactgtagtcagcccctaagcaggcatggctacagcatcccctacaagccctaaaatttaaaactagaaagaaaagactggagaaatgcaatggtatttgtcaaatgtttttctgctcatgtgtattgtaagccaaaggatttatggacaaaaaaaaaatgagtaacacatttgtccacacattgaatgtcatttttagtgaacagcactgttgacagctgttatagccctgtatcccaagcaactcactcaatacaatttgcactgattctaatcatttctaaaaaggttgctgttcagaataaacacccacaaaatgaaagcttgtattttcagaggagacattgcttttcagtatgtttgtttatgtccaaatcccatgttatgaacacaacctacttttaaggtgtcagagacctgtaatgctcaaccacactacatgtattacaatacttagttccctaaatttaaactgtatgttgctataggattgagtgtgctatagaatgccagtagataccccttgccacacatatggccacacaaagatatattcataggaatttagccataaataaattctcagttgttttaaacacaagaataaatttattgcaaacacatttagatggatatataagctttcagtattattatctatatatttagtttcaaagttgagtttgtgcttttgcatattagcatgctgcatatttatactttatagatgtgattcctttcaaatgaaaataaagttgtttgtacttctgtgtcttgaggtatgaatatttgtaaatactttatagatgtggataagttcaactgagcatagaattgggttgaatcttggaaaatatttttgacccagagtcatatcccttcagccaattattttttgacatttggttttcattctaggaatattttgctatccatttgaattaggaacaatttcctttgtaacaggggaatctcaaatgcttaattttctatagacagcagctttccttgtaaagaaaaaaagagaacaacaacaaaaagcaaagaaaactagccaagaatttcatcagagcaagaaaaagagattagcaactcaaaggatcttgccctcaaaacccaatacggacaaaatagtctgtcaaagacagatgaaggtccacaatgagaatggtccatatacttagctaatgtactgtgtcctttttcagcaaggaaaagttgagaaatggataacagaaaacacaatgcaaatataagtgcacatcataaaaacattcaattttattgtcaaatacctgtcctataatttggtattattaataacatatattttataaatgcatatattatatattatgataatatttatatcaatcgtttataaagaaaatattgagtttttattataattatccatgatattcattatatagatatgtatgtacatatatagctaaaatttatgaaatgtgtgattttaactacaagagggctagacacactccaccaaaagacttggaagataattcaaatagtatctagcggatttccccttcattgggtagcacttaagaatacaagcacatgcttcccacacagctaaagaaactcttgttggggatggagagatggctcagctcttaagaatacttgctgttctcaaaaagaacccagtttcagttcccatcactcagatggtatcccagttccaaatcactctgattctgaggaatcttgttcccacttctggcctccatgtcatctaccaacatgtatggcatataaatgcatgcaagaaaaacatttatacacatacactaagaaatgctccatgtattagtgcttatatggagtgctaatgcagagacagaccaaggactaaaggaaggattacactcaattatagactggcaaatagaggtatcttagttattattgctctgaaagacatcataatcatgacaatggtgatgagtaaaaacatttaattggggtagctcacttaaagcttcagatgttcagtctactatcatcatggggaagcatgacagggtgtaaggcatacatgatgcttgagaagtagctgagagtcctatatcttgcaggcaacaggaagttgcctgagtcactgggttggaaacctcaaagcttgtaccaccagtgacacatttcctccaacaagtgcatgcctactccaacaaagccacacctcctaatagtgtcactgccttcaggagctatttttctttcaaacagtcacatttcacattttggctcacaaaagcttgtagccatatcataatacaaaagtgcattcagtccaacttcagaagtccccatagtctataacagtttcaaactcatttcaaagtccaaagtttcttcgaagaaaaaagacaacctcttaactgtaattccccataaaattaaaataaaaagcacattatatacctcccacatacaatagcacaagatatgtattaccattccaaaatgtagacaattgagcatagtgagaaaatgctaaaccaaagcaaccccccccccaaaaaaaaacacctgggcaaactccaaactcagcatcttcaagtctgatgtcaaaacagtgttcatatctcaaactctattcagctttgttgactgcaacacacttctttctcttcatctggttccactccttgttagcagttctactcagcaagtattccacaactctgacatctccaatagcttgggttctctaacaccacccagacttcaccatcacagatttacacaatatcttctctaaggcctccattcagggacactcttgacatgtgcatggcctcagtgactttccttaatcattttcttctattcttaactctaaaggaatatccacatggccccagctgccaagttctgctacttgttgggagtagaacatggccacctcactcaacttcactaccattttctgtttcactgcctaagcttgactgttctgtaacttgctctgtagaccatactggcctcaaattctaatatcagcttgctttggccttctgagtcctggaataacaggtatgccccatcacacccatttctaaattattctttagttccttttcacaagttggaaattcagctggatggaatcttgcccttaggtcaccacctatattctctttctttcgttattttattttttaaattagaaacaatcattttacatatcaattcccctgttccctcttcctcccatcctccaatgccttctaacaatgccctctacccataccccatctgatccccaaggacaagtgaggacttccatggaggatcatcaaagtctgtcacattatttgtgggagggcctaggcattcctccatatatcttggctgaaataatactcctccatagggaatggtctcccaaagtccatttttgcactagggataaatactggttccactgttagaggttccatagactgcccagacctcctaactgacacccatattcacagattttggtttagtccaatgctggttccccagctttaccactggtgtctgtgtgctctcaattggtcagttcaaatggttctgtaggtttctccagcaaggtcttaactgcttttcttaaccctcctccttttctacaagtggattccaggagtatgacttagtgattagctctgggtgcttgcttctactttcatcagctactggatgagctcttcagggtgcctggtttagtccggtgttggttccccagctatcagactggggtatatgaccttccacttattcaggtcagctgtttctgcaggtttttcagcatgtttttgacccctttgttggtcactcctccctctctgaaactaaattccaggagttgagctcagtgcttacctgtggatctctgtttctgcttccatcagctacaggatgaaggctataggatgcatttaaggtagtcatccttctcattataggggaatgcatttaaggttgcctctccactattgcttaggttcctagtttgggtcatcctagtggaaatttgtacaactccctagtgccagatttctctttaaacctttcatggctccctcgattgatgtgtctcttttcctctcctctattccttttcttaatacatttacttcattgaacaaggaattttacactattctattccctggtgctcttttactcctcaatttttaaatttatttttgtaagttacaatgttcaacctgttccttttcattataaatctttgtaagtgttaccactaataaccacacaacagagtctgtagaagggtattttgagatttccactgccaatgtaattatccaaaattcttcactgtagcctcaggaagactacttggaaaagagtaaaaagcagccattttttttttaaccaaaatatccaaagatcactgtctgggccacatactaacattcttctcctctgaaacctcttgatccccacagttcaaataatattcaactctcttccatgcttctaatactatagcccattaagctatttgcttattaaatttcactactttcctaattcaaattttcaaagtacatattactccaaaaaaaaccccaaataacaaacaaaggaacaacatatggtctagcctatcacagtaataccccagtcccttgtaccaacacctgtctttgttagagttattattgctgtgaagacacaccatgaccaaggaaactctcataaaagataacattttaaagggctggctcacttatagtttcagagggtcaatccattataatcatggatataagcatggtgaggtacaggcagacatggtgctggagaagtagctgagcatcctgttttgcaggcaacaggaagttgactaagaagctggatggtatccagagtgtaggaaacatcaaagcctttcacaacattatcacatcttgcaaaaatgcaatactcactgcacacagccacacctagcaatagtgccactctgtctgggggccattttcttttaaaccactacaagtagtttatattgtgctatttgcaagacaatgggtaaattgtaaggattactccatgaaagagaatttatctgtttttccccaaagcagttcagtgtctgaacatgcttatggagggtcggtgcctctggagctccagcctccattcaaaagggaccatcattgcacctcatcttctgtagtctcctttgggtaatcatatttgctaggagttcaagagtacaatggccttgtcatgcttggcatataagattctgtaatagttagacaatgggcaagagttgaattggtatagacttaaggaggtgaaagttcagaaatgtttagatttcatgaacatcatctcatttaacacatctgtacaacagagcttacatcttttacatacacgaggttgtgtattctaggaatgacacatggaaagggcattgtgaaaattaacatttaaaccatagattgaaaatagaaaaatatgaaatatttccagtttatacagtaggataaaatgcaatattatttacaaatattagtttactattatatggaaaacagaagaaatttgagatttttatctgctgttttaaaaatttcattatgtgacatgtttttctcaggatgtgtacaaatgtaaaagttgtcagtaaatgattataatttctgtttctaattcaactaatggttcctcagtagagtgaatttttttaatcttttatagagttaaatattttagtaggattttaggcttctctgtttcaatgtgttctgctcactggataaaataactcctgttgatattgccagaagaaaagaacaggaaaatgggggcatcatggtgcatgcttgattctctcttcatggtgttttctgatttctttttcccatgtagagagcgctcctttgaactcaatgaatgctgtgtgtgatgcagagataaaggatgtatagcgcaatacctaagtacatggagtgaaaaattggagcctcttgccttgagatagctaagcattcaaagtgatcacccctatcatgacagacataggactaaagggccatagaagcacttcattaaatataatgttcacaatgataagaaagagaacatgctgtccatttaagcaacaaagatttcaagagtttgcatcccaaagtagtaaactcaactgatactcaggaactcttgagcacagctctgagatatgggtaactaagttcagttagttttgttaagattatataatgatgaccttggtatcaaaaggcattgcaaaaattaatttatattctttgggaatcaaatgaatacataaacatcacacagcattgcctggctaagtcatggaaaggaccatttatctgtaatcaactgtccttctctggctgaattttgacaccttggatgtcaacagtactgaaaagtttatatttaaaatcatttacctgtgtctgaggctttttttagaagccctcattaactcttgttgatatcgccagaattgccttagtgggctccgacctctaaggaaagaaatagctcaaaattcttgaaatcaggagtgggtttgaaagtatgtttatacaatagtgagtattcatagaaaagtccaccactctctaaatccctgtgtcaatgagattttcaaggaatggcatctctgtgaaaggcttaacacacaagaaatggtgaggcatggtatagacctagtagtgcacctgacattgacatccattattttgttatttcccaggtcatctgtatatctatcaattctcaaagaagaaacagttagggataaatattgcttaagcttttaagatttgggatcaagttctttttttaaaaaaaagttttattttattttaaatattgtgtttctgtgtgtatgggtgttttgtcttcatgtatacacaacagaagagagcatcagataggttgaaactacattatagacagttatgagccaccatgttggtgttggaacttgaaaccaggacctgtgggaaagcacccagagctctttactgctgagccatctttctagccagaggatctaagttcttaattgtctcatctttactacaatatgccttcttaaattgtcttgcgtgtgtttcagaagtcctggaaacaaataattctacaaagaatttcaaaagtctagacactcacccaccatgtgctcacaactctagcacttcaaattttctgttaatgaaatgggctttctctgatttcagagcactgattgatagaaagaatgtacagagtcctaggttattgttttagcttcacattaacagactcatacatcctcatctcactaatatgggatttgttgatggcttggtttgctggaggcttgtctgtagctgcaaggagatgcgttccaacttttggaggtattggtcgcctgtttagaaagccttcagtccacttgtgttaatgcaacaccataaatgttcaggctaagtgtgataagacagagactttggcaggctaaagacttctacggaagatgtgtttcttgtaccccatttctctttctgccgcagagtttttctgtttcctcaaaaggagatatgaatcaccgagtccttaatacagctccctgcttactaaccccaggctctgcttttccttgaaagtataatgtgtggtagagattcacagtatagcccaggggagcacagctacattgggattttacagctggattatatgttggacctgtgacaatagggacacagattgctagcaaaggattcaatgtgggctgttatattggacctcctgaatcattgcttatgacattatggtaaaacaacacccctcctaagtgggagaagtactgactaaaaggatttggaattagatgcctgttgctatggtgatttcatgtttctctgggagataataaaatgctaagcatgattatctttgaaggtgaaagacatataaacttactggccttagagaaggccgaatttgagttttgaactagagcattagagcagtccatctccaggttcaattctaacactcactcatcaggcctgaccctgactataaaatgttaagatactgagtgaggatactgccccttgaattcaaaagccatatgtctgcagatctggggcctaaaccagttgttgaaatcttcacattcataaactgaaattcacatgctgttgtatctttccacctttagtgatacataaaaacttgtatgacatcaaaaagaacaaaacaaaatatatccacacatatacacatgtgagtcagcctctctgacatgataactaggtatcagtctcaatacagtctgtcaaaaagggagcactagaattgctagggaggtagggctgtgctgtaggatgtagcaatcctactgacagaaacacaggcaggatcataagaaatggataaaaatgtacaaagtcagagagaaacatcatgaaatagtgtactgcttttcacccttgctccagccatatttagcagcatttctgatatacttcatcagcattcacagaagaggatgcagtgttcattcttctttatctgactcgcttctccgaacacaaatccctgcagctcatccatttttgttgaaaaaaattctattatttgaattgctgggtattattctattacacatatattccacgtcttctttatctacgcatttgttctcagcatctacattgagcctgtatctcaactactcttgttatgacttcagtgtgcataggcataactcagcttttcctacatggatttcaatctctccctacacagcaaaatgtccagacaggtagatcacagggttgttcttttgtgagtgggtaaaaggatattcttagacttatccaaaatgtctgtgataatttacatccccgctgagagtatgcaagtcttctccttttcatcatgtatttatcagaatattatttttcaatttgatgacttagataattggcattacttaatctgaattgttcatgaatgtgtagattaacagtttatgtttcaaaagttaggtgttcaatttctgcattaatttaagattcattattcaagtggcagtcatttcagaaatgtcttttctcatgcaccttagggaatttttgttcaacattttctacacatttccctgtccaacatgcatgtactaaaagaccacctggagaattttccaactcatgtttaccatgctcaattttcattccatcactgcagtgaatcagtgtactgtacactgatcaatacacttatggtccctaggcaaaagacagcatacttctcgctatacatcctaccaaacagggaacttgtgtgatctttttctattgactagaattgaaaagaaagaacttgccaggtcaatagccaagtattaaaaatcaaaagctatattgatctcttctttaaagatcctacagaaagtaaatgtgcattatccacaaaatgcatggacctttgtattttagaggaattgcacatgcattaaatgttcataccttaggggcaactttcatcactctattctgtattctgtttagagtatgggagtttccccctgggattcagcacagcttatcatgtcagtccaggtaagacaggagagacacccagttcaaggacctacaatcactgcatcgtcaatgtgatcagggataaagactagatttctgtgtgattttgtgtttctaatgcagttattcacagaatgactgaataaactaccaagtataggctgaggatccaagtgccacttgggactcacaacttcccacttttggaattagggatgaacacagctgcatttgacagtgtttgaatagtttcagtagtactttactggatggaacatactgtgtatgagcaggtatcactatgttagaatatagagttatatggatctatgcccaagggtgttataggtgagtaatatggatgcagatttttgagaaccctccacactgaatgttattcctctattcacaatagccattaaaagaagaaaatagcctcaaagtccatcagctcatatacacatgatgaaaacagatatttatacaaagaaatattcagttattaagaaacaactttctttgactcctaattgtttttcaaatagaagattgtttaatttccttactcaatactatttcccatggccatgtcaaaagggccaaagtagacaaacaaaagattcccagagagtagatctggaggagctggatgagtgtgcaatagtgaaatataaacagtttaataacaacgacacttctagccaatgaggaaggaatgcaaaaatatataaagtgactgagctctaaaccaatcttctacatgtagtattgcccagcttccttcctccagaggcaaaagacagggcttgtagaattatttgattcaatattttaaaaatatcaatttttttataaatttaaaaatttctaaccctatgaaattaatactccttagaaaactgataagatttaaattttctcttgtcataaaattattttttttctctctatggagagcttctacagtattcacattgatgaatattatataaagtcatcgaatagaattgtttaacctttcatttgaacaatgattttattattaatatatgtaaaacacagatttgcatggttcctagaattattgattaatgtgtctttaaagcattgaatggcaaggaatatggtttccagtttgaagccatttttatccaaaataaagacatatacaatatatataaaattaatatatataaaattaaactgaagatttttataatggcagttcatgattgattaatctatactcttgtaaaccacaagaaaagtaaaattttgaagcacattgacttgtatattgtaaacatattttgaagtgaattactatatgcaatctctatagttagagtctaattgtagatagaaacacattactaatgtcatttagggagaaagatgggtttgtgctcttgatatgaaatgaatgttcatttctttcagaacatatgtcaagtgtcatttttcattaatctgtccagctaacaggatcttgtaatataactggattttgatgtcgttaatcaaaagtggatgggtatttcttaatgagtgacataagattttataatataatattattggtaaattataattctttaaagaaaacttcttgtggtaccttatcatatatcaaatgaattcacaagtaatcatgtttaaacaaatgttaaataattttaacattagtgctaccacaatgactacctaaaaagctgatcattctaattagtgtattgaaaagttattagttctaattgagagagtttggacaaatatgcatcaacagattgtatattttcatgttttgaaatggaaatagagccagatagttaaataatttccctcatgtttactcccaatatcatttttgtcttctggcatctggttcatcaggtgaaatataacttactttagcagtagcattaaattcttctacagctcattttctttacccagtaatgtttacctttttttgaaagctagtgatatgttggaaaacagtaacatgtctaactaacaagatttaccagtaaagagtataactcaacaaactcattttagaggttttagggaaaatacagtattttctatccaatagagaattggatataagccagtgccctatcatttattttaaagagtaaaatagtagatttgctattaatataatggtttaaataatggaacatctaacaaagataaccacaatatgtccccaaatgtcttaaatttatatctttttgaaaaagctaagaggcaacaattatagcaatatttgacttgaaggcatcaagatgggtcaccaggcaaaactacacagtaccatgactgacaacctaagttccatgctccggacccacaagttgcagcaaaagaactcacagttctgaactgcacactgcactgagaaaatttttggaaaatatttttactgcctcattattccattttgtttatccttgcattataagtagttttctttctctcatatgcttcattaagattaagcacatattttcttttatcttttaaatctttacataaaacatgtatttattttgaattgagctatcatttttatcttttatgacatacacataaatacacattgaggtacaatggaagctatgttttctgttcccatagaaacactatataaaacaatttagttaaaacattcccagtctttctgtgattgcattaccttgtccaggatgttttcttcaagttccatccatttgcctgtgaatttcaagatttcgttgttggtttatttcccactaagtaatacgctattgtgtaaatataccatattttctccatccattcttcttttgagggtcatctaggttgcttctacttatggctattataaaaaaaaaacactgctatgaacatagttgaacatatgtccttgttgtatgaatgtgcatttgggtatatgcctgagaatgaaattgctgaatcttgaggtagactgattcccattttcctgagaaaccatcatactaatttccaaagttgtcatacaagttttcactttcaccagcattggaggagtgtttctctttctccatatcctcccgagcatagattgtcactttttttttttattttagacaatgtggctagtataagatggtcatatatggatattagtcatacagcaaaggactaccagcctacaatccacaccaccagagaaagtaggaaacaaggaggaccccaagagaagaatgcatggtcccctgaagaaggggcgagggacaagaacccttgagcaaattgggaaaatggggggggagaattgggacatgtgaagggtagaggggaagaagtgaagggggagaacaggagggatcaggaggattgagataggggaggaatagaggagggcaagaaaggagatgccttgatagagggagccagtatacgtttggagagaggtctgccactggggaaatgttccgtgacccacagggatgaccccacctaggaatataggcagtggtggagaggctacatctgatgcccttcccctataatgaaagtgataactacctaggttgccattcctagagccttcatccggtagctgtttgaatcagaatagggcacccacagctaaaaactgagacatactcctggaatccagttatggagagggaggagggatgagcaaaggagccaaggctttgctgggaaaacccacagaaacagttgacctgacttagtgagagcatggagacaccagtcacacagctgaagaatcagcattggacaaaaccaagccctctgaatgtgggtgccagctaggaggtcatagcagtatggggcatctaacagtggagccagtgtttatcccttgagcacaaatgaatattgggagcccgttctctctggagggataatattgcaacacagatacacaaaagagggcctaggcccttccacaaatgatgtgacagactttggcgatcccccatgaagggcctcactatccttgaggagtgggtggggatgggtaggagttggtatggggggcgttctgagagagtgggagggagaaacaaaattaaagaaagagaaaaagaaaaaaaataaagcacaattcctggtctcaataacaaaaccaaataaaaaagatagccacagtcataggttatcagaattttacactttctgcttcaaatgcttaaagaggacttgctttcttacttatttaaacatttagctatattagacataaaactatttcactcatttttgtaaaccttaaatttctttcttttagtaattgatgtgtctgcatgttaattattttcaaagaactaatttcccttttttatttatgtcaaacatttctttttatactttgggacctttttatttttattcagtgaggaaggccactcagggcccagtgcagtgtacagtttggaaatgtcagttactttactcaaccttgtgggttctgtgcattgaaaacttttgcctctggttgatcttgcttccttgaagtcaaatattgctgtagcagttgcatattagcttattctgaaagatataacttccagacacttgaggacatgtgttattacctttactagctattctattatttaaggcattatattaatatgaaaatattttattatattctttaaaacttgaagatcaagcactggtttggtccccaaaacctcttggtttattgaattatactctatataggaaaaacttgttagttggacacattattattaccttattaataatactaaacatattatttaaatatgcaataatccttcattcttttaaatggtagtttcataaacatgcacatctatatatttgtcttttttaagtttatggaatcttattgctttcattattttatttaaattcattaattactactcatatttacatatccattccccccattccttcaacctcagatcctctcatgtcccccagcaaccccccaatacatccccaaaatcctccccaaggatagtgaggccctccaccagggacctgcaaagtccatcatatcatataggggagggcctaggccctcaattctgtatctgggctgcaataatatccctccataggaaatgggcacccaaagcccatttgtgctctagtgttaaaggctggctccactgttagacatcccatagactgccttggtcttctagttggcacccacatccagagggcttccttcagtccaatgctgtttctgaagctttatgacttgtgcctccatgctgactgtgacctttgccttacagaagcttctcagtttcaagaggttccatttattaattgtcaatctcaatgtttgtgctactggtgttatgttcagaaagtggtctcctgtaccaatttgttccatggtaccacctatgatggggaatgtgctactgtgtatgtttatcttattgattattgaataaaatactgtttggccaatgagacagcaataggagtcaaagagatggaaataggagtcaaagaggattctgggaaatgtagtagagaagctgaaccaggcaggaagtgacataacaaggagactcatatttaagcgaaagagaaacaggaagggctctgttttcccctcggctcctgcttcagcagcatgatgtgatcactagctaggagggatgccaataaggtgtccaataagataaatcttataaaatatatagatgtatgataattgagactgagctaacagatgagaatcctagtcattggccaagcagcattgtaactaatacaagtctctctgtgtattcatttgggcctaacttgggcagacagctgttgtaaagctcacacgtggcagtggagctcaggcagcttttggtggaaagatttatcttaacacacccaccttgtcatctaggaggttcagtgtggctgaatttatgttgaggttcttgatccattgggatttaagttttgtgcatggcgatagatatggacctatctgcaatcttctacgtatccgaatccagttatgtcaacaccatttgttgaagatgccttctttcttccattgtataactttagcttctttgtcaaaaatcagttgttcataggtgtgtgggttaatatcagggttttcaatttgattccatttgtcaacctgtcaacttttgtcctataccaagccattttcagaactatggctctataatagagcttgaagtcagggatggtgatgcctctgggagctcttttattgtacagggttgttttggctatcctgcctatattgtttttccatattaagttgagtactgttttttcaaggtctgtgaaaaattctgttgggatttagatgggaattgcattgaatttgtagattgcttttggcaagattgccatttttactatgttgatcctacctgtccaagagcatgggacatctttccatttcctggtatattctttactattttttctttaatgattcaaagttcttactattcaggtctttcttgtttttgtttagtgtcaccccaagatattttatgttgtttgtggctactgtaaaaggtgatgttcttctgacatctttctcagtgcatttatcatctgtatatagtagggctactgatttttttagttaatcttgtatcctgcccctttgatggaggtgtttatcagctgtatcagttccctggtagagttttttgggtcactaatgtaaactatcatatcatctgcaaatagtgaaaatttccttcttcctttcctatttgtatcgccatgatctcctattgttgtcttattgctcttgctagaacttcaagtacaatagtgatgcgatatggagagattagacagccttctcttgttgcatattttagaggatttgccttgagtgtctctccatttagtttgatattggctgttggtttgctgtatattgcttttatgatatgtaggtatgttcctgttattcctgatcacttcgaaggggtgttggattttgtcaaaggctttttcagcatctagcaagatgataatgtgatttttctttttcagtttatttatatggtggattacattgaaggattttagtatgttgaacaatccctgcattcctgggataaagccaacttgatcaagttggatgatttctctgatgtatttttggatttgatttgccagtactttgttgaatattttgcatcgatgttcatgaggtatattggtatgtaattctcctttttcattgtgtctttgtgtggcttgggtaccaaggtaattgtagcctcatagaaagagcttggcagtgccccttctgctactattgtgtggaacaaattgaggagtacttctattacctcttctttgaatttctggtagaattctgcattgaaaccatctggccctgtgctttattttggttatgacacttttgatggctgcttctatttcattaggggttatagatctgtttaaatcacttatctgttcttgatttaattttggtaagtgatatctattcagaaaattgtccatttcctttagacattttaattttgtgtagtatatgttttcttttttgtcactttttattagttcaaattaggaaaaagttgtttcacatgtcaaacccttctttttctccttctcaatcccctccctcccacctctatcaactacccccagattactcccaccccatccatcctccactccgagggcagggtagggtcctccactggggcttcccaagtccaccacatcatcctttgctgggcctaggtcctccaccatgtgtccaggtcaagaatatatcccttcatgtgggatgggttctcaaaatcccttcttacaccagggaaaaatactaatccactaccagggactccctagatggcagagtcctcctaattgacatccatgttcaggtgtctggaaccagtcctgtattggcctcgaagacagcagtctgtcgtccatgtgctcccccttgtacaggccagctgtttctgtgggtttcaccagcctggtaccaagccctttgatcttcattcctcccactctgcaactatgttccagagttcagttcagtgtatatctgtgggtatcttcctctgattccatctgccactggatgagggctctaggatggcttaaaaagtagtcatcagtctcaatataggggaagggaagtttaggttatcctctccaccattgcctagattgtcagttcatgtcatctgtgtaggtctctggaaatctccctagtgcaagatctctctttggactatatgggcttcctttgatatggtatctctcattctgctctcatctattcttccccaaactcaatatttctgctcctccatttcctcctctcctcttctcctcctctcattctgggagctcccactccccttcccacatgctcccaattagctcagaatttccttccccttcccattcctgtggtccatgcattttccccttagagtccatcttgtttcttagtttctttggtgaaaggattgtaggatggtaatcctttgctctatgtctaaaatttgtatatgagtgagtacataccatgtttgtctttttgtgactgggttacctcactcaggatggtttctgctaggtccatccatttgcctgtgaatttcaagattccattactttttttctgctgagtagtactccattgtataaatgtaccacattttctctatccattcttcagttgaggggcatctaggttgcttccagttttgggttattacaaacaatgctgctatgaatatgtttgaacatatgtccttgttatatgaatgtgcattatttgggtatatgcccaagacaggaattgctggatcttgagttagactgattaccgttttttggagtaacagccatactgatctccaaagtggtcttacaagtttgcactcccactagcaatggaggagtgttccttttctctgcatcctctccagcatagattgtcattggtgttttttattttatccattctgacaggtgtgaggtggtatctcagagttgttttgagttgcatttctctgatggccaaggattttgaacactttcttaagtgtctttcagccatttcagatacctctattgggaattctctattcagttctccaccccactttttaatttcattgttttgtgtttttttgtggctagcttcttgagatcattgtatattttggaaatcatccctctgtcagatgtggggttggtgaagatcttttcccattatctgggctgttgttttgttttagtgagtgtgtcatttgctttacagaagcttttcagttacaggaggtctcatttattaattgcagatctcaatgtctgtgctacaggtgtaatgttcaagaaccagtctcctgtgccaattggttcaagggtatcccccagttgctattctagaaaatacagtgtggctggatttatgttgagatatttgatactttgcacttaagttttgtgcatggtgacagatatggatatatctgcaatcttctgcatttctgaatccagttatgccagcaccaattgttgaagatactatctttcttccattgtatagattagcatctttgttaaaaataaggtgttcataggtgtgggggttaatatcagggttttgaatttgactccattggtctgtctgtctatttttgttccaatatcaagctgtttttagaactatggctctataatagagctggaattcagggatggtgatgactccagaagatcctttattttacagagttgtttgggctatcctgggttttttgttttttcatataaagttgagtatggttctttcaagttctgtgaagaactgtgttgggattttgatcgggattgggttgactctgtagattacttttgacaagattttcattttcactatgttgattttacctatccaagagcatgggagatctttccattttctggcatcttctttaatttctttctttaaagactcaaagttcttaatgtacaggtcttacacttttttggttagtgttaccccaagatattttatgttgcttgtggatattgtgaatggtgatgtttctctgttttctttctcattggatttatcatctgtatatagtagggctactgaattttttagttaattttgtatcctgctactttgttgaaggtgtttgtcagctgtaggagttcccaggtagagtttttcaggtcacttatgtagagtatcatattatctgcaaatagtgaaagtttgacttcttcctttccaatttgtgtccccttgatctccttttcctgtcttattgctctagctagaacttcaactaaaatattgaagagatatggagagaatgtacaacattgtcttgttcttcattttagaggaattgctttgaggttctctccatttaatttgatattggctgttggtttgctctatattgcttttatcacgtttaggtatgttcctgttattcctgctctctccaagatctttatcatgaagggttgttggattttgtcaaaggctttttcagcatctagtgagatgatcatgtggtttttcatattcagtttgtttgtatgatggattacattgatggatttcatatgttcatccatccttgtatctctgggatgaagcctatttgatcatagtggatgacttttctgatgtcttcttggatttgatttgccaatatgttgttgagtatttttgcatcgatgttcatgagggatattggtctacagttctttttttttttgttttggtctgttgagacagggtttctctatgtagctttggaacctatcctgtcactggttctggagaccaggctggcctctaattcacagagatccccctgcaactgcctcccgagtactgggattaaaggcaggtgccaccaacgcccggcaactgcgtctatttcatcaggggttataggtctatttaaactccttatcagttcttgatttaattttggtaagtgatatctatccagaaaattgtctatttcctttagatttttgaattttgtgtagtacagttttcaaaatatgacctgatatttcctcagtgtctgttatcataccccactttttgtttctgattttgttaattagcatgctctctctaagcctttttgttactttggatagaggtttgtgtatcttgttgatcttctcaaagcaccagttatttgtttcattgattctttataatgttttctagtttgtactttatttatttcacccctcattttgattatttcctggcatctactccttcgttgtgagtttgcttctttttgctctaaagctttcagttattctgtcaattctctaatgtgacttttctccagtttctccatgtgggcacttagtgctatgaacattcctcttagcactgctttcagagcatcccataaatttgggtattttgtgtctacactctcattaatttctaggaagtctttaagtttttttaaatttcttcctcaaatcaggtatggtgcaatttcgaattattcaaattccttgagtttgtaggttttctgcaatttgtattgctgttgaattctaactttaaagcatgatgatctgaaaagatacagggggttatatcaattcttttgtatctgtggaagtttgctttgttgtccactatgtggtcaattttagagaaggtgccatgtggcactgagaagaaagtatattcttttttgtttgggtggaatgttctacagatatctgtaaaaaacagttgggtcataacttctgttagatcctttgtttctttgttaagtttctgtctgttggtcctgtttagtggtaaaagcaaggtgttaaagtctcctaatataagtgtgtgtggttttatgtgtggtttgagctttagcaatgtttcttttacaaatgtgggtgcctttgtttttggggcatagatgttcaggattgagacttcatcttgatggacttttcctttgatgagtatgatatgtgtttcttcatctcttttgattgattttagtttgaagtccaatttattagatattaggattgatacactagcttgtttcttggccccccttgattggaaaatcttttcccaaccctttactcgaaggtaatgactgtctttgaagttgaggtgtgtttcttgtaaacagtagaaggatggattctgtctttgtatccattctgttagcctgtatctttttatacgaaggttaagaccattgacattgagggatattaatgtccattgattgttggttcttgtttgttttggatttattttggtggtgtcattgtgtgtgtatttctctctcctctttcttttcatgtttggtaaaatagaattatctattgcctatgtttttgtgagtgtagttatcttcattgggttggagttttccttccagaactttctgtagtgctggttttgtggatatgtgttgtttaagtctggttttgtcatagaatatcttgttttctccatctatagtgattgaaagttttgctgggtacagtagtctgggttggcatccatgctcccttaatgtttgtaggatatctttgcaggaccttctggctttcaaagtttccaatgagaaatcgggtgtgatactgataggttggcctttatatgttacttggattttttctttgctgctcttcatatttcctcttcattctgaaggtttggtgttttgattattatgtggcgaggagaccttttttggtccagtctatttggtgttctgcaggcttcttgtactttcattggcatgtctttcttaggttgggaaagttttcttctatgatttttttgaatatgttttctgcacctttgagttgggttccttcatcttcttctatacctattatccttaggttttgtcttttcacggtgttctatgtttcccagatattttgtgttaaggatttgttggacttaagattttctttgcttgttgaatttgtttcctctagtttatcttcagcgtctgagattctgtctttcatctcttgaattctattggttatattcacacctttagttcctgatcctttatccagcctttctatttccagcattgcctcattctgtgttttctttattgtgcctatttcatcctttatgccttgaactgttttgagagcttccttcacttgttttgctgttttttctaggctttctttagattctttaagagatttgtttacttcttgaattttttggtttttcttttcctccatctcatgtattttttccttgttttttcttctatttctttaatggattttcttgtttcttctttaaaggtctctatcatcttcctaagataaattttgaggtccatctcttcttcatcttctgtgttaggcttttcatatctttctggtgtggagtccctagattctggtggtgtcatattggtttttctgttgttgagtgtgttgttactctgtcttcttcccatcccttcttcccgtgagtgcaggtggggtctctccccctctttggtggctggcggagggctcagccactgacagcagccagatggcagagggtggtgggtggacaaaggtggggagtgtctggactcagggtgggccttcatgttttgggcaggtccactcttgcccaggtgggctcaggcagaagtgagcaggggatgtttggggaggtggggaggcagagcagtgcacagattcacctcagactcaggcacacaccacaggatagagggcagagtgtagatagaggggtgaggtgtgttagtatagatttccaaaatttggcctgatgattttctggatttcctcagtgtccattgttatgtcccccttttcatttctgattttgttaattagcatgctctctctctctctgccttttggtttgtttggataaaggtttgtctatcttgtcaactttctcaaagaatcaactctttgtttcattgagtttttgtagtgttttgctggtttctaaattttattaatttcagtcctcaatttcattatttcctggcatctactcctccagggacagttttcttccttttgttctagagctttcagttgtactgttaattctgtagtgtgactattctccagtttgtgggcacttattgctatcagatttcctcttaccacggctttcaaagtgtaccctaattttcggtatgttatgtcttcattctccttaaattctaggaagtctttattttctttttttatttcttccttgacccaggaatggtgtaattgcaaattactctattccatgagtttgtagagtttctgaaatttgttttgttgttgacttctaactttaaagcatgatggtctgataagatactgggggttattccaaattttgtatctatcgaggtttgctacattgctgaggatgtggtctgttttagagaaggataatatggtgcggagaagaaggtatattctttcatgttcaggtggaatgttctatagatgtctgttaaacccaattgggtcataacatctgttaggtcttttctttgttaaatttctgtctggtgctcctatctagtagtgaggaggggtgtggaggacatgagagtgcaggaaaatttagtcaggggaagaattgaggagagcaagaaaagaggtaccacaatagaggtaggtttaaagagaattctggcactaggtaaatgtctagagagctatgagtttggtcataattaacaatctaagcattggttgagaggctgccttaaatgcctttctctgataatgaatatgatgactaccttatatgccatgctagagccttcatccagtagctgatggaagcagaggcagagactcacagctaaacactgagatgaactctggaatgcagttgtagagagggaggagtgatgagcaaaggggtcaagaccagactggagaaacccacaaaaacagctgacctgaataagggattgctcatggaccccagactgatagctgggcaaccagcataggactgttctagacaccctgagtaaggatgtcagtttggagatctgggcaatctatgtggcttctggaagtggatccatatttatccctagtatatgagtggactttaggagccctctccacataaaggaatagtctctcagcctagacacatggggcagggtctaggctctgcttcaaataatatgacatattttgaagatcctccatggaaggtttcaccgtccctggggagcagaaatgggttaggatggggtgggggcaagtgaggaggggaggaagaggtaactgggatcgacatgtaaaagaagctcatttctaatttattttggtattttttaatagttcaaattatgaagaagcttgcttcacatgtcaatcccttctccctctccctcccctcctccccaaccctcccccttccctcacctgcccccccaccccatataccctccactcctcaggcagggtagggccctcaagaggggctccccaaagtctaccacatcatcctgggttgggcctatgccctcccccatgtgtccaggccaagagtgcataccttcacatgggatgggctctcaaagtcccttcttataccagggaaaaaagactaatcctctaccaggatccccctggaatgtgaaggcctcctagttgacatctaagtttaggggtctggatcagtcctgtgctggactctctaagtttttctcaactagggattttctgtttttcatctcaacatgatcatttggttatgcttaactgtcgtgggagttagtgcaaggtcatcatggtcacaccacatgcctcatctatttccagtatagattataatggatataaggataggaacctgtaacttaaaggagattttacctatgtgtttaatttgtttaagtattattgtgtaaatgaagaattatgccctatatatttattaaactttactttgtactagataccatgtggatgttgaagacttcataaatttctgtgactagagaaattgtaaggtaaaagccctcatggaataattcctttcattaacttgtaatcaattgactctattgaggcataaaaatatcaaagcaaaagtacccctccctgatgcttcagagaatatttggcatcaattagaagaatggtacagaagctaaataatagagaaactttaaaagaattagtgatgctctcatatatattaaggactataagcaacatgaattaaaatgcaaaatgcctttggttgattagctatacatccataacatatattcaaaaggcctacctcagacatagacaagatctgtgatttttgcttcagcctttgcaagcccctatgagccctgcttagttgattctgtcttgtattgtcatggttctccaatttctggcttcagtaaaccttcttccccatcttctgtggggttctgggagcgctggctagtatttggttacaggtccttgcatttgctcccatcatttgtagatagcacttctctctgatgacaattgggctagattttgatctacacatatagtagaatatgattattaatcacttcattggcttcttttattccaaacatgtttggttctgttctaagtctctgcctgtccagaacctgattctcagctatacaggcagtgtcaagggtggtcttcctctcatggcatgggcctcaatttgtttgagtcattggttgaacactcccacaagttctgtgccatcattaccttagaacatctcacaggcaggacaaaatgcagattgaatatcttgggctgtattgctatttgactctcactagtgaaagccttgcctagttttagaagatggatggtttaggttccatacccccattactaggtgtctttgctagagtaactttcccaatttccagggagtttccactgacttaggtttccagggagtttccactgacttaggtttccacatctccctccctctgtctccctcttattccagttgtctctcccagtatgtcctcctcatctcttttgattaatttttatatttctttagttagatatgagaatgtctatatcaccttgcttcttagggccattgggtaggaaattttgttttaacatattctttgctgtatttcttctgttgtatcatcaacacctgagattctttcttccatcttttctattctgttggtgatgctttcatctacagttcctatttgccttcctggaatttccatttccagaattctctcaatttgtgttttctttattgattttatttccaatttcagatcttcactagttttattaatttccttcagtttttgtttttttcttagcttccttgactttcttcaagagatttcttcaattcttcctatatttagattgtcttttgtcaatttctttaatgcatttattcatattctctttaatgaactccattgttttcataaagtttgttttgaattaattttcctatgcttaagtggtattggaatatccatggcttattgttgtaaagtaactgttctttgggagtggcatactgcatttgctgatgttgaatatgttcttacactggagtctaagcatctatatttgaggtgattataggtgtaggcgacaaagtctgtttttttttctttgttgaattagtgttttattttcttcccttggtttctatttctttgatcttttggctggaatggcctttggttgagtaaagtgtctccattcaagttaggggctctagttctgatggccgcagtggtctcatgttgagcaggtggtgtctttgtgatttggggtttcaaacatgccattgaggaagggtgggaattgggtatacggtgggtgggaactgagagaatgagtatttggccccaggtgggcagcctaccttgagatctggtggcctgttgaggcctctggtcaactaggatgcccctgctggagttgtttgccaggaaatgatgtcaaagaagggaggggtgattttaagtagtgtgtgcaggcactgagagagtaggggtgaactctgagatgtttgcttacctggatacaaggcagtctataagtataaaattattagtgtcttaatgaaaggcattttagcaagggaagatggaacagatgtatctgtttgcaaaagtgattggtgtcatcctaaggatctgagttccctcctcagaatccatggtataagggtagaaacagcatagagagatctgatgcctgcttttaggctttgtgaaatgtaactacagccaggagacaattttgaaaccaatttcttagaattggaaggggaagtgacttaaaatcattttggtttgaaaagttagtcttgtggaacagccaaaccatcacaaacctttctactaagtgaaaaatcagtttatctgttgatgtccaagctgttactaagaataatttttataacagaacagcttcaatgaaataggcctctgagaaccccagtcattaaattattgtgtttgggtaggagatgagtccatgattagaagtgaatttttttccttgttttaaaagtataaaaaaattgcaggacttctcagtatgtgatgatttgtaatgctaacaaattgggtattttctgattttgaactagttattctggactcaacacaaacatagaaaccaggtgtggagcacttgtccaggcagacaccattcccagtgctttgagaattccaggtgtgaggtttgtgcagtatggattctcatgctaatttgttatgaggagatactgttcagcgaacttccagaaaatcatcattattttctattgccagacttcataaggaaaactttttatctaaacatttataaatgctaaagtcaaaattttgttttcaagcctaacaattacacacttaggatgatgcctcagttagtcccccttttagaatttgaattcatgtttcagttattttcttttttctctgacactttcctgcgtttgtttccatttttatgacagctcagtgtttactacagaaactatacacactttgaaaatcaatattatgagggaacctggtggacttgaatgacttaaacttttctgtattttattgctgaagcagagcagactgcaaaatggccctgatttcagaagcttcttgaacaagaaatatacatggatcttggggatttaaattaaaagaagaaaatctcatggaagagataagaagcaaaatatttttccacgttttggtaaggaagagcagacagcttatggagtgctctggagatatgaagttatggtgtctagtagtttaccaagaacagaagacaaaggctgtaagaaggcaaaaagaattcatttccaatgtggaaaatcaggcatctgttagtctccattctgctgaataagaatgttcaaaataagtaagagaccactcatcatattgagatatgtcataaaaacctgactctatactagccttaacctacctgtctataaagtatgccattttccttttatattcattccacattagcctgtatacagcaatatcaccaggagaaacaggataataaatctatctatatgtttcttcactagacataagtatcaaaatttgtatttcaaatttagtattcaacttgcattaaaacaacttacaaaatgtttaatcttttcaaaaaatttacatgcaacattatctaacagtccttatttttttcccttgagagaagagaaattgaaaatagacaaaatgggatattaaaaaacataattgttcactgtctagccacttctgcagagagatttaacagttaattcatttcagtcaataatttgaggaaaagcctctttattttcttaagattcaaaaaaaatggtcagaatcatctcttttgaatggtgggaaaatttgtcatctcacttttctgaccatggccttttcatcagttgacagttttcaaatagcatcattgatgtaatcccaccctttaattccttttaattgatttttataaaacaagtttgcttaggcttctgctatttagtcactatcctgagtcacagtgacaagtaaaatctgtaggtacagagagtaaagaatggttccgtggattcctggaccaccacataattatccaaatgtaacaaggacccaaagaatggcaggcacatgtgatgtgctaattagatgcttaggtgtcattatctcccctggagataatacttaattcagggagctgttgtcagtgagtgtggaactagatggcctatactaaagaccctgagttctgccactattttgtcatgatggattgacaagtaggttgacttccatatggtttcatctccttctccatcaaagagtgaaacaacagcatgttttcagtaggagttttagaaggaagaaatgagttagcatctgtaaaaatgattactacagatcctggtacatgaacagatgatataactcttagttaagaataaacatatttaataaatatggactatatccaaagacagcaacaagtgtgtttgagtatgtttgtatgtatgaagccaagtttgtagtccctcctaagttgatggaatactaagttgaaatactttagttagcaagaaatgatcaaactctgaatcatcttttgaatcaaagtacctaccaatgctatgctgcaggatcataactccttatataatgcaataaatgggatgccaggtcattttcaaattaccagtgccttttctttgaaatataattttcttaagaattctttttaagtataaaaatatctatacctatatatcctctacaatatttttctttaaaatgtgtatacattgtaatacaaaatcaaactgaataccatcccttctttatcctcgttagttttttatttaatacatcttaagttagaataagatttacatcatctcccctatcattttcttctctttaaaccctcccatgtctctacctttcagtccccatatgtgtgcctccatctgtctcctactaaatttgatggcaattctttatttgattatacacacacatatgcacccatacacacatataaatacaacagataaatacaacacattgaatctgtttttgttgtttgtatatgtgtaatttcagggatgcttgctgtgcattgggcaaatacttaaaggagccatccttagatgggctaatttcctctctctcagcagtcatgagttgcctgtaataattttgttcaggagtgggactctgaaaattttcctttcctgattagcatgtctcttgatattttctctgtccagttcctctttaagcagctatttctaggaaacatgatctcaaatcagacttcccagtcgtctgcattgaacagtattcctgcctccacgaccacggtgttccctgagccttaggtacagaagttgtgttgaagatatatgtgcgaattcctgcttggtatgcagttgtggttttcagtaaggtccatttgctacaaagtgaagttctttgatgacagctgacagctgcatgtatctctgggtatatgataacttttagaatgcagccagcaattttattgctccagtaaagtaataatataagattctgcaaaaaaaacagggcctcttcagccccagggagttggcaatgtttccagtataagctatcatgatttcctttctgttgagcaggtcttcagtccaattagacagttgacgcttatgtccaatgtataaacaccaccactgcgcctttaatgtttgtgtgtgtgtgtgtgtgtgtgtgtgtgtgtgtgtgtgtgtgataccacttgggctgacagtgctccatacaagaaccataggttacctaacaaaatctcctgtaccacatgtgaaaccctccatttgaatttttggtcaagggggtccaagtgactctcaagacaacaaaagctttaattctcttgtttgaggcccttgtttgcctctcagaggtggaaggatttggggactttctggtgactcagatgtttcaagctggctctaacctgaaaacctcattcctnnnnnnnnnntcctgctgcatgccccttactatgggaaagtactagtgcatagtaccaatggagggacaccatcaacagccctttctaactatgatatctatgaacaacaatgatgatcagtgtttgtcattaatacaatctggaatcaattgggattggaaaattcgcccccccttgcattggactgtgaccatgtctgagagagaaggccttgactgatgatagatgtgggaagtgctcaccaaatgtgggccacaatcactgattagcctgaatatataacaaagcatgcaggcagccagacaaaatgaggtagccattaagcagttttccttcatggtttctcattgacttcctgacctcacttccctcagtgctaaattgtgaacagaaatataaacaaaattaactgtttcttcctcaagaagagttagtcagaatatcacaatatttaacaatatgagtgctattaattatagtttgtacaatatgaatgaaaataaaaattaaagaaaatagaaactatggagaagatatgaactgcataaatattctgcgaaatcctcatcaaaattctagtagcatcattatcagaaataggggaaataattattagattcccataaaaaacatactagctaaaatatcaaagcaattgttaccaagatcaatgaaaaacatcacattataaaacttcaatatgcactagagtattaaaatcaaaacacaatagtatatttatttatgtgtgatatggttaaataatcataattcatgataactatgcaaaaacattcaaatcagtattttgaaaccatatctgcattccctctcaagtgtgcatttctgctaatgtccaatatatataaataatattagtctgtcaaatggtaaacaagaaaaggtaatgtattatatatcaaaatgtataattatatattcatgtaataaaggaaattgtgtcatttatgacattgtaggtaaattcagatgaacttaattaagacattgaaatgagaccatagagagacaaataattttgtctcgtgtatgcataactttaaaaatttagaatagttttgccagggttaaaagatttccctgaagcatgagaaaataggcaaagacatcttttgctatgagtaaatgtgagaaaaatttaaaaatcatttgacagtaaagccatgaattattttctagtcattctatcctcttacattagccagcatctttattttattcctgtgccatgttgtttgaattcctagtattctgtagtatagtttggagtacaataaatgatgtatggagtatgatgctaagaattcacatagtggaaaaatgaaaatgtttcctgcattttaccagtgatgactggtatgtatcatgtggcataaaagcattacgtaataaaaaagtagagagcttaccatgtttacacactctagcaaattcaggacactacagaggcaattgtgtattaaataatatctatcagtttacaaaaacagcagaatattagggagtggaatgaggatagatggtacacaatctttttagaaatccagtcaccatctattaatgtattttatcacagagttcctattataactaatataactgcatggacattgatagtatttcctgtgttataaaattaatgaggacctgttttcagttggtgggagaatagtattccatattcagaacacggggaatatggaatactataccaactctctcgatcttcctcaacctcactgagcctcccctcttctatttcctccctccccctcctctttcttgctcctttgctttcctttctcctccctgactcagatccatggtatatagtttttgtctatttttagctgataaaaaagaataaatctttcaggaaggactcaattcagaagaacattcatattccaaaattaatatctattttcagcctgatctttttatgcaaatgtttcatttaagtaccagtatcctttgattttttttttttttttttggattttcgagacagggtttctctgtgtagctttggaggctgtcctggcacttgctctggagactaggttcacctcaaactcacagagatctgcctgcctctgcctcccgagtgctgggattaaaggcatgtgccaccaacacccggtgaaatttggatttattacaactttaccaaacagtcctaactgagtttgtaaatctgccagtctcatgaacatgtgaagcatgaatgactcatatattgtcacattatgaagagcttttgcttgtgtatttatcttctgataccttctggcacatttagtaatttggcattctataatgcctgctttacatttgtaaaaaaatgtcttccctcttggtatggaacagtgacagatgacacctttaacattttacactttacttatttatgccacagattgctgccatgggttattattaaagtaaactttctccaataccagtacaatactggttaatgggtttgtgtctgtttaactgaaaactctggagaaggtgtaatttctgatgacattggcagtccattttggaacaaataattttaataatgccagcaccttctaggagctttcctctctcagctactcaaacattgcctttttgtctattgtcatatgatcgaaggagctattgaggcacaaagtcagttgagattttggtcttcactgtgatgcaaagcatcacaatcagtcagagagtttcaaatttcaattttctgtggctatgaagaatttcaaacattccttggcacaagcatctaagcttccttgtccttcagtatttttggagcttctgtactcttctcaatagagaaatgtaagaagtttcagtccagttcatactgaattaaatatcattaccctcccttgataaagcatgtttggaaggtcatggggaattttctctgtggatcttctcagagatccaggacaatgcagtaggactgctgtgtgacagagagcaaggagacttggctattgatgtgtgagacacaaagacttgtgttctctaagaacacaagttcttagagagagatgagtatgatacaaaaagccaggaataaaatgagcacagatcacccagaatcagagacctaaattaggtaaagccaaaaaattacattgtttaataaaattgttttctaatttttagcatatatatttgagatttttgctatgacattcccactaattgatgccctattgaacaagtaagttttttatgactgtattcattgtttatttgaaattgaaacaaagcagacattctgtagcaagtaaaatacgagacactcagatcaacttgaatctcagataaataatgaacattactttatcatagcatgtgtaaagtattatatgggataggcttatgctaaaccttattgttcactggaagttcaaatttaactgtttcctcagtttttacctattggattgggaatcaccaatgaagtagtatccctgtggtaggacaagaaacagcctcaggattaaaaaccaaacaacagaagtaggacatgaatctaataaagagccgttgaaagatcatttaagcctagaacttacactgaaaaatacaccaataatagctaaagaatagagagaagcctcagagatgtaataatataaacttgaaatatgtaaacacaacagtgcaaccaatacaaatactcagtgtgctcaatgaaggaacatgaggttatctgaaagataaattatattgttcaaaactaagagttcaatagatatggaaacacacattttaaatacagttgacctgttagccatgtattttttatttcaattattacggcagaacaagtaaattttaaatacaaaatgatatgttataataagggcaaaatgcatattcattataataaaagtccttaagtccctggattcctatttgactcttcctgctctttgttgctcacccacattttgtgatttattgtgcaaggtattccttcctaaagtgtcagtaaagatgcagccttgggcattttttcaaatggggactctgggtggataatgtggttttttttttataaccttttatgcaacttcaaatactgccatgaaaaataatttagcagaaaaggaaaggtgaggcacaatttaacatttccttaagaacatgattctggaagttcacattaaaaaacaattttcnnnnnnnnnnnnnnnnnnnnnnnnnnnnnnnnnnnnnaattctgcagattatatttttgactgccttactgcttttgtaataatgaaactttagatgaagtaatagtaaagttgtgactattattgtaacttttacccagccagcttttactgtcactgtcttagttagggttaccattgctgtgaggaaacaccataatcagaagcatcttgaggaggaaagggtttattctgtttctgttgctatatcatagttaatcaccaaagaaagttgggaaaggaattcaaactggacaggaacctgaaaccaggagctatagagatgccatgaaagaatgttgcttgctggcttgctcattgtggcttgttcagcctgatttcttatagacctgtagttgtccttacctgggggacagcaacctagagtaagaagtccagggaggggaatggggacaggagaggagagagaatgaccacaagacaggattctgtccaagtggcaaattttatttttccaggctagcttatataatcagtagtatgggataaaggggagggggagaagaggccaagagccaggtgttagtttaagcaggatgttagaaaactatagaaaaaggatgttggcagggtaaaaagttcatgggtggtggggagagggagggttacctaggtaagtggttggatgcaggagggttgcttaggtaagtggacctgtgcttggaacaaaggattgacatctgggtcatgttgttccttttgggtgctcatgtttgaagtcatttataatcaaaagccagttctataactatgtggcttgccaagtttgacctaaaggttcatgccaagctgtatggctcctaacatagaacccagaatcaccaggcctccaagtgcaccatccacaatgggctgggcctccccaattagtcattaaatgaaatgcccaatacatttgcctacagccaagtcttataaatgctgtggtagtttgagtaacaaaggtcccataggctcatagggactgacactattagcagatatgctttttttagagtattatgggctgtgatgtttcagatgcttacactacatccagtgtgtgtctcttcatgctgcctgcctatagagatatagaactctcagctacctctccagcaccatgtttgcctttgtgcttccatgcttctttccatgaggacaatgtactaaacctctgaactgtaagccatccccagttaaatgttttcatttataagaattactctggtcattgtatctcttcacagcaatagaaacactattttcttaagtgagattccctcctctcacgtgacttcaggttttctcaagttgacataaaaccaccaacatagacacctagatggcatctcttcaatgaagtgtatgtccattctgtccattttactccctttgatctgtaaaccacaaaaacgagtcaggcttctgcagaggtctgacctgtgtcagtcccaggctagagaggccatctattcaggactgatgtctttgggactgtgatcagaatcagccgaaaagccacaggtccaatcctgaagcagtgagtgtggatcaggaagtcctagcttcccaacattgttaaggatgagagagacatattatcacctcaggagggctttcattcagtactggacaccatggtttattcaagcatcctcttaaataactttccaaatgtgagggaaccgtagacgacatctattatcatgtataaacggctgactaggaaacacttcctaggaaggtatggtcccagaacacaggtacatgaacactcagacattccataatggcacatctcactagttcctcattagtccccaggcatgtcctaccagcccccatgatgcctgtgcgtccacccaggggcctaagtctattgttacacaactgagaagccattctccactgtggccaagccatctggtggtaaccagctgacatctaaaagacagtgggagattgatttgaactcctggaattgagcttgaggcctggatctgaaacatcgtatttatattcatgccccaacaggcttctggctttcttttagttgacaaaactggtcagcttgtatcaggcttttggtgacagactagatataatagataacttaagtttgacatgtttgacagaaaaggatatgatagaagaaagtaactgtcttggagagtgaatggagcacgtaaacagtgaacaagtccaagcctgtggcaataaccggtcaaaccacaaagtaacatgataggaaatacaaatcataattaaggagaaggaggttccagaaaaaaaaaaaaaacaagagttctttctccaagaactgatagaaaaatgaaagacactaaactctctcaaagactgaaaacatgtatgtaaggaagtgtgtgtctttgaagagatggtaagtggaggaaatatggtcataacacatatgaatttcttaaaggactaataaataaggaacaactttcattttatttttgtttctcttcctaattttcatgagtatattaaaaagttgttcctcatgccattttaatttttgtctaaattcattttaagaaagtgacacctaacactaacatgtcttggaacatatgtttcattttattaaaactttaacaggaataatgacaggaaaattcctcttagacatgtttttagtctcaatgaagagaattaacaagctgttctttctatccttggtggaaataagcccaactaagaaactacttcttttcatgcaggtgcataactgtataccaagtataattacatccaaagccatacacatcataactctattttttgttagaaaattctctctaaggatagcactgttgagtaaaaacagctgctgagctcaactttttaatatttaaaagtgctaaccatttattctgtttatggaaccacagctgagcctgtcacctatggcagatacaaatacactcatgttgatttggcaaacattatcagaatggctgtgtgctggtgcttggatgtttactctccccccaaaattataaaataaaatagattccacaagtgtatatgctacttgaacaatttcttagctcatgccaccaattttaaagtaatttttatttaaatagtcttcaatgattctaggttagcgtcttctccaatagaatgttggatccaggagaaccatatttttttttctcacataacatagcagactctgtgactttcaaaggacttgaaacataacagggatataaagaaaagtgtcctaagaatggtgtagtgggatgagaagtacttttccttggcttatcatgacaattttgaaagactagttgagaatgcctatgtaacatgtctgaaatagagaaagcactctactcatgattcatatccatctaaaatacaccatgaggagtacatattgtgcttctaataccaatggccagaattctcagcatagaccaggtaaaacttactgtagctacatacctggacacagttgagttatgtgagagcattttgatgtatttagatttgtttttactagtcatgaaattgcatgatggtaatcccagtagcaagggacctgaagcaggggaataaccaggaatattatgtgagcctgtccaacagagcaaaattctgtttagagtttggtagccaggggtgggaacattatgatctcttgagtctttattccaagagctggcagataagcttctctccaaagctggagggaaaagacctaattgctatagctaggttaaatggatcaccatgacttttttgttttttgtttttgctttcatattgggattttttatttaaattctttaattaccactcatatatacatatctatcccccctattccctggccctctcatcctcccaaattctccaccaactcccccaacccattccccaactccaccccagggacagtgaagccctccaccagggaccttcaaagtctgtcatatcctttgggggagagcccaggccttccttgttgtatctgtactgcaacagtatccctccatggggactgagctcccaaagtccatttgtgctctagggttgaagactggctccactgttaaaggttccataaactactctggcctcctagcaggcaccgacattcagaggacttggttcagtccagtgctgtttctacagctttgtgactagcgtctccatgctctcactaggtcaggtcaactgtttcagcaggtctttccatccctgtcttggctcctttgctcatccctcctccctctccacaactgaattccagcattatggttcagtgcatagttgtgggtgcctgtttctgcttcgaacagctactggatgaatgctctatgaatggtaaccaaggtagacaccaatctcattagaggggaagggcatcaatggcattttcttcaccaatgcttggattcttagttggggtcatccctgtggatcccctaatgtttcctttgtgccagacctctctccatacctgtactgtctccctctatcattattgaaaatgaatataatatattatgatcatggtttcttttcccccatccccttccagatcctcatcccctctctaccaatccaactccacacatcgtttctctctctatggaaaacaaataggaaaatacagataaaaagaaaagcaaaaacaagaaaaaagcaaaagaagtacacacatactgacagacagataaacacagacattgacacatacttatgcacacacacatgcacaaaccaaaatcacagaaacatcaaacagaagacacaatatacacacaaaagagaagtgtgataaaatatgttaaaaaacccattagagaaaattctacaaaaatacttctgagtttattttgtgttgcccatttatttctgggtatgaaaactaccttattgtgagtttatagacagtgagactacataggagaaaacttttttcctttgcaagtgtatggcaattgcagataatatcttaattaggaatggtagatcatgtccacttctccctatcatcactaggaacttgtctcacttagacctatcctggttctatgcatgctgccagtgtctctgtgaattcttttgtctatctgtcctgttgtgtctggaagacactatgtttttggtatcttcaattctggttgactcttgcaatctttttgcatcctcatctgaatagctctgtgagccttgaaaggaggggtttgatgaatatatcaaatttaaaatggagtgttctagggtctctgactctctgtatacattctagttgtgggtctttttgttatttcccattgacttcaagaagcttctctgatgataactaactgaaatggaattctttgcctaatctccagcaatttctcactacttgtaatcacaatgttctgctgaaagtccatcttccagcaagtttttgtctctctacatcttctttaaggttttcaactaaatggcatgatacacatctcagtcatgctcaactcagggaatctataggccccttcctatgtggatgagggcaaatggcttgagagatctatccaggagtaaagagcccatgtgaataataagacagtatagtgaaaaggagaatatgaagcaaggagatgtggaaagattggtataagtaaacagaaggaaagacctcgagaaagaagactacaaggagatggagagagagaaggagagggaggaagaaaaaggaagggggagataggaacttgactaacatagattgttggaagaaattacaactacatcattgggatataacaagatgcactgagaaaatgaacttctggatttcatatttctaaaaacaagtttcatcatgtgattttatagataattagtatgaagggaaatagagagtgtgtgtgcatcaaatttaagccaaatagccactgacacctttcaaagagttttccttgatggtaaagtatttgacatgtttcaaagctatatttcaaggccaagtttgaggaatattttcctaaaatgtattctgtatgattctaaaacatctgaggttcctcctattcacaaaagaaaaaacaaaaacaacccagagttgtaaactgctagaattctacacaatctacttgtttttatcacagtctactgcttgctaattgtccatcaaagggtggaggttggcagtagctttcttgcagatcagcagataaagcaggatttcccacaggtgattacaacaaggagtccctagccttcaacaggaaaatccatattgacaacttgccactggcctcagggctgaacctaattagtggagcctcatttcccaaaataaattaattcaatctacacatggcttaaaataactgaattgttctagaccaattttaaaaaactctcatgacaactaattggctgagactatagagtcttgtcaggtttccctatatataggacatatttaaaagtcaaggcaacctattatgataaatttaagtcacacccttcccattcttactgttactttaacaaataagtttatctcccacttctttttcaagcaccaaaactaacgatgtactttgagactattgatatgtgaactgttatgtacctgattgcacaatatttctggtatataaaatactatgtgtctactgccatagcactgtaaaatactagtgttaattcttggagaatttcttcttttttcatttttttaaatttaatttagaaacaagcatgttttacatgtcaatcccagttccctctccctcccatcctgccctggccaccaacaatcccttatccccatccacttactgctcccccaagaatgagacctttcatgggggatcttcaatgtttgtcacatcatttagagcatggcctaggctttcccctgagagagtatccctcaatgtggaatgggttcccaaagtccattcatatagtagggataaatactgatccactgctggaggccccaaagattgccatggcctccaaactgacacccatgttcaggaggtctggctcagttctatgctggtttcccagctgtcagtttggggtccatgaactcccccttgttcaggtcagctgtttctgtgggtttctccagcttggtcttgactcctttcctcatactcctccctctctgaaactagattccaggagttcagctcagtgtttagctgtgtttgtcttcttgtgcttgcaccaactactggatgaagactctaggatgacatacaaggtagtaatcaatctgattattggggaagggcatttagggtagcctctccactattgcttagattgttagttggtgtaatccgtataattctctggacatttccctagaaacagatttttctttaaacctataatagctccctctattatggtatctcttttcttttttaatatttttattgcagaacaacttattttacatattaatccccccatttcctcacactcccatcctcccattctccccactgacccatacaaaccaacccccccacttactccccaaggatagtaaagccttccatgggtaacacccaagtctgatacatcatttgggggaggtcctaggtcctcttttgagttactggactacaatagtgtccctcaatagtgtcccaaaatccatttgtgcactatggataactactggcatcactcttagagggcgcatagactgcccaggtctcctagctggcactcacattcagagggcttgttttggtccaatgctttggatcactgaacattttcctagtgccagttttctcttaaaacttatacaatctcaccgtattaaggtatctctctttttgttctcctctattcttccccagaatcaaacttcctgctccctaatgtcctccacttcccacctctcccctccttctttttctcctaactccctcttccctccccacatgctcccaaagtgctcaggagatcttgtcactatcgccttctcagggggaccatgcatggctctctcagagtcctctatgtttcctagcttctctggaagtgtggattttaggctggtaatcctttgctctatgtctaaaatccatatatgagtgagtacataccacatttacctttttctgactgggttacctcactcaggatggtttctactagttctgttcatttgactgtgaatttcaagggtccatttttttttttctgctgagtagtactcccttgtgtaaatgtatccaattttctttgttcttcggttctgcaggttactcccaggttgtggctgttacaaataatgctataaacatagataaacagatgtccttgttgtatgaatatgtgaatgttttgatactttcctgagagtggaactgctgaatcttgtggtagactgattcccattttcttcaggaaccgctatattgatttccaaagtggctgtactagttggcactcccactagtaatggaggaaccttcccctttctccacatcctctctagcataaactgtcactggtgattttgattttagccagttctgacaggagtaagatggtatctcagagttgttttgatttgcatttccatgatggctaaggatgttgaaaattttcttaagtatctttcagccattttatatttctctattagaaattctctacttagttctattcctcactttttagtttcattatttggtgttttgttgactagctttttgagtgattggtatattttggaaatcaaccctctgtcagatgtgggattggtgaatattttttcccattctgtgggctgccgtttagtattcttgactgggtcctttgccttacagaagcttctcagtttcaggaggtcccatttattacttgttgatctcaatgtctctgctactgtcattatgttcaggaagtggtctcctgtgcctattcgttcaagggtacctcctagtttctcttctaagagtttcagtgtggctggatgtatgttgaggactttgatacatttggacttaagttttgtgcaaggtgatagacatggatctatttacagtcatctacatgccatcatctagttatacctgcacaatttgttgtagagaatattcttttttctattatttaattttagcttctttgtcaaaaatcaggtattcataggtgtatgggttaatatcagggttttcaattttattgccttggtctacttgtctgcttttatgccaataccaagttgttttcaggactatagttctaaaatagagctggaagtcagggatggtaatgcctctggaggtttttgtattacacaaggttgttttggctatcctgggtcttttgttttccatataaagttgagtattattctttcaatatctgtgaataattttgccattattttgatggatgttgcattgaatctgtaaattacttttactatgttcttcctacctactcaagagcatgggagatctttcaattttctggtatcttctttaattattttttccttaaagatgctatgttcttgctatacaggtctttcttttatcctgccacttttgctaaaggtgtttttcagctgtaatagttccctggtagagtttttcagatcacttatgtaaactatcctatcatctgcaaatttgacttcttcctttccaattttatctccttttgttgtcttattgctctggcaagcacttcaagaacaatattgaagagatatggagagagtggacagtcttgtcttgtgcctgattttagaggaataacattgattttctctccatttacgttgatgctgcctgttggtttgctatatatcgcttttcttatgtttaggtgtgttcctgttatccctgatccctccaaggcctgtatcattaagggatgttggtttttgtcaaaagctttttcagcatttagtgagatgatttgtaaatggagtccttaattggtctaaataataaaaggccggagtctgatatagagggaaatgctgagatatcagagagaaggagtaaaccacagcaaaccttacttcttaaatgtctccacagagaagagtgagttcctgttcattcctgattatacactgttcctgcccagctatattacttcatgtctgtctttatagacctccagacctctatggttagctagtggcaagctccattgtctgctccccagacatgccttatttgtgcaagaaaaatatcatgacatatccccttttggtctaaaaaataacataaattataaccaatatgagaaaattatctacaataagaaaaataactatatacaatatatacatggtcataactacattgtctagtccatagccatatgacaaattcctagaaaataccccattatctattttttcttgatgagtccaaaatattgtacctaatttactgtctattctaagatgcatatcaaattatcttttaatttcttttaaacccattacatttaatacaactatagtaagtttctttactggttctggtaaatagggaaaactataactatactattttttcttcattttcctcagagactcaagagaaaataatattaactgagtaaacaggaagtgtaagcaagcaactttcaaagaatgtgagaaatgacagaaacagctggctgcctggagagcacccaagattgctctgcaatggtgggtcaattattattgccatcttatcattcttacacaatgatcatgtgattttatttttcagcttatttatatgatggattgcattaatagactttcatatgttaaaacatcccttcataccaaggatgaagcctacttgatcatgatggataatttctctgttgtgttcttggattcaatttgccaaaattttattgaatatatttgcataaatgttcatgagggatattggtctgtagttctctttcttaattgtgtctttgtttggctagggtaccaaagtgattgtagcatcataagaagagtttggcaatgaactttctggttataatgtatgaaagaattttgaggagtattggtattatctcttttttgaatttctggtacaatcctgccacataatcactattttgtaatcactttacaatgaaggaagtttggactcagagaaagtgaggaactatgtagaattctgtgtttgcattaacgtctcctccctgactccaagatttaaatgtttccatgttgacattcttcctttaattctattgtcagctagagtagatttaaacaaaacagaagtctctgcttgatagatctccattgttcttatttttatctagtatgttgtatagtacaaagataaaaattcaacatattttcttcaattcatgcaacattttcagtatttcacatgtgaagaatattttcctaaaatagacccagaaagtgtttttcttctatgattcctttgtgctttcataaactagtgtaatggagtattgtaatagagtccatgaaagcccagataaagggaagtcaagtatttattggggaatcactcagaaatgacaaaacaaggtcccctgaccttatgttctggttgctgccatgtattccattgttgggagctgcaaagtacggcgcccaaaagatggcgctagtttccgccttccgccagcccgacgtcgagtgctctctgtggtaaacaactcctaatttggtaaaggccatgtatcctcttaattctgcttggagacaacctatcctggcgtaccacgtagggttaggtgattggtaggtgtagactatatcagaccccgtcttcctctacctggggccgccattcactgtaaatcatggttcccgattaaactgtgagaagaaggttccttggtgttgtgtcgttcttgctggtcaagggtggacgcaacattccatgaccggagaaagagagcgctcacatcccagtctgcccatagcacctgagagcctgaaaaactccaccttgaggagttgaatgagtttccacagcaattctccttttagtccaaagaagagggttctaaacctaatacaaaactatatacaataagaataattatcaagtaatgtccaggaaaagggtaaaaaataacatccacaaaattagtactataaccgacaagaatatcatcaagcaagaaaaaccaacagagtgtccatgctaatggcaattggcaaataacagagattattccaacagatgcgctatcctgaggagtctgagtgttttacctaaatgtcttcactaaggatagtagctgaaactatatagtattcaactccattaaagtcctgagagggaacataatattacctgagttagcaggaagagccaacaggcaacttcttaaaagtgcaggaactgaaagaaacagctggctacatagacattcatctaaatcctgccaaaaatgttggggcaaccaactttttctaaggcctagaatatctgatagaccattttcagaagcagaaagattcaaaagattgtcctaccgtgtcttggcaaggttcagctttctctttttgcttatatcctgcttgtctagttaggacagcttgtccattgacagcagttgaggcaagggtagttctttgccccatatgccagttttaccaagaagtaaacaaactccaacacttgggaatagctcggcattatcagaagcagtcatgtctcatgtcaacagggttctaaactattaaaatattaaaagctatattctgtaggtctttgaaatatttgaagattatctatgtatgtggagtacatctctgtgtatctaggaaacataatttacataactaggtaccacaaatgcaagtaactataacctttaattctcaataacacttactgactaaagcttaacatataaaaacaaacaatctttaaacaccatgagggacaatgatctcaaacaattataataataataatatataactatcttgaattaaaggtagacatttgtagtgcaatgtataaaaatatcctaaaatttcatcaatatacaaaatatcttaagcatatgcagaaatgtacatccgtataatagggcaaaataattttacattagtatttaaaaaacattataaacagaaagaacacataaaaataatataatttcaactttatatgaatatacaaattatcttaggaatgtaaaattaattttatgtatcaatatacaagaatctgcaatcaatgtaaattgtctaactaataattcctgaaataatacatgagtagatacactaatttaactattgtcccattctatacattctgctctttccaaagattattggctgaattagttccaacaacagattagtcagttaacttttccattccctgaacatttctctttgacttggtcatggtgactcacatatggaagtcaggattgatataatgatgacttaaaggatgactatatgaactcattaacttttgttcaaaaagttgaataatataattttatgtatactaattttgcattgcaattatctttggaattacttcttaacacccaaatgataaaaaatagttctttgagtcaaagatgtctattcatctataattgatagaactaaaagtgatacatattgaaggagtcagatggcaccattgatcatatatgtcttgttcaaaacaaagacagaataaagactgctatttatgtaaatagaatcagtttaacatatacatgttatgcatcaatatttaacctgtttatttctaaaatagaatatattttggtatatttatccatttgaatttaaatttgaatttaaaacacagtaaagattgacaaatgtaactaataaaaattcttgtctttatataaaatttgaaatatgtaataaaaacaatggaaacagttttcagagtaaagagacaccttgttgtatagttattctttaacagtgactaatttgcttctgaaacacgatcaaatcacttgcctcagtactcaggaaactctgatggagaggatgcagaaataatttaagagccagagggggttgaggacaccaaaacaaacaaacaaacaagcaataaacaacaaacaaaaaaaaaacaaggatggatgcacatatgaactcacagagcataaggtagcataaaaagcgtctatatgggtctgtacagatgggtcatagagcttaaaggagaagtgaactcacaccccaattgtaatccagaggctatctctcttttgctaaccacttgtaaatggaaaattagttttttccaagggtgtcttactagagaaacaagtgactcttaagggtaggccagtattctcagcagtagatggccaacagaaaatgaactcagctgtacctttggagcttccttgcctcacaatctcataccaaagctttaaaaacaaaagccaaacaaaaaaccatatattttccagggcctttgcatacatattgtgacttctagttagtatttatgggattcctaagagggacaaatgagtgggtctgtatctgtttcatttgccttttccttgggctcttttccttctgtttgttttgctctattctaatgtgttagcttttattttatccttttattttcttatttttttattatccactacaaatgctttgttttctaatgagaggcagaaaatgagttgatttggatgggaggggaggttggagagagtagaggagagagaaattgtaatcaggatatattatatgacaaaaagtatctattttcaataaaaggaaaagaaataaaagttaaaacctcctttccaaagaagaaggaacaataaggctgctcccacacttttaattcattggcattattgctttaatgttgtttcttggttacagtagatagattataaagctgctccaaggatagctttctttcattacatcctactcaagatgtcacttcaaaaattagccactcactttcatgcatgataaaatttccctttctgtttaataatttccatcaggctataacacacatcaacgtctattttccatagaagtgaagtagccacgtgtttaggagttatccaccactccagtaagcagaatgtcttcggtacatgactggttagtgttcaaacttcatttctgttgctctaacagaaagcaacactgggcagaaaagttttattgagatcacaatttcaagttgatgtcaatcatttagggaaagtcaaggcaggaaatttaacagctactcagacaggaaagatcatgagacagtaggtcataccaaattcacagtcaagagaatcaagaacataaatgcaaaagtgtattcttgcttcttgcttaacactcagctttgtctactaacttgaagtccagtgaccattccattgaaaggtactgcctacatttaggatctttcacttcaaatgaaactgaagaccatctcagacatcagagcccacaaactagccttgtctagcaagtttctcaactgaggcttctcaggtggttctgtactttgagaagatgcaaattaataacttaactacacagctacttaaaatggatttatttccacagataagaacatagggccacaatagcataaggtttactggagctagccttccagaacttagagaagattcttcactcacatgaaatcttgcttggacatatgccactactgagggatccaaaaacaagacattcagtacagatgggagtctatgggttataccatgaaagggagggaagctgaaaagaagatgaggtttttcaggaagttcccttcattttggaatagcgcattttcaaaatatttctgtaactgcaagtaggacggaggcacttggttggtctacttgagatctgtaaaatcatctgagacaatgaggagatactgcctcctatcagttctttattttgttcaagaagtctttttctagactctttcctcatctaagtgcctataattaactgtaattccatgtttactttacacaaattattatacatatcatagatattatcctttacaagtatgcactgtgaacttagtcatatacctatgggcttagtactcaattgatcaattatgcttttcattgcttacatttaatctatctaatgctatcaatttacatctgttaaattgtattccatttgtgtgtgcttagtgttttactgccttccttttatgtttactttcacatttaatgtcactggaaagcttaatcaatcttcacaagtgtccgattttaatcagcctagacactgtagctcacagtacttttcatacctgtgaatttattctacctgataatttttttttaatttttcaaggttgttgtatccccctgtctctgatagcagacaagcatgactgttcctttatcttggtactggctcactgctcaaaggctatatttggtgaaggaacttttgggattttatttgtgtgaaactttttattggttacctgcccagtcattatttcgttcatattgtttcctgtttaattctttgtccaaaattgtatgtttggagaggtgtgtatgcctgagtgcaggtatatgaagaagtcagaacaaggcattggattccaaagaaattctggtgtgagtcaccatatgtcgttgctaggaatcaaccccacttcttctgcaacagcagaatgtgctcttaacaattaagacttttttctagctcttaataatactttcctcataggtgaaaaactgaaaattttactttattttattttacaatttttcttttatgtaatttttataagtagttggaatttaacatattggtcaagatatttatgtgttcttcacagttattaatttctagtaatatgttttctgagaaccaagtctaattttgtgataaggggaaagagacaagatctcttgagcaaattgggagcatggggggagggaagaaagagttccttaatgatgacttccttatatgccatcctagagcctttatccagtagctgatggaagcagaagcagacacccacagataaacactgagctgaactcctggaataatgttatagagagggaggagattagcaaaggggtcaagaccaggctagagaaacccacagaaacaactgacctgaacaagggagagatgataggccccaaactgatagctaggaaaccagattagtactaacccagaacccctgtatgcaggagtcagttaggaggcctgggaaaactatgggaactctagtagtagatcaatatttatccatagtataggaatggattttcagggcccattccacatagagggatactctctcagcctagacacaagagggaggggctaggtcctgctccaaatgatatgaaataattttaagattcccccatggaaggcctcaccctccctggggagcagaaaagggatgggatagggagttgatgggcgcagggaaggaggggagggagagggaactgggattgacatttacaacaagcttgtttctaatttaaatttaaaaaggagataaaaaggaacaataaagaaacaaacaaacaaataaataaataaataaataaataaataaataaaagtagataccccaccaaaaaggaaaaccaagtgaatttgctctgtgtgctaaatctttgcatttttctaaaagattcagcattaatttaaatgttctttttcactattgtggcattgttattcatttacatgtatgttataccataaatattccatatattttctaacaccattatctgatggttctcgaaatatttatcaaataaaactctgttctctgtagtctggagctgtacccatgtgatttgtatgtgtgtgcatacgagtatgtgactgatttcattcatattttgttattagttaattctacttttttgttgttgttgtttttgttttttgttttttgagacagggtttctctgtggcttttggaggctgtcctggaactagctcttgtagaccaggctggtctcaaactcgtagagatctgcctgcctttgcctcccaaatgctggaattaaaggcatgtgccaccaatgcccagtggtgttaattctacttttatagacctaattttattcagtttcctctatgtttgatattcaagtctaggaagcatattttttctaaaccattataaagggacagtttatgaataggtgatggaatttcctgtataattgcccattaaatcacagggcatctctatcatagtaaattatgctattacacattcacatagacattgtcttctacccattagttatataaagcaagtaaatgagcccttttaagataacttcttataatttcaatttctaaattgtatttgactgctcaaattctctttttccctaagtaagtcagttgagatttcttagtttatactaggcccttccatcttacttcaagttttaaaattaaggcttaatcatagactgtttactgtagcaaaataaaggagttgattaaacttcttctgcttaaatatataagaaactaacagcaacaaaatacaatgaacaagtggcgactaatgtctgttactgtagaactgccctgtaaatttgagggcattctgggctctgtatttgagtactagattagacagaattgcatagaacgatcctgtcaaaaatgacaccaaaccaaaatatacaaaacaaggcacaacaaatccccagtttgtatagaattaaatagatagttccagaaaggaaaaactccttggcaggccatttatacaacattaaaaatttataaattggaaaaaagtacaccatctcaaagttatagttctaggttctccatagttctatttggttataattttaaagttatatttacaaatgaaagcaagaattttaattaaatactaatgatgcttgaatcacacctaaattatatgttatttttgtagtttgtagagcatagtttttttgttttgttttattttgtttttgttttttggctttggctgagaacaaaggcttaaagcagtaagtttattaagtggtgaaaattattataaaattcagatacctgtaggtgaagtacagatgaagctgagaatcattacagactcaactcagatatcatctgtgttattttaggtgttctctttacaacaaaagagaggttccatgacaattttgtatgcttgttactacaaaacaagagatgtttctaatactcatctagttacttagcatatataaattttgttgcattcttgacagcaatagtccatgtttatttgatataagcattggtagacaaagcagatatacctatctaaaaatattcaggagctggggacagagctcagtcattaagagtactgttgttcttcaaggggacagaggtcagttacagcatcaatgtcagaaaatacataattatctataactccagccttggtggatctgacacactttttatgcaaacacccatgcatgagtcccacacagccaaaaagacaagtagatatgtagataaatgaagctaaataaattaaaaaaattgtgtatgtaagttatttttccttacaaacagcaggagtttgtatttcagtatgtctgacattaacatacttacaaagagacctgactatctcacttatttttccaaaaacagttcatgtgttcccctgggcacagtggcactgtcctgtaattcaagcaatggatggctgggaaaggactcatggatggatgccagtctgggccctgcaggaaatttcaagtgaacttgagaattttcaagacactttcacaaaattagagtttaaaaagtagctaaaataaaaaacaccaatgacagtttatgctggtgaggatctgaagaaaggggaacactcctccattgctggtgggaacgcaaacttgtacagccactttggaaatcgatacggtggttgcttaggaaaatgggaatcagtctacctcaagatcaaacaattccactcttaggcatatacacaaatgatgcacactcataccactaggacatctgttcaactatgtacatgacagtattatttgtaaaggccagaacctggaagcaacctagatgcctgtcaaccaaagaatggataaagaaaatgtggtatgtttacacaatggcataatactcagtggaaaaaaaaaaacaatgaaatgttgaaattttcaggcaaatggctagaactagaagaaaccatccttagcaaggtaacccagtcacagaaagacaaacatggtatgtactcacttgtaagtggatgttagacatagagcaaaggatagccagcctacaatccacaatcccagagaagtgaggaacctaatagaaacatatatggtccctccagagaaagggaaagggacaacatctcctgagtaaattgggagcatgggggtgtgggggaaaggagaaagaggatggaagaacaagaagggggcagagaacataagggatcaggaaggtcgagatgggcaaagaacagagaaagacagcaagaaaagtgacaacttaatagagggaaccatttggggattaatgagaaatctggcactggggaaatgttcagggatctataaggatggccctagctaagaatctaagcagtaataggctaccttaaatgtctttcactataatgagaatgatgaccactttcaatgtcatgattgatccttcattcagtaggattaaagcagaagcagaagcagagattcacacctaagcagtgagcagaattcttagaatccagttgtagagaaggagcagtgatgagcaaaggggtcaagaccagagtgaggaaacccacagaaccaggtgacctaaaaaagtggatactcaatattctatataaatgcataactatgccagtttttcctaatattatattcaccaaaattgctcaaaagtaagacactatcaccattggtccctcctaccaaaacaaataaaaaattgacaggaaataccaccacagaaatgaaatgtattagatactcaaagaataataggttcagttatactatttcactgtgactttgaatttaatatctttgctcaaaataagttatataaagcactatgtagttttgaaagcagagtacccaaaacacaggactcaatccatgtacagcttggttaaaagctagcaattggttaagtttgcaaaaacacttccttccttataaatctaaactaataaggagaaacaatgtgggttagtgaaatgggtgcaaaagttatttaacaaattgccaagaaatctattcctccatgagtttcctatgaccttgaccctgtgccatccattcattcccttccctcaaatcacctcaaaaatactaagactcacaaaaggattctatctcaaaatacaaggaaaacatagctcgagaaagtatattcacaccacaagtttctcagtattaagtataaaccatataaacatgaattttaaaattaagtttcatgaaaacaaaaagaaaggggtatcttcttcataagagagacataataagagagataggaagagcaatactctaggtttggaaaagttgtgtaaacaagcagtggataccatctgtgacatgtgaggctagggggaaagcaacagagagggtcctaggacattatgaaccacagagtcatatcttgtctctaatacaaataacaatgtacaaagtaacaaatacataaacacaaaataaacaataaacctttctagtaacacagaagacaaaatggaaattaaagcaagtgagaataagatattacagaaattagagcctggctggaagccttggttcttctctgattgccccaagtgagtcatctgctgccagcatgcattgtgccaaagccccttgctgccacaaggcttttgaaggaatgcctgtaatcctgtgttttgaacaagttcctgttttccagctgtaatcacacattagccacattcatttcccttccctgccactgctcctctgaaggaacttcaagtgtatcaccatgctaggagtcctccttgtgcccctggtacatggggagcagttaagtcagctgcatcatgaaacagtgatatttacagccatgctttgttagatagcatgctgtcagcccttgagccattagggtcctagctgttcttaagctcctcagaagaggaaacttaatataaacaccttggcagataccccatggaagagactaaggaatagtaacactggagtacagttctgcagcatgcacagaaatgccaagtgaatgtggtggcctgtttgcaattccactacttgggaggtaaagatacaagattctttgaacaaaatctcaacctagaaaagcataatcaacccacatggggttcaagtgtgaattagagccacaatatgtaaagtggacagacatctaggaaaacacccagtaccagattcaaacctcaatgcacacccccagacacatgagaatattcagatattcatacatatgcactatacatttgcactatagaaatggaaaccataatgtctgctatgccatgcaatggcttttactagctgctgttataaaaaaaaaaagaaggtatttcccctaaacatgcatgaacaaattacttatgtttcatcacagtgacactagtattattggatgtattggggaaaatgtagtgtataggaaatgattaagaaatctgtaattattttttgtaaatttgacaggattatgtaaatcaatagttctcaatgttctcagtgctgtgatccttgaaaagaggtcctcatgctttggtgaccccaactgtgaaattattttcttttctctttaataactggaatgttgctactgttgtgaattgtaatgtaactattgagaaagtcatgatttcaagaagaaaaatttattgatgcaactaccttctgaattaaatggggtgtgtacagttttattaattttctttcatttatctaaagacagcatttttcaaaaggtgtctgtagctcaaatctgtttgttttctgtataaccagtgtgtggagtcatcagatattctcagcaaaagtccaagccaaaaagcaagcatgatttatcccataaaattatttcctgatagtgtgtcctggccttgctctaggatgtcaatagctggtcttggcatgaggccttgaatacaaagatattcccctgatcacggccagcttcatagatcttaatctgtttgtgaatgtcttgtcatggttctctatcttccaaaagatgctgcctcccaaattatatagtcttacacacacaaaccatatcgacttcacacaccgcaaagggcatctagataaccctgacaaaggtggagctgctataaatttttaagagccttaactgtttgaatcagggactgtgatctatggtcctcagtcaaactattatggggtgggggattacacctgtaaagcaaagcttccttcactgctgcctctcaacttaggttaatgactcttggcatccgtgtaaagctttccagtgactactgatgcaggttataaaagagatgatggtctcttgttagaacaatttaacatcataagaaggccactaatgtatcatgacaaataacatcatggacttaagaggatatacaggtgcataaaaacttagagttggaaaataatttaaacatcacaactaataacatcacctttatgtatttcatttaaggaaagcttgctggtatgtatagttgtaacaataaatagttgtaaagaacctgaaacgttgtcctttctgcttaagaaaatgtggatttaaatagtgactgccataatactgttacatgaaaaagaattataacattcagtcaactatcactgcttaagcttatttttttgcctggcaagtagtgaataacattgcaggattgactaatctaacttataaattgtgaaaacttttggtacatgaaaatgaaataatgaattctgcagaacagaggaagtcatatgatttagtctcacactggatcaataaccttttggcttctattttatgtctgataacacattgtctctagaaatgttgaagaaaagcacattcactttcttgtctcactgagtatacttaatggcacatttggggaacaaacagataattggtctgaaaagtggatatggaattcaaaattaagtaagagatgaaagaaatacaatttataacaagggaatctgatcaggactagactaaagattcataagcagaatttgaagaaagtagacataaagtcatatggagggaggaacacaggcttaccggtggcagtgaagataaccaggatagtcctagttatctgacactatcctatccttggagttcacttctgatgaacttttgcttctaagaaagtgggcttgattttctgactcctaaaaatatataataaggcagtggtgacataaggaaagaccatgatgttcttatgagacaatcttaagtgtcttgctaactactgcagaaatcatgtattatgtggacttagtgaatctatgcattgaggctgcctttctcaagtacatgactttaaagcatttggatattcatgaaatacactgtgtgaccacatactgtgtctcttgaagcaaatacataagcatatgaacacataagcacattttatgtgtatacataaaatctaaaatggtaaaaatacaagtggcatatctttgcatccatacaaagacactgattctcactaagaagaaagtgcttcaggaatgtcaagaaggctgagttattaaatattttagagttatagttgaaaaactgaatgacggaagtgataaggtgtaacagtgacatgcaaaggtgaatacactcttaggatgtgagtgtgaaatgtcctacctaggcttacatttataaatgttttttgtcaccagatagtgacagccttgacagatcatctttcggaagcagggcatcactggaggaggtaggtgggtcattaagggcaaaagttgcctggacctccttcctataacacccctatgcttccttatttaacaagaagtaagcaagctccatcaaccacatttcagaatcagaattgttgccaggtcttttgtaccatgatggactctatccccttagactgtgagtcaaatgactatctccactttttgttgctttgggaaagtgttttgtctcaggatgagaaaagaaacattttcaaggttcaaaattgtgtttgatcaaaatatactgtatgcaattcttaaagaattgataaaaagtagtttaaaatttgcatccttgctttagacatggagatatatatttgtcacttgccctactggactataaatatgtcaagactctttttttaaacgtctccttagtatacttcacttaaataatatacaaacatttgatgaataatattgggctaccagtcatattagcatttttctgagtactccctgcagtgtgttgcaagtggtcaattaatatcatttaagttcaattataattgttatggatgaatactgaattttaactagttggaaaattatttttaagtttgttaattctatttacttacaaagaaagaatttatgtgctggagcctcaaaactttttcacccatgataatgtgtgtgagcaggagtggaatttccttcttttccaaattaaatgacatttatttattttattaattatttgcatttaattgcttttactagcattcacactgttatgtagaatacaagcagcgtaaccttatgtctgcaatgggctgatttccaaagttaaataaacatgcaatggagtagtacaagttcaagattcctaccagagaaccagattggctgacagcagattttcacctctaccaatgttaccccagaattaatccttaagtcacactcccagctctacatcagaacacccatggcagcttccaacaacaccatctctagtggatcccaaagattgcacccccaatgtatctctctccacttattgctttatcagagaccccaactggaataggtacttcttgctaacctgtagtgaagcaggtaggctgactatagctttttcattcaccttgtcttcctccagatccaatccccagttctcatcacaagaggtatagtagagcttctgggttgatgtttcttccctgtcaactcccattttaaggagactaaataagcctgttccagtggaatacttttcttttctccctcatgtgacccccctcagacaactaacctaacttcactcctaagtgtcagttcccaacacccagaaacacactgcatcctgaaccccagttggccacatctaccagctaaacagataattttctacagggcaacaaagagccaccaaactctcctaaactcaacaaagaaaattgaaataaagaaaaaaaatccacccaaataaaacaaaaacattaccaatacctagaactgtagtcttccaatattagatacctagacatcagcataaaaacattatcaataacaaccaggacaatatgtatccatttaggcctagcaaccctatcagtgcagaccctaaatgtaccaacatagctgaagcacaaaaaaagaccttaaaagagcctgtataaacaggaaagaggtccttaaaggggaaatgaataaatcctccaaagaaatccaggtaagcacaagaagtaggaagaaatgagtaaagcagttcaagaccttaaagtggaaatagaattattaagaaaacccaaactgagggaaatctgaaaatgaaaattttaggaattcaaacagaatctacagaggcaaccttcagcaacagaaaaaaagagatggaagaaaatttcaggcattgaacacacaataggaaatgttatatctaaagatatcccaacacaaatcaaacaggaaatacaggatttaatgaaaaacaaacctaagaataattgtaatggaggaaggagaggaaacccagctcaaaatcatcaaagaaagttcccctaacatacagaaacattcactcataagcgtacaggataccaaataggttgacaaaaaaaaaagaaagtcagtttgccataatacattccaaacattaaatgaggggaaaaaaagaaataatagcaaaaagataattaagagaaaagagaaaatcaacaggtaaaatagaaaggcagacctattaaaatacaccagtcttctcaatggagattctaaaatacaaaagagcctagtcagatatgctgtactgaaatcagtaaaagagaaacaaagaatgcaaagaattaataaaacagagtttgtgatttaagtaaaacagtaagattgatacatcaaaattaacaaaaaggtagagaaagaatatacaaattaacaaaatcagaaatgaaaggggataaaagagacacagaaatctagaatatataaaatgtgaactttaataacttatacttgaaaatttgggaaatgtaaagtaaatgaataattttgtcaataggtaccactaaccaatgttaaatccattccatataagaaatttaaacagacctgtaattcccagtgaaatataagcagttatgcaaatctcccaacctctgtctcccaacacggcccagagacaaatgttttaaacacaaaatactaccaagttttcaggagcagtcaatcccaatactcctctaattattttgctgagttcactttatgaggccaaagttaccttgctatctaaaccatataaagacaaagaaatcaaattacagaccagtttccctatgaagagtgatgtaaaaatactcagttaagtactatcaatccatgtccaatagcatatcaaaagaccattcaccattggataaagtaggcttcatcaaatagaagcagggatgttgtagcaaaaataataaaaacccagagacagatattgtgttaaagctgaagatcagagaagcaaagcagccagccagtagaaagttctcacctctactgatattcagaccaaagaggtgatctactgaatgccaaactgctcccaactgcgctgctgctcagactcactgagactacaatatgttcatgttccctcctgccttatactcccctccaatgcagccatatcattcctgtctccacctctccagtgctaggattaaaggtttgagctgtttcttttttagactgattcactcttgtgtagcccagtgtgaccttgaagtcacagaaacccatctgcctctgtcttctgagttctggtattaaagtatgttcaatatctttagctataagggagatgcaaatcaaaataactttgagattccatctgacacgtgccagatgtctaaggtaaaagcataagtgacaattcaagctggtgaggatatggatcaagaggagtgtaaactagtacagtcactgtggaaatcagtatggtggttcctcagaaaattgggaactgaactacctcaatatctatctacatcacttctggtcatataccaaaaggatgcttcatcctaccacaaggacacatgctcaaacatttcaattgcttttctattaataagagtcagaaattggaaacaatctaatgtagttcagcaaaagaatggataaagaaaattggtacatttgtacaatggagtatttttcatttgttaaaaaattacaacatggtatttgtagcaaaatggattcaagtaggaaacaaaactgagacccagaaatctaggtatgtcatatatttgcttatatgttgctattactcattaattacatgataaccaagctataagccctagatccagagaagtcaggtatagttgaagacaatagggaaggacacatggatctcctggagaaagggaattagactagattttttgggtgtactgggggtttggaagacaagaacagacaatctggtgtgaaaagggaaggcatatggaataagggaggaaatttggaaagaggcaattagaattgaggggtgtatagaaatatgtacagtgggagctttctaaaacaaatgaaggtgatcctaatgaagtctctaaatataattcatagaaccacagaatttaggtataatctagccatacttaaactcttagaagagaaagtgggaggtacccttgaaggaattgatacaggatacaacttcctgaacataacactagtagcacagacactgagatcaacaattaataaatgggacctcaggaaaatgagaagtttctgtaaggcaaaggacacagtcagcaagacaaaatgtcatccaacagaatgggaaaagaacttcatcaaccccacatctgacagagagctgatttccaaaatatacaatgatctcaataagctagccaccaaaaaaaccaaacaacacaattaaaaagagggctgcagaatgaaatagaaaattctcaacagaggaatctaaaatggctaaatgacacttaagaaattggtcaccattgttagccattagggaagtgcaactcaaaacaagtctgagatgcaatcttacactggccagaatggctaaaataaaaaaaaaaaaaaaacaccaatgacaggctatgctggagaggatatggagaaagaggaacactcctacatttctagtgggagtgcaaacttacgtgactacttcagaaatcagtatggcattttctcaagaaaatgggaatcagtctaacacaagatccagcaattgctctcttgggcatatacccaaagaacgcacattcatacaataaggatatatgttcaactgtgttcatagcagcattgtttttaatagccagatcctggaagcaacctagatgcccctcaactgatgaatggatagagaaaatgtggtacatttacacatggagtactactcagtggaaaaaaaacacacaacaatggaatcttgaaattcacagaccaatggatggaactagaagcaaccatcctggtcaaggtaactcagtcacaaaaagataaatatggtatgtactcactcatatatttattttagacatatacatgggctttccagtttacaattcacactgccagaagagctaggaatcaaggaggaccccaagagaagaatgcatggtgcttcgaagaaggagaagggaacaagaacccctgagcaaattgggagcataggggtgataggaagaaggtgggaaggggagaggaggagaagaggttgggggagaacaggaggactgagatagggcaagaaaggagatgccatgatagagggagactgtacaggtttggagagaggtttggcacaggggaagtgttaggggatccacagggatgaccccaactaagaatcttggcagtggtggagaggctgcctttgatgtccttcctctataatgagactgatgattaccttgtttaccatccctagaaccttcatccagtagctgatcgaaacagaaacagacacccacggctaaaaactgagccatactcctggaacccagttgcggagagggaggagggatgagcaaggaagccaagacggtgctggagtaactcacagaaacaagtgaccttacctagtgagagcaaagtgaccttagttgtaaagctggagaaccagcattgaacagaacaaagcccttggaatgtgggtgacagctaggaagacaagacagtctatgggacttctaacagtagagccagtgtttatccctagagcacaaattgaatttaggagcccattccctgtggagggatactattacagcccagatccaggaaggagggcctgggcccttccccacatgatgtgatagcctttgaaggttccatggaggtcctcactaccccttgagagggggtggaggatgggtagtggggttgaggagcatgggagaaatggagggcgagggaatgagatgatagatatgtaaataagagtgcttctaaaataataaaagtaaaaataaaataaattaaaaagataaaattcacaaaacagaaatgttttcttagcttaatatatacattaataggattaattaggaaaacatactaattatgaaaatcaatgaattcttatttgctggaaaagtgagcatgcattcatcccctaataataatgtcctcatagcaccatgttctcgcagtggaaaatgctaatattcagtatggaaaagacagaattagctgctcacactcacataatatttccttacactcatgtattatttctactccctaatcttttgttttgtttggaaattcagctagatacataagtcaacgttttagtctatgagtttcgtagctatccttcatgccagtaactcactgttttattcacttgtcagatgagtgccataagcaagaactaggaacgacagctccactcctcctcaggatcatctcagcaattctttatcaacagttgtaagatatctacttattaaaacagaatctatctgaaatgtaatacagcaaaggtttggaggaattgaatttctcatgtaagaaatataagatagtttttcacctttcaaatgtattccaatgatgatgaaaataagaaaatcacagtgtgaaatgggaaggtgtcatcataacttagcacaaagaaccagaatattttcccctttgttcttataagtcatatttatacaattcaatgtgatggtaaataattgaataaattctagttttccactagtggaatacacatgaaaaacagagaaactaaattatataagtaatgtgcataaaacacataatgtatgtgtattcttttactcttttgcagtaaaacatttcttcttattttatactttatacagttggtagttcatagttacacagatatagcctaatggaatgaataacataaattttgatattgtatatgaattattgcatacttacagaggttatcaataggctggctcatgtttttttactctatttgaatagaaatcacacctttggtatgtgattcttcttttgttcatgttcttggctttaatactctgaagattttggggatattcttactcattaggctgggagctgcaggccttcaaaactacagacatcagccagtggacattgagacacaggaactcctatctctaggtgcacaggtaaaagcccatgacattcacttgagaagagaatattaggctgtaggcagcaactgcagacatcagcaaatggccacagcaaacatcaaccaatgttacattgccccattgctctggttttaatgcttttcatcctttatagaagctgttatgtagttctagagactctggtattttgacccttggttttcaaatcctggatattcccaaatacttttcaagaaaatagggcttctaacccagcactttctgttttctggggtcaactgtcttgactttcttttctgtggccttctctgtgttttgatcatcatcatttctttatcatttgcttcctggaacaactgccatggctactttatggaattctttagctgatttatgctacctcaggcttaggactttgcttctgtctattgctctttttggcttttgcatccaatcctccttctgtctctccatgtttgctgcctatgatgctggtcctcttcatgataacagtatattcatgcttcactccaagtaatagcataacattcagaagaggtcaatcattaaacataaatttgcgtcattaagaactaacacagaatgtagctcaaaatatctgaaaagtgagttgaacagtaaatagaggcataacatgggttagggttcccatgggaaaaacatatatatgtatatatacatgtatgtgtgtgtgtgtgtgtgtgagagagagagagagagagagagagagagagagagagacagacagacagacagacagacagacagacagagaggctgtcggccaactagtataagaatgtgtatctctctacagaaggttcaagatgctaatagttgttcagttcacaaggttggatgtctcagattgtctttagtatagatagacattgagtgaaggagtgcctcagtagcagggagtgaagtcaagtgagcaaagagcaaaagcttctttttgctgctaccatatgctgtagcctagataaaggatggggcttcccaactcaaataatccaatcgagaatactccctagcaggtatatttacctgcttgtgtttagatgtaatcaggttaacaaccaagaatagaatagtcttcacattagaaacataaatgaatatttgaatttgcaccaatcatagaacatcttctaaatatatccatcacagtttacacatcaagacagatcacagaactttaacaaacatacaatttcagttatgcactagataaatcatgggatttctcttgtgtcactcacagaactattccccttcttggtggactaggaagggtttcagagtgagtacttagaagaacttcaagaacatgactcttccagtgttttctttcaaaactggtacatgtttatggagttgtgtttcctagagttagcctccactaatgaagtcaaggttttgtctgtaaggttactggtaataggcacaaaatagtattcagaatcatacttggggacttgaaacagcatgggtatgttaaagccattcttattggttgccaaagggataattatttgacaattcctcatttgacatagaaggcatgggaaggaatctgacaactccagagcattggttatcttgtttgaaatgatttaatcctgaaggacaaaagcctcaaggataatttacaacaaataattatcaagaaagtaccattcttaaaagtcattgcctgaattttgttcttatgctactgaagtgtctttaatcttctacgaaattgtctcacatattttcttctaaatgcaatatatgattttacttatttgtgagagagagagagagagagagagagagagagagggccgagggggggcaaaattttcttttaatatctgtttagtaacatttgtctgtagaaacataatatgctatttaaaatgtggtagtccagacttcatttgcaaacaacaaaatgacctaaagaattgattgtactttgataagaacatgaagaaatttataacgggctatacaaaagacataatggagatagaaatctaaacaattataaattccttctgtagatctactatctacagaaggaataaatgcataatggtataagctttgcaggtcagatggaaaggcatcctgtcagtcaggagccaaggaataccaaaaagtcaccataagctttcctcgttgctccagggaaagatttccccaatgtaacaagtctgcttcaatagaatgtttcccccaggaaaactgttacaattctggctgattctgttggaaagttgttacttctttgttttattcctctcatcgaaaggttaccacccaatcctcattcaagacatttattggacaggaagaatccaggatagctgcctctaccatgggaaaaaaaaaaggaagaagcatactgaacaaacatagaggttatacagggttccttaggggcaacgtttttccaggctaaagcttttcagggcaggaattggtcagattttaatccctgagcctgggaaagctcagagattggcaggatttcatggttacatttggttttagtgctgaattggtcaggggaatgtgtttctttgtttctggtttcagatctaaagtgtttgtgtgtgtgtgtgtgtgtgtgtgtgtgtgtgtgtgtgtgcgcgagcacgtgtgtgcacccatgtgtgttttggttttttgtttgtttgttttggctctggttttagggctaaaatgtttctttggctgtcccctttaccctatatgggaaaaatggtcacatgtaaaacatgattttgatgagaagaatatttgagtgttatttgtgtacttttgaacccagagccttagtaaatttctcctattgtcacatacacatgaaatgaatcatataaatgcttttcacatctggaaatattgtaggcctggttctaaagattttgattgaaatatcatgaacttactataagaaatctcttgtaaaatgtacaatattcttaggctttggagactatatatggagagtatgtatttttctttctatgtcatgaataaaaagataccattgaaaggggctgaaatatgattccagattagacagggaccaactcttgtgtgtaatattctaagccccaaatcaggaaattcctccagccaaatgtggccaattagctaaacagtcttagaacctgaacctgtaaggtaaaaggtctcagagttaaagggtataatagttattgaccacatatgcctaaagttagttttgctgcaaaagccattcaatcattacccacctgatgtacctgtcccccaacagtccaatagaaactgatatgcttaaaaatccccaagcacccccccccccaattcctgtacagctttgtttctggtcaacaccacaactttgtgtggatgatcaacccctgcatgctggctaaatctgcagaataaatgctctttgtgtttgcaagttatttgtatgtgggatcttccctcgatgatcctcagacccttacaacatgttattttttttaattttcttatattttagaatataagttgtgatagcatgcatgtgacctgttcaacatcaagctattcaaaacccaagcatgaggagaaaaactgggcacttgatagatacttagagaggaagagtcagttttctgaatggatgtgctttgtagagtacctaacacccaagagtatatagggaataaaaattacactgctttttattagtctgttggattaaaacaggtcatgattgtaggtgggtatggaagggatagtgcatcagggaggaagcgatgagggatgtatatgatcaaattctgttatggaaattaccaaataactacaaaatgagacaaaatagcaggaactctaagcacagttgtgttttcaatttccctactatataaatataatgctggaattgtgttttgtgggattttttgtgttaccttggaagctgagggaatgaatgaggtccagagaagatgaacttaaaatactatttatgtttagaagttaagctaaatggtgtatttacattcagacatctgagtagtagtcagaaatggaaattatgccctgtgcttttaatgaactatgcatgctgcaaattatgaaacataaacaaattttcctggaaatagaaggatgccaaccagaggagccagtgactattacataccagcacatgggcaagacccagtaattcttctattaaaacctaagttgtttctgccagctagtgcttagtttccaacaaccccagtcacaatacatctctctaacaaatggcattggctacgaaaatatgtcttaaacttcccatgctcttaaatatttttcaaagtatttgtgtttttctgatgtgcattgaagatagaatacataatttctgctggatggtggtggcacacacctttaatcccagcatatgtgaggcagaggcaggcagatctcggtgagtttgagggcagcatggcctacagagtgagtgccaggagaggctcccaagtcacacagagaaatccagtcttgaaaaaccacaaaatagaacctataatttcctagccctaaatatccacatatacttaggatcctacatcccttcaaaattgaaatactctccagataaactaattgccctttgttagacacagttgcttccactgcaatagagaattgattgctaagaatacaaagagagaaaagtgtacaaacagagtagaattattctcaatcagaacgtcatttcactggtagttagcaagtacgttttctaagcaggacacagagtaatttgctgtgttggtgttaacatagaattgttagatgtgtgttcaaatgtgaagttggatgcttgagaacatcaaaatgaaatccattatgtcaactccttccagttccttccaacattatatccatctttaaactccatgcccttttaaaaagcccactgaatcacctaacttagttttcatttcttatctgagtagctccactagtttcaataccttagaactcatctcctcaagtctctacaactcaatggatataatttatgatttacaattttgttactcaaaattattcaaacataactcttctcctttctgcttgatatcagagttcataaaagtctcatttgttattgactttagactcccatctatcacacatttgccaacataccttttaaatagtggtgtggcatcattttgttggtcactaattattttctggcacatcgaattcacacactgaaagttctaagttttatactttatcagttttgaatgagaagcaactatcaaacacaattttgaaagtgtaagaagtattaagcttcactattttcctggattttagagttcataattgtctttaatgtttaatacactaaattctcagataatgtttctatctctgtgatgaaagagcatgacctaagcaggttttgagtagagggtttatttggcttatacttctccatcattgttcatcatcaaaagaagtcaggacaggaactcaaacagagcagaaattggaggcaggagctgatgctgaggccacagagtggttctgcatgttggtatgatactcattgcttgctcaagaaccaacattccagggatagcaacatccacagtttgctgggtccttcctcaacaatcactagttttaaaaatgccctacaagtttgcttatagcccactcttatggaggtattttcttaattgaggttcccttctctctgatgatgactttaaattttgtcaagcttacataacacccctcagaacaattgaacccttgacaaatcgacacataaaaatgtcacctttaagccactatctttctttcctcccttaatcaaaaatgtctcacattagaaacataaatagttttaaaagtcaaacagatttttgaaattcaacccattaaaagtttgggctccatcccacttgaagggttacactctggccctgaacacatggggaagggctcaggaccagcacaggaagatttgggggacgttgcagagcccctgctgagggccctaccctgcctggggagtggtgggtggtttgggctctgaaatatccattttgttaaaagtgaaaatctgtttcaaaagttcataatctctgtggattcctgtaaaaattaaattaaatactttctttcttcaagagtgaataaccagggcactgtcacaattataataaagcaaaatcaaactcccaacagtgtaagtaatgcagtgtccaatgtctatgatctcttcacatttttcaaaactcttccaaagagcttgggtcacttctctggctccatcctctacagcacacacggattgtcttttaagctctggcaggctccattccaccactaatgccgctcttggtagtcattccattacactggcatctccaacatgtagggatctcctataactggactttacattcaccagtagcctaccttagaattgtttcagggtatggtgccaaacctcaattcctctgcatgaccctttaaatcctgggcttctcacagtgccaaaccttggctgctacccatcaacccttcatgtgttcaaaactagtatccctagggttactcttaaactaccaaatttggtcaggtggcagtagcacgaaccttttatcccagcactcaggaggcagaggtaggcccatctctgtgactttgagaccagtctattctactagagctacttccaggacagcctccaaagccacagggaaacactgtcttcaaactaccctccagaaaaaataaagaaaactattaaattttgctgccattgtagtgtacaacttagccacctctggaccacatcttctgtgtgctaactctaaggaaatacttcctaaaaaaatttacctctgtaatctgttttttaaccattactaatttctcatttccacctaaccagcatcaattttctcagtaaaacaaaggtattactttgctggttctggtctccggttaatcacatctgacttttcagccccagataacaagactatgaagactcttcacaaaatgaatttggtagattgtttgctttccatagaaactccccaactaagaatctaagcagtaggaaagaggagaccttaaatgcccttcccgtataatgagattgatgactactttaaatgccatcataaagtcttcatccagtacctgatgttaacagaagcaaacacccacagctaagcactgaacagaactcctggcatccagttgcagattgggatgagggatgagggaaggcatcagtatggtgctggagaatcccatagaaacagctgacctgaacaagtgagagcacacggaccccagtcatgaagcttaggaaccagcactggtctggttccttctgaatgttggtgccagttaggaggcctgggcagtctaagggacctctgacagtagaaccagtaattatccctagtgcgcaaatgaatttggtagcctattccccatggagggatactctcacagcctagatacagggaagagggcttaggccctctcccaaatgatgtgacagactggatcatcccccatggaaggcctcacccccgttggggagtggatgggggtgggatgtggcagttggtgggggcatgagaggatgtgagggagagggaactgggattgatatgcaaaataagtttgtttctaaattaaataaataattttctaaaaagaatgcttaacctctccaagaacaaaaaagaaagaaaagaaaaagaaactcaacaattagacctccacagtttgtactgctctcaaaattttatctttaaagcttcaacagaaaagtccactgagctctcaacattcagtggctcttctaactcaacgttccaaatttcatccacaatcccctccaaaatgtggtcagttctgtgcagcaatgttccactactttttaccaacttctgtcctagcgagtgctactattgctatgatgaaagacaatgaccaaagaagatggggagcaaagtgtttatttgtgttacacttccgtatcacagttcatcactgaagggaatcaggtcaggataaatatctggaaacagaaactaattggtaggtcatttatgggtgctgcttactgtcttgctctgcatggcttgctcaacctgctgtcttatagaacacataaccagaagcccagggaaaatactgcccacaatggactgggttcaccccatcaatctctaattaagagaattccctaaaactttgcctacagcctgatcttatggctgctgttttcttaattgaggttccctcctctcaggtagttttagtttgtgtcaagttgatgtaaaatggtccaccataccaacccagggatagattttcttaaagtttgatttttcatagtctcctattgaatcgaaaaaatgatcagatctaaatcctgctttataactaataacaggcactgatattaacaactaaccttatttgggtaccaagattcccagctcttggatgatgatagagttttctgttctgcctgattccacagcccttagtctcaaataaacacacagagggttatgttaattataaactgcttggctaattgcttaggcttcttactgggtaacaatttcttcattattaacccataactatcaatctaagtatttttacatggcattatcttaccagagaatgcctggtatcctatcatcccagtagctacatggtgtctgtctggcagctcctccctgctttccctcttccaagaattctcgtagtctggtagccatgcctatacttcctgtctggctactcgtcaataaacatctcttcatcaacccaaaagagaaacatattttcacagcatacaggacatcccccaccacttaagtctctaggttcttcattcttggtatattttttccatgattctcaattaatttactacaatcttagtctctaccttcaagtctgatttcatctgaatatgttagggacccataactgaaattgcattgtatagtaagtcaccaatccctttgtcaattttaatttaaaatcaaagattttatttctctttcatggtacatggccattgaatgcttggtaaaaattggtttgcagcatctctatgaagtatagtagtttacacagttctcaaatcataacacatactatgactgaaatgcataccaagttaggtatataaagatcaaggaaagcttatccattcttagggagaaaattgaagacaggctcaagaaagttaactgactgttgcagttaccaaggtagaacctaaaagcatctgtttaaatagtgttccttaattcattataactgggttgggtatagatgacttgcaaataaaatacttcaaataaacatcactgtccaaaagccactatataagacctgctttaacctggatgcctaagttttgcccatgtacacctaggtaatctaagctcaaactgtcctaaccctgctcaaagggctgaggtttgtggagtttcttccatattacctccttctcatggctgtaatgaactcaaataagtaataacattaaatgacacaatccttccaagaaagcttttttccaggaccagggatacaattactaagaagacagcacagaaaagtgatgatgaaatcccagaacaacaagaagagtagaaaagatacaagctaattcctcaccatgctgcaacagtaggtgtctctgaaagaaatgcagcagcaccctgtaggtccatgggcaacaggccttcttagggataaacaatttgctccctaaattctattcctgtctgatttttcatgaagtgcaaaactattacagtactagggacttaatcaaggaagattcttttgttgttttactttttccaatttgtagctaaattaattcagagataaggtgtgggagtagtaaatacacatggaaaatcaagttgcaattttttaaaattaaatcagtgtcttagttagggtctctattgctctgaaaagacaccatgaccacagcaactcttgtaaagaaaacatcgaattggggtggccctcttacactttcagaggttcagtcctttatcatggtgaggagcatggttatgtgaatgcagacatggtggtggctacatcttgattagaaggcaacagaaagtggactgagtgttacactgagtgaagcttgaacaaaacagtcctcaaagatactcctcacattgacatacttttcttcaataaggcaatatctacttcaacaaaaccacacctcctaatagtgcactccctttggggaccattttctttcaaaccaccacaattagtatcagaggtagtggtttatgtctttgtgtgtcagatatatctcatgtggaattctagaataaccctgatgctctatacttacagtaaacattccttatccttgtccagaaaatgcttctcatggctattatttgcaaaactgaggcatgtatctttacacagagtaaagtgagagtatgcacatgttccagtgctcaagaccctcctttacagaatctcccaaatccttccttaaattactatgttcacaacatatcgtatcatcttaagccagcctgtaatggattctatgcttttggtaaagaaagtattaacctattacatcattaataatttcagtgtatgctgtactgtttatatataaataaatttgctccattgctaaggaaaagagttatattctgtattcctgccccattaacttcataattagcattgcttttcattgattgacagtgacattttcaaatttactcattgctttattaactaaaatgctactttcaaaattactcattcactcataaaatgatttgactttcttttgtctaccactgtgactttaaaacactgtgattttgatattattgaatgtttatttctaaatcttaatatttattttttcctgaaaaccattcaattctagatttcctcttggcctttacaatagaacttttagtatgagatactgaatttggtgcacagatgtgaatatatctccctgaatactgttcatatcgttttttgcttctgtgaagtgacatcaaaactgttactctatattctccaatgatgtcagcatagagcacacatttaataatatatagtacaatcttcataatagaatggtaaatccattctcaacctttactggtgtggaaaatgaagaaaatgtttatctaaaaacacccatttatttccactttttactgaaaacaaagtgaaattgaggaccaatgattttaaattggtcaaaattagagaaagaaggagatgaaggaacatatctttgatggcagtgtcaactgtacagactccaaagctgtgttagatgctggttacatttctcctccaacagccagaactgacaccatgaattctagctatcagtagtgtcatttactgcacagatccagattgattcttctgtgtcctatacatttaaatgcatgatatcttcagaaattgtgttttatcatgtggttctcatagcagccaagagcagcagcaattgtctgtgctgtttcaggtgatcccttatggatccccagtcatttctctgcagaggaaatagaatgtctgataggaatttcatctggctttactggatgcctgagaacttccttctgatgattttttttattttcaacttagggaaaaatcaaatattcatgggggtgggaaagcacagttatttatctatttgtaaaaacacttgaaacatatacattggatgacaatgatttaaggtgttaacttattggtttacagtttacaatgctctggcctctgtgcaaattattgagaattatttcactgtaaaattctacttttctttgccttttgttgacctcacttatataagaagagcatatggtcccagtgagtatgaaaagcaagtatgagattgaactgttttagaatatgccaaaaggaagcataacaaaaactcttcccagtgttttctaatgaacaaaatgataattgaccagatgtttcaaattcacaataattagatccataaaatctcttcaatagaaccaagtaggaatataaaagcctatattttatgtacttatgctatgaatttgtaatgtaaatttatttgttgttggttttaattgataatgtataaaatcatacaacattgatttttctcctgaaaatagctgagaattatcaacatttataatttatgcactgtttctattatagctataacagatcacaaatacaacatgctagaagaatgtattatttcaggaaaaatttgccattttcagttagctgcaaaataactatatggtctacttattagacatttgtcagaatgacaaatattttattcagttatcatcagaagattctaacagttaactcttgaaataactctaaaattctttaataacttagggaaactctcatttctacaaatatttttcattttaatatatttaaaaaggaagtgtctcctggtttcccattaaaaattagcaataaacaggatgattctattgtgtaatcgcctttcatagtatttctccctcatgataatattatctacttcttggtaaaaggagtattcattatgtttgaaaatcattataaattgtggaaaagaagtctacaattacatatgtgaaagtatctaaaatgaaatattttctttttctatacacattaaaataattttaattcacttataacaattacaatttaaaaatgtcagacaacaatggtagcaaatagtaatatatcatgtctggatttaggaaggacaggaaaagagaagaaatggcatgagataacatgtatttaaaagggaaccagtgagatatgggagtggaaacaaaaacagaagaggagtcaaaacaaaatctgttctttttaaactccatgctttcctagaaatgctctcatctattatcactattatatttatcaattacttctctcatttaatttctttctaatggagtttccaccaattccttcattacctttttctttggaattttacttaaagtccttaatataacacatttcagaagttttcttcatgaaaattgactgtttggagaaagtaggccctgaactaactttgtgcatatgttgaaaagacatttcctgctccccaccaagtcttttctttcctgaaatgtgaactggggtaagttgctcaagagtatgcaaatacagcaacacattggtggtgcatgcctttaatcccagctcttggaaggcagaggcaggcacatttctgtgatttcaaggccagcctggtctaccgaacaagttccaggacaggatccaaaaataatacagagaaagcctgtcttgaaaaatgaaacaaaaaacaaaaaagaacacaaattcgcaatgtttatttggtaaaatttttaaacttaaatgatcattcaattattatcacattagagctttgtgcttcagtaatgactaaaactgagatgttaaaatagaaataaatgtttgtatatttgtataaaataagcatacaaactatattcaatacagtcatcatcaaaattcaaatgcaatgttcataaaacttgaataaataatcttagaagttatctggtaacagaaaggcctagcataaccaaatcaattctggacaatctacactgattgaaggcacacaatttctgacttcaagttctaagatagaatttcaataataaaaatggtactgccattaaaatgagacacattattgaataaaattgagaacacaggtgtaagcctgcactgagaataactagggtcatctgtgtgatcgtgagtttggaagtattaattggaaactggggtgctcatcagaggacactgtcaatgtaatattgattgctattaatatttatttgactttatttgatgtatcacatgaatttagtatagtgaatatttgctttcattgaaattttgtattttttcttcactctcccttaaactataagttattcaagtatgtaagctattaaattttatatgctcatatagtattcccaagtttcctgttctagatttgtaattcttttgtattatattcataaaataaactgaatatgatatcagaagtgttttcttaagttatttaaaatcttgtggtcaatcttataatgtatcctgaaaaatgttccatgtggggataagcaaaaggtacatttaccaacaagttggtaatttagtttaggggaccatttaattcagctagttcctaactgctagttcctaccttaatggaagcctcattgctgaatttggcatgttatattttcccattggaatatatcatccctatcaagtataccagcattttatttatatatttgtgacacattgggtgcatctatgttatattttattattattttctcttcctgaatgaacttgaaatcatttatgaccttcctgtgtctttgtgctgcttttgatttaaaatctatgttatagaatgtaaacatgggtgttcctcctttcatgcatactacttattctcagcctagatacaaaggagagggcctacttcctgaaccaaatgaagtgtcagactttgatgatcccccactggaggcttcaccctccatggggagtggatggagaatggaatggaggtttggtgggaggcatgggatgatgggagggagagggaatttagattggtatgcaaaataagattgtatttaatttaaataaaaatttatttatagaaagaatgtagctcaagtcctttttagacacggtacatccttagatgctcatgattttcatgtgatcagcacatacttgggcctatattttgtttatctattaagtctatttatatcttataattttgcatctcttcattacatcccaggggaaagaatggtgattcgtatcatgtgctacgcccacctgatagcttttattgccaaagaccaggctaggattggtgagggaagtcctgtgacatctacttttactctcagctgtgtactgctgagtcacaaggacttggacagtcttgggagttatatagctggccatggttttgaaattagattgaagcatgagtatacagtaaggaacaggttctttcctaaagaggataattttgtatatctgtttctacaaatcagcttggtgacagctcttccttataaagttgtagataggtggaagagacagttcattggctaccttttctgatactaatgataagttcatgagactcttatagctatgctatcctgcataatctccagagaatggtatatatgactcagaaccattatgctacagaaaattatatctgaagaaattcaagtgtatacttctgcctgatgctggccagagtaaggctttggctgtgacttctgtctcacacttagcatccttcagccatcagatgagtttcagtggtctggcttgtctctgggtccaagactaagagccctgtgctcttagttcacaccctgcactctagagagtggagctctgtcggtatttctgtagcacctgcctgcaaggggatgataaaagtttcctttgcctgagctgatagcagtttgagcctctcaatccatggaaattctcctggactctaggtcttgggattctggccatttcactgtcataaacctggcatcaatcttatgtatctttttctctcctccccagacaaggagagtgtgcatgtctctgatggattatgtcatgttgagggagtagtgggaaagtcagctcattccttcctgttttattgaatacacatttgtaaattttcatactaaagtcacatgtagtgatcttccatctggtatctttagttcttgtgaagatactttgatccatgactagctagtgattctgtgggaaaacaaccatagaagccttgattgacctcagatttatcttgctctacccactctaaaatcttatattaaaaatgtatgtattttcattttatgtgtataaatgttttgcatgtgtgtatgtatgtatgcatgtatgtatgtatgctgcatacatgcctggtgatagcagaggctaagcatcattgtttctccaagaactggagttaggtatgattttgagtagccatgtggagctgaaaaccaatttccagtcctcaagaagggtaagtgaattcaatcactgagtgatgtatcaaacccaaccctcttgagctttcaaagattagatattctttgagtttgattctctgaaatgtgatgatgagaacatgcatcttggccatcctctgtcagtataactcaatggtgccaacctagaaaaggaataaagagccaagcattttaactgactatatgtattaaaaaagaaaagaatccagacatttctaaaatggcattttcaaaagcatatttttataatagtatatttgatagggaagaagtaggagaaggagaagaagaagaagaagaagaagaagaagaagaagaagaagaagaagaagaagaagaagaagaagaagaaactacaattagccagatgtatcttgaatcaaatatgtctacttatccacacaattaaaaataatgaacattaagtaagaacatgaatgtttggttacttggtactggttagttcgtttataaaatttttgatcttttaaaaaatttataaaacttgatttggaaaaaatgtgtaagataataaaaaatatattcatagaaatttactaatatatttctttgaaaatttgattttaataaaattatttatagaagaacactaagagtgtagaagggagattagaaataataaacaaatgcatgctatagaactaaagacatattggaagccaatttaatttttgtgtactaacaaatatttttttttattttaaatcttttcattgccttcaacgttaggtccaggaacattgtaagtggatgtttcctttataagccacatgttcatctcagtgtcatttttatagaggtataattatagtattatttttgccacgaacttgcttcagtaagtctcagaggaagagaaatgtttaaaggagaggtcattaaaaattacggaggcctgcacagacacacaactagacaccagcctgagggaaaaaaaatgaataaggttattttcagtgtctcccaaaacaagaaagaatcatattgatttaagataacttttttccagaaatcattaaattgagaacttttaaaagagaaggcagagtagtcccattgagtttttcattgagagacagctcatttatttttttaatttgctccagctactgtcaatcactcactacagaggtcctcttatgatcatataagccacagtatttattaacagcagaagctcttctccgttgctgtagaaagactgattattagccataaatgactagatttcatctcaggaggtaaagatttttctcacctgaaatacattgagactcatcaagaagttcaactaagttcttggcactttctccaaacgtgttaaaatgaaaaattcaactgagccaaatgaaaggactcagactgtgatgggtgttaggaagtcaacacatcaccaagggaagtggcagatccctgatgtctacatgaaattgttacagctcatggaccccagactgatagttgagaaaccagcataggactgttccagatcccttgaatgtggatgtcagtttggaggtctgggcaatttatggggcctctgatagtggatcagtatttacccctagtacacaaatggactttatgagccaaatccatatagaggggcactctctctgcttaggccttgctccaaatgatatctgcttctccttccgtcaggtggtagatgaaggctctagcatggcatttaagcaagtcatcaatctcattatagaggaagagcatttaaggtagcctctctgctattgctcagattcttagttgggtcatccttgtggatccctgggtatttccctagtgccagatttctctttaaacctataatggctccctctattaaggtcactcatttcttgctctcctctattcttcccccaaatcaatcttcatgccccctcatgtcttcctcccgcctcctcttctcatcttctctttctcttatctccttccacctgcccctggagctccccatttgctcaggagatcttgttccttctccggttgtaacatagcttatgtggaggtatggattgtaggctggtaatcctttgctctatgtctaatatccatatatgagtgagcacataccatgtttctctttctgtcactggattacctcattcaggatggattctcctagttccatccatttacctgtgaatttcaagatttcattgtttttttacatgagtaatactctgttgtataaatataccacatttccttcatccattcttcagttgaggaagatctaggttgcttccagattctggctattacaaataatgctgctatgatcatagttgaacagattctttgtggtaacaatgtgtatcctttgggaatatgactaagagtggaattgctgtatcttgaggtagactgccattttcctaagaaactgccatactgaattccatagtggctgtaaaagtttgcattcccaccagcaatggagtacagttctcctttctccacatcctcttcagcaaaaactaacattggtgtgtttgattttagctattctgacagttgtaagatggtatctcagaattgttttgatttgcatttccctgatggctaaggatgctgaagaatttcttaagtgtctttcagccatgtttgattcatatattgataattctctatttagttctgtacaacactttttagttggattagttggtgttcgagtggctagcttcttgatttctttgaatattttggaagtcagccctctcagatgagggtttggtgaggatcttttcccatcatgtgggctgatgttttgtcttgtagactgtgtgcttttccttacagaatcttctcagcttcaagaggtcccattattttttgtcattctcattttctatactactggtgttatgttcaggaagtcatcttctgtggctgtttgttcaagggtacttcccactctttcttctaagagttttagtgtgtctggaattattttgaggtctttgatccatttggacttaagttttcaactgaagtactgtgtgggacaatagatatggaactatctgcaatcatctacatgtcagcatccagttattccagcaccatttgttgaatattattttccattgtatatttttagcttctttatcaaaaatcaggtgtttgtaggtgtgcgggtccatatcagttctttcaattcaattccattggtatacctgtctggtttgtgtgtgtgtgtgtgtgtgtgtgtgtgtgtgtgtgtgtgtgtgtgtgtgtgtgtgtgtgtgtgtgtggaggtaccaagctgttttcattactatagctctatagtagacctggaagtcatggatgatgtttcctccagaagttcctttatcctgcagggtattattggctacccatattttgttttttattttcatataaagttgaatattgtcctttcaaggtctgccaagaaatatgctggaactttgatggagattgcattgaatctgtacattacttttggtaagatttccatttttactatgttgatcctacctatacaagagcatgggagatctttacattttctggtatcttctttaatttctttctttgaagactcaaatttcttgtcatacaagtctttcacttttttggctggtgttaccccgagatatttcctgttgtttatgaataatgtgaatggtaatgtttctctgatttctttcccagctcatttattgtgtatatattgtagggctacagatgtttttgtgttaatcttgtatcctgtcactttgctgaaggtgtttattggctctaggggttccctggtagagtttttggggtcacttatgtaaactatcatatcatctgcaaatagtgaaagtttgactgcttcctttccaatttgtattcccttgatctcagtttcttatcttacagctctagctaaatcttcaagtacaattttgaagagatatggaaagaggggacaaccgtgttttgtgcctgattttagaaaaatcacattaaatttctctccatttagtttgttgttggttgttggcttcctatatattacctttattatctataggtaggttcttgttattcctgatgtccctaagacagttatcgtgaaagggtgttggatttattcaaagactttttcagcatctagtgagatgatcatgtggattttctttttcagtttgtttacatggtggattatattgacagatttttgtatgttgaaccatccctgcatctctgggatgaaacctaattgatcatgacaagtgttttttctggtgtattcttggattcaatttgctagtatttaatggattatatttgcatcaatgttcatgagggagattggtctatagttctctttctaaattgtgcctttatttggtttgggtacaagggttattgtaacctcagaaaaagagtttggcaatgccccttctgcttctattgtgtggaacaatttttgatgacaacttctatttccttaggggtatgggtctatttaaattacttatctgtgcttgatttcattttagtaagtgatatatattcagaaaattatccatttcctttaagttttccaattttgtggagtacaggtttctaaaatgtgacctgattattctcttgatttcctcagagtctgttgttatgtacaccttttcagttctgattttcttaatattcatgttctctctctgccttttggttaatgtggataatggtttatttatcttgttttttttcctgaaagaaccacctctttgtttcattgattctttgtattgttttctttgtttctactttatcgatttcagctctcaatttgattatttcctagcatatactcctcatatctatgcatctatgttctctagtgcttttaggcatgctgttaattctctaatgtgactattcacttgtatcttcatttgggcatttagtgctatgaactttcctctttgcactgctttcaatatgtcccataagtttgtgtatgtcgtgtcttcattttcattgaattcttgggagtctttcatttgtctgtatttcttctagacccaggaatgtggcaattggcatattgttcaatttctatgtgtttgtatggtttctgcaattgtgttgttgctgaattttaactttaaatcatggtcatctggtaacatatataaggatattcctatattctttgtacctgttgaggtttgctttgttgttgagtatgtggttgatttttgagaatgttccatgtggagctgagaagaaggtatattcttttgtgattagatggaatgttctatagatgtctgttaaacccaatttggtcctaacttctgttagttcctttgtttctttgttaattttctctctggtattcctgtccagtggtaagagtgatgtattgaagtctcccactacaagtaagtgaggttttatgtgtgatttcaggtttagtaatgtttctccaatgaatgtgaatgcctttgtatttggggcatagatattcagaattgagacttcatcttgatgtatttttccagtgatgaatataaaatgaacttctttatctcttttgattaatttagtttgatgtctaatttgttaggtttggatagctacaccagctttacttttagttaaatttgattggaaaatctttttccaatactttactctgaggtaaagtctgtctttgaagttgaggtgtgttttttgagactggcatgctgcctaatgcactagggaggcaagtagaggtgtgttttttgtatgcagcagaaggatggattctgtcttcatatctattctgttagattgtttctttttataggtgagttaagaccattgctatcgagggaaattaatgaccattgattattgattattttggagttgttgctgctggtggtattgtttgtggatttctctcctttttattttggcttttggtaatgtgggatttttttattgcctatgttttttgtgagtatagttaacttccttgaattagagtttcccttccagtactttaggtttggatggatttttgatattcatttttaaatatggttttgtcatgtaataacttcttttcttcatttataatgatttaaagctttgctggctataatagtctgggctggcatccatggtatcttcatgtttgtagaacatctatccagtaccttctggcttttagagttttcattgagaagtcaggtgtaattctgataggtctacctttatacattacttgtctgttttcctttgctgtccataatattcttttttattctgtaagtttggtgttttatttattatgtggaaaggggactttcatgttctgtaaacttcttgtactttcatgggcatgcccttcattagattaggaaaatttatcttctatgattttttgaatatattttctacacctttgtgctggccttctttgccttcctctatacctattattcttaagtttggtcatttcattgtttccattttttcttggacatattgtgttaaggattttttggacttaagattctctttggttgcagggcggtggtagcacacgactttaatcccagcacttgggaggcagaggcaggtggatctctgtgagtttgagaccagcctggtctacaagagctagttccaggacagcctccaaagccacagggaaaccctgtcttgaaaaaccaaaaaaaaaaagagattctctttggttaagaatctctttcctctattgtattatgaacacctgagattcttccatttcttgttttctgttggttatatgcttgcttctgtagttccttatcatatacccagattttctatttctagcattcccttagtttgtgttttctttattgtctatatttcagttttcaggttgtgaaatgtttgaattgcttccttcatctgtttggtagttttttgttttgatttttttgctttccttaagagacttgttgatttcttgcatttttttgtcttttcttccattccttccatcttttgtttctttttcttccatttctttaagggattttctcatttcctctttgaggacctctatcatctttataaagttgttcttatggtcattatattctgcttcatctgtgttgtgataatcatgtcttgatgatgtagaatcccttgactatagtggtgtcatattagtgtttctgttgttgaatgtggtcttagactgttgtcttcccatcccttcttccagagggtacaggtggggtctctcttctgatggatacaggctctctccacatggatataggtggatccatggctccatttgcagcagattctggatggtttcttttgcagccaggtctctcttagtggataatgtggcaggatagatctgtgtaccatgggtcatggaactcagatagggaaatgtgagcaggataaggcctagcacacaccactcctggtgagttcaggtcccaaattgcaatggttgcagatgctagatgctttgttctgcctcgaggtttctctgagggattcagtggtgggttggttctgaggtccataggtcaggggactgcaacagggaaagttgagaaggagaatgcctggcattcatctctcccagtgggtttggcttggacttataaacggatcttaagttaaaaactttatagttatgttcacagacagagtttcagatgtctaacaaaggttatttacacaatatatactaaaatatcataccaattctttgcctgccaagtctagttgataaaaagaccttttttctagcttgaatcactaggcactgtgtctccaccctctggtcacaattttactccagaaaccttgaatctttgcattgccatggtaaagagcactcatccaatggaatgtacttttgaccaatgagatgtaactcttgtaatttattatttgcctcaagccttctctaaaaaaagtgtacttaatctagatgaacagagaatcagggagaattgctacaaagaattgaaacagagaattatagaaggaattagaactacagaattggagataaagaattagaggttagaaattatagacaattaggacaagagaactagaaaggcagaacaataaagaacatgacttgcatagcacatgtgtgagttcattctgttacccctcaggttagaaattttctaagttcccttcactactttatgacagctgactgaatcctgggaggaaatcagaaaagctggattctgctagctccccataaacaaatctgtgactaatatgaataaaagaaggaaaagaaacccagtttcaatgtacagaaaatattttcaacaataatacaagatatccctaacttaagaaggaggtgcatttcaaggtacaagaacaatacaagacacccaagagacaggaagtgcaaagaaaatccccacaacaaataatcaaaacacaaaaagtacagaacaatggaataataataagagctaaaagagtgaagggcctaatactatatgaaggaaaacctcataaaataacacctgttttgtcaaatggagactctaaatgctataaaggccttgacacataatgtatagaagttaagaaaccccagatcccaaccagactactatatccatcacagatttcaatcaaaacagatagaaacagaaagttattcgaagagaaaatcaaatttaatcagtatctattttcaattccaattctacttgaggcactagaaggaaaatgtgaacctgaggaagtttacaacacctgtgaaaacaaggaataatttcaacactagcaaattaaaattataagggggtgggaaataacagattggaaggatgtgaaaaacaggattcatagttctgctttatacatgaaatatatttagatcaaggatgcccatctccttggtgaaaagtatggaaaataatattaaaatcacatgggcctaagaaacaagctggtgtagccacgacaatatctgacaaaatagacttaaaaagtagacaagtcaaaagacataaggaagggcaatacacaccaatcaaacaaaattcatttaattctaaatgtttatgcaccaaatacaaagatatacaagttgataaaagaaatactacagctaaacttatataatgagcataacacactaatagtgggagatttctacactctactctttccaatagatgggtcatctagataaaaacaaagaaatactggagtgaatacatacaaaccaaaattacctaacagttacttacagaacatttgacccaaacacacccacatacacacacacacacacacacacacacacacacacacacacaaacacacacacatttatattcttctccgcagctcatgaaatatatatgaacacaaactaagtctccacagatataaaaaaaaataaaatatcatcctacattgtatctgaccaccatggattaaagctggatatcagcaacaacagagcaaagagataacgctgataaactattaaaaactgagcaagtcaccactgatgaaaagtgattgaaactgaaatcaagaaagaaatttaaaaattatttaaaattaaattaagacaccacatacacaaacatatgggaacaaagattatctaaacaaacaaacaatacaaagaatcaataaaacaaagacttggttctgagggaagatcgaatatctgacaaacccttaccaaaattaagcataatgcagaaatcaattaatcaaattaagaaagttagagatttaaaggcagacataagaacagacatgaaagaaatccagagatcataaaaaaaagactgtcctgtaacaaactggaaaatgtaaaagaaattgataatttcctaaatatgtatcatctaacaaagttaaatcaagatcagataggcaacttaaacatttaacagactgataaaccatactgaaatagaagcaaaaataagtatccccacagatataagaacaacaacaacaaaacccatggcaagaattacagagttgcttcaatgaagaattctcagatttaaaaataagagttaatactaacactcctcaaattattccacaaaatagaaatataaagaacattgttcaattcattttaagatgcaacagttaccctgatacacaagccatataaagacacaacagacaaggagaattacagaccagtttcccttgtgagcaaaaaatgcaaaacttctcaataaaatatttgcaataaagccaagaacacatcaaaaagatcatccaacatgatcaagttgaattcatcacagagatgccggcatgattcaacatatataaatccattaatgtaccatataaacaaactgaaagacaaaatacacatgataatcaattagacacaaaatgatgtttgaaaacctcaacacctcttcatgataaaatgttctaaagagattaggaatacaagggtgatacttagacataatgcaagcactttatagcaagcacatagtcaatatctttttggggggttttcaagacaggtttctctgtgtagctttggggcctattctggcacttcctttgtagaccaggctggccttgaactcacagagatccacctgcctctgcctcctgagtgctgggagtaaagatgtgtgccaccaatttcccgctttctctttctttctctttctctttctctttctctttctctttctctttctcttcctcttcctcttcctcttcctcttcctcttcctctgtctctttctctttctctttttctttctttctttctttctttctttctttctttctttctttcttttttctttcttttcttttttgttttttgtcaacatcatcttaatggagagaaacccaaaacaattctactataatcaggaacagaaaagtttgtccattctcttcacactttttcaatatagtacttgaagtgtttactaaagaacacgacgaccaaaagagatcatggggatacaaatcagaaaggaagaagtaaaagtatttttatttgcagatgatatagtagtatatacattgcaggctaaaattcaactggaaaccccctatagttgataaacagtttcagcaaagaaactgaaattcaaaagttattcagtgaaatcattagctttcctataggtaaatgaccaaaagactgagcaaggcatcagtgaaacaacacatatttcacaataaccctgaatagtataaattagctcaatgtaactctaaccagacaagtaaaagacttgtaggattaaaaaaaaaaaaaaaaaaaaaaaccaaaaaagcctttaagacactggaaaaaattgaagaatatatataaggatggaaaattcttcagtgctcatggactgggaaattaatacagtaaaaatggccatcctaccaaaagccacctacagattcaatagaatccctatccaaattcaatacagagtttcacagttcttgaaagacaattttcagctgtacatggaaacacatacacacacacacacacacacacacacacacacacacacacacacacacacgcacacacactgggatagctaaaacagtcctgagtaataaaagaactgcttgaaatatcagcagtccttgtctcaaattgttctacagagctatagtaatacaaacaacatggtattcaaagacatgcttatcaatgtaattgaaatgaaggcctagacataagtccccatacttatggacatacttttttcctaataatgaaaacataaatacatactggaaaaaagacatcatcttcaacaaatgatgctggtcaaactggatgtttacatgaaagagaatgcaaaagacccatacatattacccattaccctgcacaaagttcaactccaaatggatcaaagacctcaacaaaaggaaagatacactgaatctggtagaagacaaaatgtagaatggtcttgaactcatggacactggaaaagactttctgaacaaaacattgataacacaggcactataaacaacaattaataattgcttctctattgcaaaggccacaattatttgaacaaagtagcaggctatagaatggtaaaagtttgtttttttttaaactacatatcccatagaggtttaatatttaaactatatatagaactgaaaattttaacaacaagaaaacaaaaaacacaaaaaaattgtgtacagagcatggtggtgatggtacacacctttaatcccaacacttgggagtcagaggcaggaagttccctgtgagttcaatgccagtctggtctaaagagctattttcaggtcagtcaagactgctatatagagataccatgtatgaaaagaaaagcaaaacaataaggaagaaagaaaaaaaaaaaactggggtagagatctaaacagacaattctccaaagaagaaaattaaatggatgagaaacactgaaagaaatgtttacacccttagccatcagggaaatgaaaatcaaagctactttgagattccatcttacatcaatcagaatggttaatctcaataaatgaaaaatgacagcttattctctcaagacatggagtaagaggaacacactcatctgttgctggtgggaatgcaaccttctatagccactatggaactcatatggaactgtggcagttcctcagaatgattggaatagaccatcatcaagatccatctgtgtcactgttgggcatatactcaaaggattcaactttcttctacagagacacttgctcaaccatgttcatgattgatttgtttataacagacagcaattagaaacagtgtaggtgttcatagaaggataagttggtgaagaaaatgtggaacatttacataattgaatattattcactatttaaaaacttaaattgttaaattcacagtaaataattcaaaataaaaataatcttcatgatgaaagtaactctgatccaaaaaatccaagtattgtattatttacttatgtgtagacattagctttgaaatttttgaagaacagtttacaattcatataaccatagagattgtatgacctattggcagggctctccctaggaaggggaaacagaaaagttagttataaatgctggggaggggaaagactggaacaagtagatcaaatggaaagtgggaggaaagaggcatgtaagggaaggaatataggagagacaactaaaactaggtgatgtttaagtggctatacagataatatgtacatgtgtgaaggtggtctaaatggaatcatcaaataatgttggagacaaagtgcatctagacatctcttgtcatcaaaatgaaacctccagtgttaggaacgaattacatctaattaagttgttgttcaagggggccccatggaaacttttcccaaaaccacactattgccaaatccatgggttactttatccaaactgatggtaaagctttattgctgaagataacacctatataacttactgaaaacttagaaattgagctgttgcctacatcaaacagcagtcatactgactagtttttcatggactaaaaggtactctgcatacagcaagaggataaatacaaccaccaacccagctataaaccctgcagtctacaatggtgacctgcctgcaagacacactaatgtaataatgatacaacatgtatggacttacagcaatatatgattggatttaaggcctattccatgagatagaaagcattcctgacactgctcagaaaagaacctaagtctagctaggtcataggcttagagtaaagcaaaatatgattgttttcaagactccagatcttcagatcttttgcttatatagtatggcttctttcttccttttttatagtgtgatttctgattttctgttttcttggtatttatactctagcaaatgtctatgtctctaagagtatatatgattcttttgcttttcttttgactttttcctgttctttttttttgtcctatttaggatttttgctcttattttatctttattattactatggctattttatttagatgtctcagagaaggaatggatatcggttttattgctttggggatgaggaagatctggaggaagttccagtagaggactacaatcagaatatattctatgaaaaaatatattttcaatataaaacagaagaataaatattataaaacaatgctctaatatcattttgcctaaaattctgaaccaatgttttttacatataaaagtttaacatacacagatcacgcctgtacacatataaacacaacagcatacacacacacacacacacacacacacacacacacacacacttttttctatccatttcagagtttaatccattgcagagtttaatcactcaaattcaggttgctcaaggctggaaaaggccttgttggctctgctaacacattctctgagcagccttcacctgctgcttaagtgtcagaacttgtgcttagaaagtcactttcctttggttttgtcttggtatgtttctggtagttcattactgtctgttgaagatgcacctacgatctgggctctaggtcattcctcaagaatactgaattccccagtgttgcttgtgagcatatgaaatatgtacaataatacatctcttacctcttttcttagccaggtttgtcacaccaccaacctgctcccactattgaagattgaataaaagtgatgtttccctttcagtggccattaattaatcagaaatggagatatataaagtagcacagtaggtatgtatgatcttagaagtgaagcaaacaagttatgatttccagaacaatataaaacactcaagattttttttttgttttgttttgctttgtttggtttctggtgttttctgacagggtttctcagtgtaacattcctggaagtcctggaactcactttgtagactaggctgaccctgaactcactgagatctgtctgcctctgtttctgagtgttgagattaaaagcatatgccaccattgcctggctatcaagttttgttttgttttggtttggttttgatcacatttttatgaagagattaaatgagtgaaattaaagggagccttaaagtgtagtttatgaatttgaacttaactcaaaagacaagggagaatgttaaaaacctgaactagtaggctctcaggagcttaaatttttctttaataaacctgatataacaaacatatatgattcacaattctctagagatggagcagtaggcctgagttgggaaataccatgatataacagatgacagcccaagacttaaatcaaaacagcccattttaagtctctttaagtcatagtgtgttctgagaaggtcttgtcaggtgacatcctcagtgaggacatcagggagtgtgctcaggccaaaaaaacattcagatagctttcagaaatatgatcctgtgtttctattgtcctatatcccctctactgtcactccaatcaacactgttaaagaaactacagtcaaaaagaggaagtaaatatatattgaacagtattttttagttatgaaacatgcagggttggaaaaccaacagttatgacatataggattaagagaagaatctatatatcaactgaagggaaacaagagcagtgttttcattttgtctttctcataaataaaggtctacaaatcatgaagcttgtgggcagaggaagaactccatatttagaaataaacaaagaaagtcctagtttttaaatttacagatgcaagatattttaatcacagttaaaatgactgcatcttttctctgatttccaattatcacacttttgaaagttctctagtagagtgacaaagtggctattggcatttttaggatctcgctaagcaaagctatactcactgacatatttagtttaaattcaattgattcaacagttttccacttaagttatttttagtaatctcaatattaaaaagattctaggaatttctgtccctcccttttactgactcagtagaatcaaaataggaaaatggaaatccagatgtgttattcaaacctttttagagtgcacgagtataagcaagatgagctttcacatgcctagtgatggaacatggtctcaaaattcttcttctcatcttatgggtgcagttgtgaacagagaagatatattcagctttgtattttaaaaaagaacttttcatatataaatatacttaatcatgagtgaagccagctataggaaatgatatattctttccctttccaggtagaagttcattgccaattaagcttcttgataagcaagtttaactgcagaaatgaatgatatttcaagacagttcaataaaacaagaaacttttgattattgcttatcatataagaaatacagcaaggtaactatgcaagttggatgcaaagttttatccaagttcagatacttgtataaaatatttatattttctttttttagtttttggttttttgaggcagggtttctctgtacctttggaggctgtcctcgaactctctatggaccaggctggcctcaaactcacagagatccgtctgcctctgcctaccaattgctgggattaaaggtctacaccatcaccaccatgcattctcaggcaaagttggcatctctcaagttatctatttttttttgtaatggggtaaaagaacctgtcttaggcataataggagccctcattttctaatttaggttccctctgttcaaggatgtgtgggtataggtaagaaggcaatggagaagaaagagtattgagaaaatccaacatgaaaaggaaaagaagagagagaggaaggaaggaaggaaggaggtaaataaaggagtgttgttgcccagcatgtctcagcaccaagccatggaagccatgaggttcggcctgagtgggggagcctgggcttggaaactcctagcaaaacaatggtgataaaaccaaacacaggcatcttgtcattcttagagagctctcacttccatgttgtaaaactagagtctcttgtttatttagcatcttcttggctatttcttaaccatgcttccatggccatgaggaggccatttctctcctcgtgacccctctctgctccatggctcctaactctctgtcctcccatgttacttacacacccagcacctctgcccacgtgcaggcctattcaaatgcttagttctgtagagatgcaaactaggagacattccccactgagaccatgctatacaatagcagatcctctattcaatgtagacctgatctcctgtttactggaacccctggaaatttagtaatggaattttcctggctcccaacaagggagaaaggaattttcaataaactaagctaaattagagaatgagggctcccattacagctaaggcacattcttttacaccattactaaatagaaaaaaaaagatttgagtgatgcttattttgcctgagaatgtaatgtgaaatgtttcagataaatacccagcaccttcttgcaatggttctgttttatagttgttctgtttgatgttaatttttgttttgttgtttaatgtcgaatacacactgttggtgcagtcattccaagcacagagcaatgccatcattcttggttcttcgtaagttttactttagaggaaaggccctaacaggtgtggtcacccaagagagctccttctaggaagcagtgttttcccagatttttctttcatggactagatttaagagttcttaaagacaatgcaaatggttttagctggagagtgattagatgaaagtgctcacagctgacaagtaccctcatttactcaaccttaacataactgtctgcttggtttgttcaagacctcctttgggaggtgagcagctgatgaacctttgaagggcagcgaaatgcttcggtgcaatgccttttaaaccagagaagtggtttattcaggttgtacctctgtcttttgctagctgtatcactggggaaaattgtctactttttcagaatgaggatgttaggaatgtttatttcaaggaccagagtagttattaactaactgaaacacatagcaacaccaacatgggttttttcaggtcacatatgtaaggttgctggctttgtttggagttaccatgctttacataatttgtgtctgttagacccccaaaaactcaagtattcggggtcccaggccatgttctagatcaccccaatcaccaggcggatttgagagcttgctgcaaactgcacgaggctttattgtaatttaacgagctaaccccatgttagctctggtctttcacccacccgccatggcagacagctagaaaagaaggtttgaagccactgcatacagatctttatagggcagcgtaaggggagtgtctaggggtatgcacaggctcacaattggtgtgcctccaggcttggagggcttgccctgtgttgattggtcaactggttgttatggctcataggccctcccagggtggttgctatgctctctgcgtcattgctgtgcgcttgtccataaagcacacccagggtcgtaaagcatagtgccaccagctaacttctgattggttccttgtcacaaggcagacatctgactttctagtgactaggtcaaggtcatagaagcacatgttcggctgttatggctgccgaaagggaagctggttccttcagtgtctataatttttttctcttcatatcattcccttttacagaccatggattcctgtatcacttgaaattcaatacaagaaagcagtcttctgagaatgtagataccacatcctacatcacaaaagcatagttcataaattgctgctgctatgatattcatttttgcattctcactttggttctagaataaccttcgtcatctttaacttccctttcactctgaaaaatactatactgtgtttcccattagcaatctatggcttcctcagtgtcaatgtgaataaatttgcacccagtgatgctgagcctcatgttcaaacctttcttcaaaaatagatagtgtgccattgttaatttcaagctttcttaaaactacaggattcagagcaaaactgacatgtatctcttcagatatttagatcttgggaacacatattgttcacagggtctatggagtatgccctgattgacaacaaaatcagttggtatcattagctatacctgtagaaataatctaggagtgctgtagaaatgaaaacttccaccctatctttaagttatgcaaatgttccttctgttctagtagtccaagggctttcttctgtatttttgaagagactatttcatttgactgttgtttaaaatatgtatttattgggttttaatagtactagagatcaagcccagtgcccctcacataaaagatcatttactccctcttttccaaataaacattattgttaattatttaacattttcatatataatatagttttatcatatccaccccttactccttgtcctagcctatctacatccactctaccaactttgtatctcttttatgttgtcaagtatctgaaacccagtaagacacaaaacatattcttactactgtagattctgtggttagtctctttttgatttgtgcattcagttttagacttattaatcccagaaattatgaaagaaagcattggagtggagaagagataatagaacaggctatggcatgggaaaggaaaaaaaaggaagagtcaagtggagaaagtgaaggcaatgtaggagagaagagggcctgtgaagggataactaactctaagttgttttaaaaagccacatagaaatgtactgtcttatgagttccatatatagtatgcctttagctggagatacacctgccatgttgtcatcaatttgtttcagaacaatcttcactgttgtcttcctgcacacaatcaatgagtttgcccaaatgtagattagaaacccaaaactctatcgcaaataaccctttgtcttcataatttaatgatcacagttatttgtatgtagacaagggaagctccttaccataccatgctcaggaatataataaaagtaatgtttttttctcttctttctcccctgagcttggtactaggacaggcaaggaacaggctagaggagttctgaagttagctttcaaatgcttctgaaaggtttcttgacaactccagtgcacatatatgcatacaaacacatgcgtgtgcgtctgtgcacacgcgtgcactcacatgtgcacacacacacagctcccaacattttaaatgatagttaaagattaaagttacataatctatacagtctccaatctacttatgcaaactcttgactccaaggacttctgacaggacccttctctgatttatttgaaatgtattttaaacctagatgaattgttacagccatatagcacagctgttgactattttaatctattgatcattttctttgatagtacttgagaaatgtgtgattaggaaaaaatattttcagttccaaaaaattataatgtatttttattttctgagtaaattataaatacttgtaaatttccttcatgatcatttctagtcaatttgctctttcatttttcattctcaaacctcaatacactggaattagagatgagtaataataattgataatcatgatgatattattttattcaatctaggagtctggattcttttacttagattttactcttttgacaatttaaatttctctaatttttatgaaacatggtaagacaacctctaacgtggacaatttgataatgtaacatatgtaattcctcttttacttttatagattttttcttttgattaatgcattcttcagatttactatcctttacatgcatatatattattttacaatgaaattaatattgcctggtaatgtatctcagtgaatttttacacatacaaattcttataatcttgaatagaagtcgaatttgaatacttctaccactcatgaggcctcgctattcctcacgttacatggttccctaacacttagttggaattgactaataaatgtgccatcagcaatagcttttcttcacaagattgccttgtaatgaaactgccaggcacatgatcttgtcaaactgcttcatgtagaaaatattctcttacacagtaatgtatgccagtcttgaatatctccgataaatgattagttgatttttttttaattctagaaaaacataaaaatgtcctttaggtttctctctgtgcttctgagtctgttctaagacagggtctgtgactctaagatattaggaaatcattggagctgtggaagaaactcactgtcaccttggcaacacactgatttgtggtcttggctgtcaatccacaagttattttctggtcaatacatccaaaccccttattggaaagtgattagagctcattttaaagggattttatttctattaaaaattactcagaaataagttagactataatattgtatatgagtgaaagatatatgttatttccctgaaggagtaaggaagtgcaataaaataatgttttagtaacagaggaaatgtatgggaaacaaagttattgtatcatcatctttctcatttactcacaaaattccctacaaaagcagaggaggaattttattctgatctaaattttgaacaaatatgttccataatgcagaagacttgcataaacagaagacttgcagtgtttacagtgtcagaagcatttgtatggtactccaaatctccttggagtaggaagcaaatactagggaggaagtggggttagctataaatactcatcccacaagtaacaatgtatctcttgattagatgttcttccttgtaagatgctctcacaatagtgccactgactggtcatcaaatctgcctatagggaatatttcctattcagaaagtagtgagtatgtcattagaatgttaagaaaaaggccttagccaaacatcgttcatgtagagagcttttaaattaccagtctcaggaatggtttctggaatacaaagaaggtctcaaaaatagcctatatgattaggaaactactaaaatgacaacaaaaactttagcaggaattaatcaagagatgggtgaattgaggaccgcagttttgcaaaaaaacctgctgtagattgctgctcaggcataatcttgtttgtcaacagtctcctgtcatgttttgctttactatgtgagacttttctcatattcttgatggtcaaagtattgatttgcataaatagacagacaaaatctctcaagtaacctttttatcattgaatagccattttgtttaaggtggcttttcccctccctcaaacctttgttagctattcttataattctcttacacttgcctttatttactagactagcaatagagtcaatgctttcaaccctggcctctatcacagctgctattctcttctttaaaagttgaaagggaaatgtagaaggcacaatgttcttggacacacagacaagcactagagaaaccaaaaatgttaaacatgcagaataatggaggtgtttaatagcctagtgacctcattctatttgtatgaccgagaccacatcacatcttcctccagacctttaagatatcactaatgtcaggctatagaacccaactttatggaagatgttacatgcttatgaagagtctcaatatggagtacagtgaagtataaccaactttatcgcacacatgtgattgggttgtcaccatgaaactttttcctgtaattgtactatacttaaatgtgcctaagtaaatttcctggagccttactctagaagtttgaactaacactggctactgaatcattttgaacaaaacttagttcttgactaatgaggattctgcttgttttggtatttgctattgccatatgaggtaaaaaagaatagctctaagccacaagaacaagattcttatgtaacagactaataaattgtctagtgaaaatgtgtaccttgaagaccagattaattggattctctagttactattatttgtttaaaagtaactttatagttctgcctggtgctcaggtttagatgtgactggctatataaaatctagaactcttgttccttatgagctctcttttatatatgaaggaaccagcttcaggtaggcttaatgcttgtacttaaaccctgaagtttccatactgtgtctccacatagtaggctttggttctgttacacggttatgcccatacttacctatgatttttatacattttaaaccactttcacacgttaactgactgcatctaaaatgctcttaaaagtggttttctgaaaaagaaatattatgcattgatttttaaattttattatatttaggtagcacacaaaatttggttcctttgtgacctttttgtacttaaatgctgctttaccttcaacatctccacctgataattataccccaacatttggatttaaatttatttttatttaaggggctataaaacaaaactctaatgaattctgttaatttcccatccctcttttccagtggtatcaaagagaagcattcaagctttccaaatcttcaaggcaaggtgagcaagtcttagtctagtgtgacaaagacaaagcatgagggaaccaaaattatttaaattgggttgatagcttttcaatttacataaagcttttagcctgctgttatctttgcttttaccaatttaaatgcattaactccaaggctgattttaaattgaacgtttaaattaatgcattgtcaatttgtcgttatggtaaatgggtaaaaatgaagctagaagcatggatgtggagaaataatgacccactcttgatttgctattttaatccagatatgctctgcagttctgcatgttgccattacccatgtgaacctaatggcatctgaaaactggattggcaaagcccgttaacaagatgttcttttctaaagtgggagaacattgttgttcaaaaacaagctgcaatattgtgtaagacagacttggtatgcatgtggtacctctgatcactttagctaaaagcaagaagagaaggaaatataatgatcctaattagcatcaaatctaagctgaagtgattttcttttagctattcaactccaccttaaatgaaatatgaagtaaatggatggcagagtgtttaaacatggatgagctgcaaggaaatcagctccttgatgttttctttttcctgagaagaatttaagtgacatatacaaaaaaaaatttagagcagcaaacttaattttgctctccttgggtttgggtgtccccaggcaaggaaatagtaataatcaccccttttctgtttttgacattaaccattaacctttataactaaagttaaataaatgcaatgtcttttgggtcatctacaagtattgtgtacatgctaaaatgaaataggtacctttacaacatcatctatgacttagtagaactgccatgtcttgatacccctaaactagcctattgacatgattgtactctcttctcttcctcctttccctgatcttatttgtgtttatatacaatctctgagacagaacaatgcttctatcagatatctgcttaacatattctgtggatgactgtgcatgtcatctgtgcatatgtgtatccatgccccctccccccctctgtgtctgtgtgtgtgtgtgtgtgtatgtgtgtgtgtgtgtgtgtgtgtgtgtgtgtgtgtgtgtgtgtgtgtgattatatttgataagcacctcaaccctgtgcttcattccagccttccaggtctttctatccacaatgtgatcttactaaccagcacagccataccatgttctttcctgatgcttgaatgtggtatcaacagtatatattgaatgcaaatcagaatatgatagaattctgtgagacacacagtatttttctataatttttcagatggtaacagtagttgtaaatcatgagcatcttctgttacattttatattcatccaaacaagacatctcctctaaatcattttcctcacatagaaactgatcatttaaattgtttgcaagtaccattttccttttagattctttctttctgcttatagaacacctgtttacttgtgcctattgatatgttgatagcattttctgtgtcatcttcataattcagtaagatatgtcactctcttctttgggagagagtattcctatctagaatttcttcctttgtgtgtttggcatttacagcaattcctttccggaggtttcatcctaacgttctggtaatcagaagggcaagtatcacagcaatatgctatgattttattttctataccatgtaaagcctaagaaactgacttacttttaaatctgtccatcttcttgaatggatttagtactgggtattctgggtagggatgatatatggtaattcaattatataaaactctgatatttctgaatatcagaaatatctgcttgaactgattatgaggtcagagacaatgaagaggtaaccatgtcagggaactaggaaggcaattttaaaggtttcccatggtggtgtttgccatcagcagggcctttctcctcattcttcctcaaatccacctctttgtctccttgactattccacctgtgtactaccttttctttacttactctataatcttcatattactatgatataaatttgaatttccactgataatatattgattttttacatgacattttcccaaacttcccataatgttaaaatattcaaatgtattagcgagtcacacaacaactttaaactcaccacagacatcatcaaattgcttccaataaactccattaattttgtatctcattaccatttgaaaaccttgaattaagtctccattaattcattggctttccttttgaagctcagattttgtcagaaaatcttttattccatagtattagttggctttccacaacaaatactcaaggatcctaatgaacaagttgtttcagctcattaaatgtaaacataatggtttaagtttaagagaaataaaaggatgtcagtaatcagaatggcatatggattacaaccaagaggcacactgaaatgaagaaggatgaacagtcatagcatacaacatattttgatttacggtatttgcctgttttcggtcattttgttgttctttgcaacatcaaagactaattcagggttctatgactttgtgggtctaggtgttccaaataatatttatttctcctttgacatgtgatgggtgttactcagagggagataagttgctaattagagaagaaatgtgatgactaatactgaattaggtaaaacacctatagttgacagtaatattaagggaatacactgaggaaggtaacaaaccatgatgagtggggctcagagaggtgggtttttcatgtgaaatatgaggactccttatcactataagcagtcttgtcttagtaccatgtgaacagatagacccagtcttcttcccaaacagaaacacagtatttgttcagatgaccatcaacagctaatactgcagctagagtgtatggtcagattccttccctgcaagagttttgagaaaagttagttgaaatttgcttctagagcagcatgaataacattttcatgagaaagtggaaggagctcagccctactaaggttgggagaggactgtgtctgctgtgtccctggagcagagacatattctcttcattctcacacttgctgtgagggcatgctagagtagctggcacagcaatcacctgctttctctgcagtcctggaagtgttcttggagaaggcatcactcataccctgtgaagtctttttattcacaatgaagggaatgttgtccaatcagaacagaggacctctaatgggactatgttaaagattacaactgaagacagatgctctgacccaatctgctctctcctccaaaataacactgatgatgtttcccctcccccagaataagtcaatgagtactaggcttaaaaccagattttgatcttagaaaaatattgggcaattttcaatgtacacgtacacatttttagtactacatataataaattttaacttgtgataccgctaaacaattgttttaaagcaaaagatacacatttttagtaataatatacctgttattttatttcctgaaaaatctaaagattataatatatatgtatattttaataataagaatatacattttaacatgctgtgtgcctttttgatacagccagacaagcttacgggaaaaacatggaaagaaggctgcatggaaatctctgtgggagcagcatcagtatgtggatggtagtgaccttcggaaaatcccgagaaagccaatgtaatgggcagtgatgaaaacacagaaggatagaagaaaaggaggcaatctccaaaatataataaaagataattttatttagtaatgcaaggaacaaagaaagccattaataatgtcaagtaatgttaaaggtgatcagtttggcaacactaataggattttaattacaacaaatttcctaatatattacttatttaattttatactacagattaatttcaagactgacactagggagatgatttgacatgacagaggtgacagtggtgactgtcattactctttagggcctgtgattgccaaattcttggtgttaactggagcctgagagctcactactttcaaaaattaccctttaggtatgcaatgatctgttcttggtgtcactacatgaagttaagataaattatacacaaatcaagtgcaagattcttttgtgaagaaataaacaggatatatgtaatgcacaatcctgatgctagagaaatattcaaacacaatggcagctgacacataggtactgtaaaataaatgtcctcagtcatctagatttccactataatatgtaaaatgtccacgtataacaaaagtcttaagcagaccatcagtagatactaccattatttctccaaatgaatgttctgtttttaacctacatatgctattaagtggccagcgtggttgaattgctttttttcttttagactattcaagtttcaaagaattttgaatatctttacaaacttgtacctgcacactttgacttagggtttttttttccttcattttctatttgaattagaaacaagattgatttacatgtcaattccagttccctctctctcccctcctcccctgccacaccccctaactaacaccctacatatcccatagactttcttctctcctgggaggatgaggccttccatagtagggtcttccaagtctgtcatattctttaggatagggcctaggcccaccgcatgtccaggctcagagagtatctctctgagtggattggtctcccaaagatcattcctatgctagggataagtactgatctactacaaagggcctatttagttttttttttttttttttttttggttttttgagagagggtttctttgtgtaatagccctggctgtcctggaactcactgtagatcaggctgtactgaaacccacagagatctgccttcatctgcctccagagtgctgggattaaaggcatgtgccaccatcacctggcctttgatttagtaattttgcaatattgtctgagtgtctgcattgataataagttcacaggtcatagacagttttctgtgttgtaggctatcttctgtaaagaagaaactttgaaaagtagcttgctgaacaattgacaaatccattttcttggttttgagaaccaggatttttaaaaaaaacttcacttgtacaaatattatttatttctatatatcaaactcacaatttcttaaagaaagtatttcacatcaggctagtatttcacatcatttgtgactctgactttgagaacatcatgagtggccatcaagatggattggaatgtggctatctggaggataactagagtatgtgtttccatgggctgtagcagagctgttcctgtggttataacatatcttcataatacataatcagactttttcctgagacaggaaacgaaaagaaagtaaagttacttcccattacatagatttgactgtcatgcacttacatcaagtctgggtataaacaatagtagcatacccaagagcaaactgaaataattaatattttttgtagtcatttaaaaatttaccagatggtgcaaactggccaactgtttgtgagtatatgactatgcaaaaatatatgtattgatgagtataggactatgcaaagtaaacattttaagagatgaactaatgaatgagtgcttcaaggtgagcttacttcatttatcagatgaataaaactaattttacccagtaataaatctattctacttttattttttcaatacctgaatgttctactacatattaaagaattcgtgcctttagttcattaaatatagaaatgataatttatttttaaatatatactgcattgtattgctagtattactatcaaatgattaatgtaaaacatgacatattttctgcacagttctgaaaaactcatctatattttatggattagtaacataacagagatgctcagaatactgatttatataaattattctaggtagctgtggaattaaagtgtttttttttctaattgtttaggaggatgaggacataatgttgaagatgtattggacaagctctttatgaatctagtaatggactatgccacattttccagaaagattttgttaactattccacaatagatgatcttcaaagcctgtattcagacatagctctgatagacagtcggcaacttggggcactaggagcctgtgacctttggtcatgaatctctgtgctaagaaacatgttcctaatgagatcataaatttcttgaatacagtctgtggtatctaggacattaatttattgtttttgttgtttgtttgtttctatagctgactatttaggtcttactcaaattcatgatttgagatcttcacggtggattgtatggttacacatggttacatatgtctgtagaggcaagaggagaagtagtagttacaagtggttgggcatgagtcaatatggatgctagaaacttaatgttgaccttccacaaagtaatacatactcttaaccatgcagaagccttgactgctgaatcttgtatgaactcattaatccttttttattagaataataatgccttttaaataccaagtgatatgacacaaccaaaactaccatgtcagttctctcttgctgtcattgatgtaaagaagctatgagctataactttcagtagttttccaatatgctgctttgcgcagatatgtaattatttgttggaaaaatcagttcaacatcactgaacctatttcttctgatagaaaatgaaaatgaaagtccttgttctctaaaactgttataaggaactatgaatacaagtaaattgtttagaaagcagcctaggccataaactgttcacagtgagtgtatcattgatggccttgaaagctaagccacacaggaaataaattcagttaggagggttatactttcaaacatactctgaagtactcccattgaaagtttgagcctcaaactgaattcattgtttttctcattgctgtattcaccaaaaaaaagaaaggaagaaagaaaaaaaaagtaagaggaaggaagggaaagaaaggaagaaaagaaataagaaagagagaaagaaaggaaggaaggaaggaacaaagaaagaaaagagagagaaacagaagagacttaagactagaagatgttctgggcttatgatttgaaagaaatgtccatcactcagggaaggctattatgaaaaatctgccaaaagctgcctgagttctacctccacgtgggtggtctccaccagccacccaagttctgcacaccacatagatggacaaaataatacacagacttatattaggttcaaatgctgtttggccaatgactaggatttctcatcttctagctcagtcttaattatcaaaaatctatatatattataagacttatcagaagctttccattggtgtcgcccctttctgatggatcacattgcaccactggaggaagagcnnnnnnnnnnnnnnnnnnnnnnnnnnnnnnnnnnnnnnnnnnnnnnnnnnnnnnnnnnnnnnnnnnnnnnnnnnnnnnntatgtcacttcctgcctggatcaccacttctctactacatttcccagaatcccctttgactcctagtcctaccaaacttgctgtctcattggccaaacagtattttatttaccatccagtaagacaaacatacacagaagcacttcccccatcatctccatttttctgtctaaataaaaaggataacttatcttttataataactgaagaaaactaaaaccataactatctgtcttcaactctatcaaagaccacagtaggataatatataaactctagaattgacaggacatctcgctacctggacagtcacccaaagttcctctgtaatgttggggcgtcattcttcagcctacaggccacagtgtgtctggaacacttctccatttcaacagaaacccttcagaactgtcttgttttgtaagttcagcagtcactttcttgtgnnnnnnnnnnnnnnnnnnnnnnnnnnnnnnnnnnnnnnnnnnnnnnnnnnnnnnnnnnnnnnnnnnnnnnnnnnnnnnnnnnnnnnnnnnnnnnctaatcttgccatgttgaaagcaaactccataacaagtttcttcaatgcccatcctcctttctgacataattggtgtgacaggagcagttgtgtctcactgccaagaaaaaccctaaaatattttaatgccatctttctgtaggtctttgaaaggtttgaagaatacctacccatctcaaatatatctctgtatatctagaaaacctaactaacataattataaattctatcataggtgattatataacctgtatttaattatgcatatggaagctgctacaatgcctctcagcagcccgacaggtcaggctgtggcagcagatttccctctttctctgggaacctttgggcatggggtcatcccactcctgacactagataatgtgggaaaattaccaatacagagcctgataaaaatacaagggattttaatagggaaaaagccttacttacagagggacctagccaactggtgtggcagcagtctgtacagcaagccgaaagcgaaacctaaaacaaaaccagccacctgaatgcccctcactatacatcatcctgaccatacccttgtcaggcacacctgtagccagcccctaagctggtgtggctacagtatcccttacagaaggcatcacagagggtgttagaaatgaattcaactaattggcttgtttcctcttccctcagttttattcacaatggaccttagtatagaagaaacatctactcacattcagtgggtgtcttcccttcccaacttctctggaaacatcctcacggatgtgtacaaactagcatctccaattctaaatccagccaccttaacagtggagatttgtcttagcagaaacagtcaaagctgggccttgaaggacgtgattggctgatgaaggcttggacctcagcaatggattcagataatgatgtgctatcgaggaaatgcactttggatatggctctgtttgctttggtctttgtctcataatctttgtttcctgacctcttttctcactctcttgctctctgctttttctaatagataaaacacacaactccaagctactgtgtgcctccttcacagttttctgctttatcaaaatctaaggagatgaggctgagcacctgtgtactttacttacaaggccaaataaagcttttctgtttttgaactttttcatacaagtctttgtcatagccacagaaatcaagcatgacatttttcctagttttcaatcttatttgttctctgacctcaaaaaaaaaaaaaaagaaagaagggggaaagaaggaaaagaaagtgaaaaataaattagaaagccaattcttgctctccatcagaaatcagcaatataattaaagtgaaatgcatttcacactatgttcctgtagaggatctaatgttagaatatagtttatttgtgccatttgtgaattggctagatttgaaggaaatatcatattaattcaatagctttaaatgccagagatccgctcatttggtgagaccacaaagcacccagcaagctcctgacctacagggatcacttcatgactgaaatgacgccattttcagggctgatagcaggagccaaggagacactctgcacagaacatatggaatcacagtagggagagaaattcttttggcaaagtagagcatagagatttctacatttatgaaatatgccttcaatgtcttaaaagctcatttataagccaagataacatgaaagaacaggataatttctagccagactaataaataccaaagctttaaggactacataacattcaagaaaatcagcatgttgcattgaaataatctctcgtggaagctttatgtgttcaaaatagatttattcaagcagatatcacttgtttgtgctttaagaattccagactatatttgcagcaaggtgaatttctttgtataaatgtggatgaacttttatcactgacatgaatacagtagatcaagtagttccttgcaggtgcatttccacctctcagtgcaaaataacaaaagaaataatagaattttcaagttatgtcaaggcatcagtgtgttaatggtaacatgtgaaggtgagtgcatttcagcagcagggtgctgtgcagaacactgcagagaacctcttcataatgggagaatgcatttgctttgaagggaacagaggtgccttttttccttttccatacactcatgtttggatgtgaatcagtaatttcctggcagtctcacagcacacttgtcctgggattttcaatgtcaggcattataggattcctttcctcaaagagtgcccattagaagttgtcagctgctttctggtagtttgccaagtgaatgaatgtgcctttgattttctatctgaacatacagttttacatcttctacaattaacctgtcagtctagcatccccaatgatatttcatccatcaatactgtgtccatgtaatgggaagtatattaaaagctgtgaactccagtagtgatacttgcacatttttcttttacatacaggtagttttcctcacacagcaaaggacaatttattttttggtatcatgtgtgttgtttaattatgtacctaaactatcattacacattctagaaaaacataaaagaaatccactatagcacctgttagattcatgatcaggattactggagctaggaacatctagacaagaaaatgaggaagaggtttccagtaacccaagttatacctgatattgataaatgagcatggcattagttgtacaatcaataagtgatcaaatagtgtagtatgctaacacaaggctaacagacccagttaattaagattttatcataatttatcatattcttcaaatgcaaataagcctatgtttaagtttgtgagcatgagtagccaaaaatatgctccatagtcactaagcccttcattagaaacaattacattagaaaaccttcataaggaaggatcaaacattgtaaaattggcaattcatcttaagtcacttgtttagtcttagtaattttcttttttctttgcttttcttcccttcccatttcttatttgctgccatttttgctattgctattgatggtggtagtaatgtcagtttggaaggaaaggactcccctgattctttgttgtagtgagatctacagggtggatgatagagacatagaaagtgagcagaagtaaaagcctggagccttggtatcatttactttaaaaattatgggtacagtttgggtttgtaacaaaataaacagttatgagaagaaatctaatttcccaaagcatctctacattagaagtatgtaaaatttagccttaaacttccccaacctacagaaagatatgcctatgaaagtacaagaagcttataggacaccaaacagactggaccacaaaaagaagtccccccgacacataataatcaaaactccaaatctacagaataaagaaaaaatattaagagctgcaaaggaaaaaggccaaataacatataaaggcaaaccnnnnnnnnnnnnnnnnnnnnnnnnnnnnnnnnnnnnnnnnnnnnnnnnnnnnnnnnnnnnnnnnnnnnnnnnnnnnnnnnnnnnnnnnnnnnnnnnnnnnnnnnnnnnnnnnnnnnnnnnnnnnnnnnnnnnnnnnnnnnnnnnnnnnnnnnnnnnnnnnnnnnnnnnnnnnnnnnnnnnnnnnnnnnnnnnnnnnnnnnnnnnnnnnnnnnnnnnnnnnnnnnnnnnnnnnnnnnnnnnnnnnnnnnnnnnnnnnnnnnnnnnnnnnnnnnnnnnnnnnnnnnnnnnnnnnnnnnnnnnnnnnnnnnnnnnnnnnnnnnnnnnnnnnnnnnnnnnnnnnnnnnnnnnnnnnnnnnnnnnnnnnnnnnnnnnnnnnnnnnnnnnnnnnnnnnnnnnnnnnnnnnnnnnnnnnnnnnnnnnnnnnnnnnnnnnnnnnnnnnnnnnnnnnnnnnnnnnnnnnnnnnnnnnnnnnnnnnnnnnnnnnnnnnnnnnnnnnnnnnnnnnnnnnnnnnnnnnnnnnnnnnnnnnnnnnnnnnnnnnnnnnnnnnnnnnnnnnnnnnnnnnnnnnnnnnnnnnnnnnnnnnnnnnnnnnnnnnnnnnnnnnnnnnnnnnnnnnnnnnnnnnnnnnnnnnnnnnnnnnnnnnnnnnnnnnnnnnnnnnnnnnnnnnnnnnnnnnnnnnnnnnnnnnnnnnnnnnnnnnnnnnnnnnnnnnnnnnnnnnnnnnnnnnnnnnnnnnnnnnnnnnnnnnnnnnnnnnnnnnnnnnnnnnnnnnnnnnnnnnnnnnnnnnnnnnnnnnnnnnnnnnnnnnnnnnnnnnnnnnnnnnnnnnnnnnnnnnnnnnnnnnnnnnnnnnnnnnnnnnnnnnnnnnnnnnnnnnnnnnnnnnnnnnnnnnnnnnnnnnnnnnnnnnnnnnnnnnnnnnnnnnnnnnnnnnnnnnnnnnnnnnnnnnnnnnnnnnnnnnnnnnnnnnnnnnnnnnnnnnnnnnnnnnnnnnnnnnnnnnnnnnnnnnnnnnnnnnnnnnnnnnnnnnnnnnnnnnnnnnnnnnnnnnnnnnnnnnnnnnnnnnnnnnnnnnnnnnnnnnnnnnnnnnnnnnnnnnnnnnnnnnnnnnnnnnnnnnnnnnnnnnnnnnnnnnnnnnnnnnnnnnnnnnnnnnnnnnnnnnnnnnnnnnnnnnnnnnnnnnnnnnnnnnnnnnnnnnnnnnnnnnnnnnnnnnnnnnnnnnnnnnnnnnnnnnnnnnnnnnnnnnnnnnnnnnnnnnnnnnnnnnnnnnnnnnnnnnnnnnnnnnnnnnnnnnnnnnnnnnnnnnnnnnnnnnnnnnnnnnnnnnnnnnnnnnnnnnnnnnnnnnnnnnnnnnnnnnnnnnnnnnnnnnnnnnnnnnnnnnnnnnnnnnnnnnnnnnnnnnnnnnnnnnnnnnnnnnnnnnnnnnnnnnnnnnnnnnnnnnnnnnnnnnnnnnnnnnnnnnnnnnnnnnnnnnnnnnnnnnnnnnnnnnnnnnnnnnnnnnnnnnnnnnnnnnnnnnnnnnnnnnnnnnnnnnnnnnnnnnnnnnnnnnnnnnnnnnnnnnnnnnnnnnnnnnnnnnnnnnnnnnnnnnnnnnnnnnnnnnnnnnnnnnnnnnnnnnnnnnnnnnnnnnnnnnnnnnnnnnnnnnnnnnnnnnnnnnnnnnnnnnnnnnnnnnnnnnnnnnnnnnnnnnnnnnnnnnnnnnnnnnnnnnnnnnnnnnnnnnnnnnnnnnnnnnnnnnnnnnnnnnnnnnnnnnnnnnnnnnnnnnnnnnnnnnnnnnnnnnnnnnnnnnnnnnnnnnnnnnnnnnnnnnnnnnnnnnnnnnnnnnnnnnnnnnnnnnnnnnnnnnnnnnnnnnnnnnnnnnnnnnnnnnnnnnnnnnnnnnnnnnnnnnnnnnnnnnnnnnnnnnnnnnnnnnnnnnnnnnnnnnnnnnnnnnnnnnnnnnnnnnnnnnnnnnnnnnnnnnnnnnnnnnnnnnnnnnnnnnnnnnnnnnnnnnnnnnnnnnnnnnnnnnnnnnnnnnnnnnnnnnnnnnnnnnnnnnnnnnnnnnnnnnnnnnnnnnnnnnnnnnnnnnnnnnnnnnnnnnnnnnnnnnnnnnnnnnnnnnnnnnnnnnnnnnnnnnnnnnnnnnnnnnnnnnnnnnnnnnnnnnnnnnnnnnnnnnnnnnnnnnnnnnnnnnnnnnnnnnnnnnnnnnnnnnnnnnnnnnnnnnnnnnnnnnnnnnnnnnnnnnnnnnnnnnnnnnnnnnnnnnnnnnnnnnnnnnnnnnnnnnnnnnnnnnnnnnnnnnnnnnnnnnnnnnnnnnnnnnnnnnnnnnnnnnnnnnnnnnnnnnnnnnnnnnnnnnnnnnnnnnnnnnnnnnnnnnnnnnnnnnnnnnnnnnnnnnnnnnnnnnnnnnnnnnnnnnnnnnnnnnnnnnnnnnnnnnnnnnnnnnnnnnnnnnnnnnnnnnnnnnnnnnnnnnnnnnnnnnnnnnnnnnnnnnnnnnnnnnnnnnnnnnnnnnnnnnnnnnnnnnnnnnnnnnnnnnnnnnnnnnnnnnnnnnnnnnnnnnnnnnnnnnnnnnnnnnnnnnnnnnnnnnnnnnnnnnnnnnnnnnnnnnnnnnnnnnnnnnnnnnnnnnnnnnnnnnnnnnnnnnnnnnnnnnnnnnnnnnnnnnnnnnnnnnnnnnnnnnnnnnnnnnnnnnnnnnnnnnnnnnnnnnnnnnnnnnnnnnnnnnnnnnnnnnnnnnnnnnnnnnnnnnnnnnnnnnnnnnnnnnnnnnnnnnnnnnnnnnnnnnnnnnnnnnnnnnnnnnnnnnnnnnnnnnnnnnnnnnnnnnnnnnnnnnnnnnnnnnnnnnnnnnnnnnnnnnnnnnnnnnnnnnnnnnnnnnnnnnnnnnnnnnnnnnnnnnnnnnnnnnnnnnnnnnnnnnnnnnnnnnnnnnnnnnnnnnnnnnnnnnnnnnnnnnnnnnnnnnnnnnnnnnnnnnnnnnnnnnnnnnnnnnnnnnnnnnnnnnnnnnnnnnnnnnnnnnnnnnnnnnnnnnnnnnnnnnnnnnnnnnnnnnnnnnnnnnnnnnnnnnnnnnnnnnnnnnnnnnnnnnnnnnnnnnnnnnnnnnnnnnnnnnnnnnnnnnnnnnnnnnnnnnnnnnnnnnnnnnnnnnnnnnnnnnnnnnnnnnnnnnnnnnnnnnnnnnnnnnnnnnnnnnnnnnnnnnnnnnnnnnnnnnnnnnnnnnnnnnnnnnnnnnnnnnnnnnnnnnnnnnnnnnnnnnnnnnnnnnnnnnnnnnnnnnnnnnnnnnnnnnnnnnnnnnnnnnnnnnnnnnnnnnnnnnnnnnnnnnnnnnnnnnnnnnnnnnnnnnnnnnnnnnnnnnnnnnnnnnnnnnnnnnnnnnnnnnnnnnnnnnnnnnnnnnnnnnnnnnnnnnnnnnnnnnnnnnnnnnnnnnnnnnnnnnnnnnnnnnnnnnnnnnnnnnnnnnnnnnnnnnnnnnnnnnnnnnnnnnnnnnnnnnnnnnnnnnnnnnnnnnnnnnnnnnnnnnnnnnnnnnnnnnnnnnnnnnnnnnnnnnnnnnnnnnnnnnnnnnnnnnnnnnnnnnnnnnnnnnnnnnnnnnnnnnnnnnnnnnnnnnnnnnnnnnnnnnnnnnnnnnnnnnnnnnnnnnnnnnnnnnnnnnnnnnnnnnnnnnnnnnnnnnnnnnnnnnnnnnnnnnnnnnnnnnnnnnnnnnnnnnnnnnnnnnnnnnnnnnnnnnnngccctgccgggggagtggcgggtggatggggtggggggtaggttggaggtaggggagaaggaatgggggtggggggagggagagggaaagtacatgtgaaaatattaataatttaataaaaaaaagaaaaaaaatccttacagaaaatttgatgctaattcatggaatattacaactggtagtgttgtgacatatatcaattcagatgaattgatggatgatttagtaatttgccactttacttaaaggaaatatattaagtatcaattattgaacagattttaaagataggaccattggaagacttcaagcttcacagatgataaacataaacttgtggctcaaatgtaagataggggacttaagtcctgatctttgagttcacctcccaagtctttcctaaaattcgtcagtggttcctcctctggagtatgaaataacaaagaacactgaagtctctatatttcccatatgattttaaggtttctttgattccgtctttacataccactgatggttttgtgaatacaggttgttggttgcctgcacatatgccaaaaaaatagtcttggattctaatggaaaaagtttaaactgtgacaaatacactaaaggttacaagctactcatggggaaagtcctgtgtatatgtttgtcttattggttgataaataaagtactgttggccaatgcaagatagatgggactaggacttgaggaggattctgggaagtgtagtaaagattgtgatgcaggcaggaagtgacatagcaggcagactcagagtataagcagggacaagcaggaagtcattctcttcttcttgctctctgctctggagccaccatgtgatcccagcaagagaagatgcctgccactgctgtctgaacagataagtctttataaaatatatagattaagaaatcctagtcattggccagcagcattgtatctaatataagtttctgtgttattttggttgcccacgtggcagcagggcttgggcagattggctgaaagatttattgttacaagctacccctcacatttttatcatggctatgtgtctgcaaatgaattctaggtaattccaatgattaacaatgtgactactccatctatgtgtaagatatccacaacctttacaacagctacctgttggctatgaaaactgacaaacattatctgattcttattatgagttggattaggttttgttaaaatcaccattgtttaatttacaattatgaagaaactaagagtaaaatcattggcaattgtattaatgacaccttggggataaaataacctcattacaaaattgtgcatgtcctctacattcagcaaattacatataagctaatataatagcttctcacagttcagctggctcagatgtcagtaaacctatttctggagtgatttggcctccagcaatgcatcatgagtgaaaaatgattgtgatttccgtcagcctgtcatcaaggaatgctcatttcttgagctactaatagaagatggacaacatggcaccaggttattgtcaccaattctgttatatccagaatatccagaatcccctggagcaaagacattcgagaatatctcaaaatttaagtacaggaatatctgcaggatggtttctgtgtcctctgagtcttggcagcaatgtgtgttgatttaccatgtgccttgagatcatggcatgccccattggagcttggtctcaaaggcatcttcagttttatattatagaaaaaagtcacaaattttgcctttggcagtgacaacacttgaaagcctctgtctgcagaaaccagtcatttagattctaaggcaaataataaaattatagtaaataagaagtacttgaatgacccataataattgaatatctttccagattttttaaaaaaatatatgaaaacaacaaatgttttgcaaattgttacttataattttatttaaaacatttctatctcttctttttaatatgcttttaaaatgcatgaacatttgccattttaaattgttaaggtgtttctaaggcatgtataacaaatataatttatataattattgccaaagctacttttaatgacagcgtatagtaagacaagtcactagatggcttatcacaagaaatgacaaataaaattatatagtctccatcaggattctgttttcctattataggatgcttcccaagtggcagccttcagggcagttctgtgagagataaagaataaaaggaaaggagtgttcatgacacttaggacttaaaaatcaaggaagataagccacgaaaatagctgtaatctattttaaagtcagattagtgtctatttctgagcttctgattaaacttggcaatagttcacatacaggagataggttataactctgaccaataagtcacatgatcatggtaaaaagagaaattagcaaaaatgtaattgggaagccaggaacccnnnnnnnnnnnnnnnnnnnnnnnnnnnnnnnnnnnnnnnnnnnnnnnnnnnnnnnnnnnnnnacaatttagacaattgtggagcattcattagtatcaagcaaaattagatttacatttctgtttatttaatcaatggagatgatgaaattaaactgtgagcttagcatggattgtaggtttggattaccttttgatataagacaaaagtgcacttaaggctgtcatttcctcacgatgtttttgtattcttttaatttaatcttttcatatagagatgcttcattttttcttttttacattaaagtagtcactggtagtatttcattaatagtacactgtcacagaatcttacctagaagtgtttcacgttcaaaagcattcaagattctttaaaaataaacactatctgaacataaagtgctacatacattgatatttgaatttacatcaatagaaaagctcattttatttaaaatgatattagagttataggtgtatatacatataatgttccaacacaatgaaataaaataccactcaaaacccatatcatgtacaagaagcaaagagaaatattctagatcttatattgtcttcaaattttatcatgtatgcttcaaagtaaactgccatcttgatgtaacatagattcattttgctgaattcaatattgcctatgtggtgtctttcaatgttacccttttagattcaacttccttaacacagttatacttatgaaaagttatcgttaattcagttatgtttttgaaatgcaatcataagttctctgtagatttagtccagtctgcttcaatgtaatattactaaactgtgagtgcacacactgatggttgtctactatgcagatgagatttagtggctacttgagtctgcatctcttgggagtatactactgctaactttctagcaggaatcatattgtgttacactttaaataataatttgtcatttactgatgctgtctttctcataactaccttttactgaattcttttctatttttatcttattttttctagttttgtgtatcatcatttccatatttattacctttttcactgaagtctatctctttctattactttttttaaaatttgtgttatcttttgcaaacatattttcattttagtttctgttatgattaattttagatatcactttcacacaacatagaatcacacaggaaaagagtctcaatgggaagtgtctattttaggttactctgtaagtatgtctgtaataaattaatgtctgtggcaacacacaggaccctgtgggtggaaacattcctaggcagggatgttctagactggactagagtggaaaaatctacttgagtacaagaatataagcaagggatcatctgtgcattgattgctctctgttctgtatggtgggtgtgaagtgactagctgttggaagttccttcacctccccattttctgattggaaccataaaataaaattaacccctttattactaaatgaagcttttggccatagtaattttatcacagtaaacagaaatgaaacatgggaaaaatcttttgaagcatatttgttttagattttgttctccttaatgcaattatgatttctcctatgattgaatgtagccacagatttcagacattgatttgttttcagatacccatgtcttatataagaactagaatatggttcttgctcacacaaaacatcctgatgtacaaatgctatttcattatttgtcacatagttcatcttcaaactacttcaaattacaaatttaactctgcagtgtggtttggatttcataactcatttcatttttattataaaacattccgtgtttcaaaactgttctgaaatttaggagattaagtctttgtatatcatgaatgaagagaagatatatgtatagatagatagatacatagatggatgtataatggtttcnnnnnnnnnnnnnnnnnnnnnnntgaataaaatgaaattcacaaagtcttttacctaaaataaatttgttcaatctaaatgactaaagcatctgaaattccccctgcctttaaaaagaagaaaatagaagagtgtgatccagatatgtatataaaataaaacaaaacataaatctgctgtatttgttcgagttttattttttatgacaatagacattgcagtttcagaagtcataattggattgcactcttgggaacttttcatttctacctagtgaaccatttgatcagttttcagggaaaaactgataaacaaagtgttgtttgaactaaaacaaagctactgtcctataccagaaccatattgtcaggttggagcagaagtactaggagacttctcttccatcaaattcatgattagctcagcagtttccttctgtctacctgtccctatgtcgccctgtctcactctgaccacaatcttatttctgagaataaagagtaattatgcatcattgcagagttgtatgtttatcaacacagggtaataaagaaaaatgaacatatttcacaggtgagaaagaaaacaagaggagactatatttgaaggtgaagatcagaagcacagatgtcaccaagaaatgtgatttatgatgaattagagtaaacaaaagacattgagcaattgcaaggtatttgtggaactgagttgactacaattactgtacggatgaagaggggacaagatgtagtcttatgacataagaattccttggcaagcatctactaccaaggtaatgtatttaaacatttctacaaaatggagagcacagttcaaacagactaacacataatatgcagaaattttgtaagcaaagaaaatgatggtgaggaagtaaagaagagcaaatggtcttttccatcatcttcatctcctcctcatagcttccaatgtaatgtttaactttttgcataacaatgcataaataatgggcttggggcacatgggaaacattcttgtaaagttatttgcacttctgctattttaaattggctcagtgtggcacacagtggtgagtatgttttctagaagactccagtgaccttcacacttgcaagttcattctccttaagcatggacagcaatgctccactgatttgtggatgtcactaggctttgtagtcagtacgggatagagggagttaagcaaatcccccaagagacattgaaatggagttaataaccccattggctttcaagtgaaagtactgagttttggagtaacttggaggcgacttccagagattctctcaatcatgtcacagcaaggaactgatttttcccaacatctttgatattcttcaaaagtgttaataatcctaatccttgttgaagcagtgctcaattcattttgggatcagaatattgaattcttcagtagacagtttagtggagttgatacatgtattttctgatctgcttgatgataatagttatagttataaataagtaatacttataactaagtaatagttataataaatagcaagttgtcctaagctttaatattttttgttatagtgagaataatattttatataatattctgattatgacttttcttccccttattcttcctagttccccctgaactcccctgccatccagatccacaccctttctgtctcttcatagaagccacacacacatctgaggaatagtaataaagtaaaatgaacaaatacaaaaacaaataatttggaatgcaacaaataaacagtagaaaaagagaaaactaacatgtacaaatagctgctgggctgtggtgacacacgcctttaatcccaacacttgggaggcagaggcatctcccaaccccccccaaagaaagtacaaacactcacaaactcacatattcacacacacacacacacacacacacacacagtaatcccataaaaatataaaacacagagccatattttttaatataaatatatattaaagatatacagatgtatcttgtaaggttaaggggaaaaaaggccctgattcaacattataagatgagaaccacctaatatgagcttgaatctgttttgtgttggctatctactgttagacatgaggcctactattaagagtttaagagtatttttccccccagggagactcccttggataaaattaacttttcatcagcaagcagttatcatttggagatgaattctgcattaaacatggggcagtgtgtttagctaccctcccagacataggaccccatttaatatagactgttcaagatctatgcatgctgcctcttgctctgtgggttcatatatgtgtcaatcatgttctctttagaaagccttgttttcttgttgtctgtcaatatttacctgctcctctatcactccgggtttttaacattttgtaaaagatttactaatttcttacctgtgtgacaaactgtaagtccatcatatttttttaaatgttttacttctttcaatgacaataacacacatacacacaattaagcacatgtactgatagttgatattcaaacatcatgaccttgcttatgaactacactcatcgctgctttcacacagaattatgttacaatcttgtgttcttatttgcaaaactagaagtgtactaaattaattattggaagaggtttacaccattgttacccacaatgaatattatcaacatattcttgtttggctgttataccaatggcttcattcttatgggtgctttatacttccttagaaggacagaaaggaaatgaaccccttatacactcaggtccttgtcagttgcaaatcctcttgtgtttatgctaacatattcaagccattaaagctggctaattatatctggatttctcttgatatatttgctcatcaattttgaggaattcattctctacgctaaacttagccaatatcctttgtaaaaaccagctcagaagagataaatacaagactccagcctgcttccatcaatttcttctcacgctgtcatcttcaattttcttccgaccttgcacatttccttgaagatgtttcacggtgttgtttgttttctttgcagtagtcttgactcactttctttggcttgaacatctgttgcttcttcttatttcttggacagcattcattagtatcaatactaacttttgcttttctcctatcctgtgctaaattgttaaccatatgtgttttacactctcctgatgaagtagccatgaggctcttttcctgtccctagtcatggtcagactctgatttcattacgtctggatttttcatctttctattagcatctttgtatgagcaatcagagcttcctcatgagaaaagctctgcatcaatgaaatggagactgatgccattcttttctgatgaacctttcatgggacaatgtgtgcagaatgatagattattgaacactcccattttttccagtcactggatagagtatctcatctgccagtccccttcagtctcctgagagccagtagtatgtaccacctttgaagcaaccatatctcacattaaacatggagaacttttagcaactgaaggcagtttttgtgaagtaaatatcaatggcatgcagtggatattgacttgcaaatgactgtcattctactttgtttctatttacaactagtacagctagtacactaatggtgaaggaagattgttcctttcaggtagtcaaaggacatatgattatttcagcaagacacagtacattgaatggttctgaattataaagtaagatcaaccacatttgttttgaagttggggactacaaggaaatgacctcagatttaatataattattattagccaaatttactaactctgcaagcagggaagatgttagtaatcagaaatatgggtggggaaagatttttaaaggtgaacatcacaattactccacttacagctatatgaagaattgacccacttccccagctatgtaaggaattgtcattaccatttctcacagcaataatcatgtttttagttacacagtttagggcatggggtaaggggtcagaaagttttaggaaattagttcagaggccatcagctaataaagagggttactacacaaaatgaaatttgctttgtcaccacacatgaaagaaataagtcaactaagaatcctgtgaggatttttaatagctctctgccttcccaacaggcttatttctcctttcacatgacataatggctgctttggttcttattctgtttgcaaactaatgttttaatgaatgaaaggtaaataattacagataacatcaacaaatattcactcactgcatctatggcagcataaatattcatgtttgatgtgacaattactgttacatcagaggaatttacacaaatgaagcaacactagacatgcatgatgagtaaaaagaaaagtattctttgaagaatagtattataaatattcaaaggatagtgataactgtccttaggaacaaccaaataggaaaattttaaaactaattatcttagtataaaatacattcatcaggttgatagagatatataagaatacatgtaaaaaggaagaaatgagtttcaatttgattccaaactttaataggtctatagtagcgggttatgctattcagaaatggctatctctaaagatattgtagatagggtttattgctgacaaaaaaaatgattcaaagctgctcagggaggaaagatgtatttcagattatagttgtagttcattattgaaggaaatcaaggcaggacttcaagaagggaacctggggaaagaactcaaacacagactacaggaatactaattattgacttgctgttcaggctttctgagttttttgtatacaattcaggatcagctagatgcctaagggtaacaccacccacagtcgtcttctccctcccaaatcaatcattaatcaaaaaaatgtacagtagtcttgtccagaggccaaaataatagggacattttctaagttgacattctctttgtgaaatgaattcagcttgtatcaagttttcaaaaaattagtcagcaaaaaaataaaagccctgtcctcagtgtcaagccaaactagctcccacaactcttattattttccttgggaattctatttgtttgtttgcctttattttattgaataattttatacaacatattatgattacaatcttccactttctgtatcttcttagaaaacaattaagcatttagagaataattataaaataagcaaaatacgataataaaaaacaaataaaattggacaaaacacaaaagaaaaaagacccaaaaggaaagcagaagtacatgttttagacacacacacattagcatacaaaggaatcccaacaccagaagtcataatatatatgtaaaagacctgtaaagttgaaaaaagcctgtaatcaaacattgtgagagaaagaacctccaaagatgtcatatggcatccccataagaggagtttatttccccagtgagactcactttagaggaaactaagatttcatttgcaagtgattatcaagtggagagaggttcaggcttatggatggggaatttttctacttcacttatctgtaggatcccatctgatgcagaacagctcagatcctctgactgcttccacagttttggtgagttaatatatgcattggacctactgtgtttagaggccctgtttccttagtgtcctccattccctcttacttgtacactctgtcttctcttccactggattccctgaacactccgaggagggatttgagagagacacccatttaggattgaatgtttccagttctctttgttagtctctgaactttttctggctgttggtctctaattttcccatcagtgacaggaggaagtttatgtagtgatgtctaacaaaagcgctgatttataagtacagtaaaataccaacaggagtcactttgttgctataatcctttagcttaacagtagtgtttggttttcccctaggtccctagtctatctaatctcagattcttggaatcccaagctgtgtctgtctcatggaataggcctttagtttggttggttactcccattaactttgttccactatgcaccagcatatcttgcaggcaagacatcatttaggataaaatagtttggagatatgttggggtttagctttcttttctggtatcatgcagaatacccaaagccaatagcatggaggggtgaaggctctcttggtaagcacaagcttggctactttgttcagaattatataggtgttgtcctaaaaaatagggtcttataatcagtttgtgaagagcaaccaatagtctttctaatagcctgagttgtttgggagttcccatgggactttttgacccacaactcaggtgtaacccattcacagttttggtaagttcatctaatgaccagaaatgtacaattgggttttatttcccttgttatttggcagtttcatttagatcaccttcatatatacttatattttctggagcttctactatattggatttccttatgaaagttcaaatatctcttagttttagatgttcctccctatattccttcccttgttttcttatttcctccacttcccaattgattctcctattccagtccttccttatctatccatagttatctattctatttccctatcctatgaagctccatcccttccacttaataatttattctatatataaccttttttagttataccgacagtagcttgtttatcaatgacttatcagctagcatccacacataaatagaatgtactatatttctctttctgggtctgggttccctcactcaggttgattttttttttcaatttttatgcatgtctctgctaaattcgtttttaatggctaatattccattgtgtaaaagtaacacattttctttattgatccatctgttgaaagatacctgtttttttttttttaaatatctgattattatgaaaagagcagtaatgaacatggttgagcaagtgtctctgtggtaagttgaaacaacttctgggtgtatttccaagagtggtgtaacttaatcttgaatttgatcaattcccagtttcctgaggaaccaccacaaacaatggtttaatgttgtgctttccccatatactgaactgtgtatggtgttattcattttattcatcttagccattcttattggtataagatgaaatctcaaagtgatttttatttgaattttcctgatgactaagaatgttgaacatttttaagtgcttctaaatcatttgaatttcttcttttgagaattctgtgtttagaactgttctacatttttataaattgggttatttgttttatccatgtccatgtttttatttctctatatgctttggatattagccctctatcagatgtgtagttggttaaacctttttccatcttgtggcatgccactttgtccaaatgactgtggcctttttgctatacagaagctttatactttcataagatccatttattaattgttcaacttagtcaatggtgttctgttcagaaagcctttctgtgccatgggtttaagagtattccctgatttctatcaaattcaatgtttctggctttattttgaagtctttgatccatttgcagttgagttttgtgctgaatgctaagtatgaatctattttcattcttgttcatgcagccatccagtttgtccagcaccacttggtgaagatgctgtctttcttctagtttttatttcaggcatcttttaaaatattaagtgtaattataaataaatatctagtaaaatgtgtcacattagtagggtttgaacatattttctgtctctcatgttattttcagcgaaaaactgggttcaaaatagttgtctttcttcatttcaggctactgtattgagttaaaagcagatgtgcactccaaatcctaaaagaccacagcacctatttatcatatcaaattaaaaatatgcagatagttacttcacttaaaatattgcatcccagactctggtgagtagtccacttcctctagtactgccacttccctatggaacacctagaatacagttttctgttcttcacagtttcaattattctgttttatcaaagttccttttcatctcagcacactagatcttcctttccatatttaaactgttcaaaataatgctttaattattttattgcatcattccagtaccttccaactttatcacagtgttaacgtgttggataagcaaagtaagctttatctggaataaacactaacagatacaggattttttaatgggttattcattttaattgatagttgtggaatgaagttagtgaaatcaaagtttattatgaatgcctggccttagcttggattgcttctagcccttttatacattccttctggtcttttatctttctttcgtatgcataacttacttttctttttactccatggctggctggattgcttggtaactgagtgcctggcccctgatctcctcctctccttgtttctcctatttattctcactccctgccaactccacctatcattgccactgccttgctactacccgttcagcacttcattagtactaccactatgtgttttagacaggcatagtaacacagcttcacagagttgaacaaatgcagcaccccttaaacaaaagtcacaccccttaaaataatattctactacaaactaatatatcattaacaagaaatttgtgttttatcaaacaactactattgtgtcaatatagtgcttggttattaagaaaattggcaatggttttccttttgtcaagtgtgtatacatacatatattagatggccaaaaccatgactcattagctatgcccagtttccacattgagaaatatcctcctgagatattgtgtagtaatgttcaaaagccctcctgaagtctcaccctctatgtataggtaaaacatccttcaagggagtccaggccagcagtttatgtttctgcacctgagaatctagccaatatagctataatttaaaacatatatttgtataactcttttattgttgtattaatagagcataaaaacattgacagtaacaacaaaggaagctttgctaagataataaggttaggaatttctggttcttggaaacttatctataatattgattgcctccctttgtcacagaatagctgcatcaaataagatagtgtattttaggtatattgaaaactacacagtaccattcatgtattgattgctacttttactgcctaaaaatcgatttgttcctgttttactctaaaggagtcaggtaactatttaaaacacatattatcatctttaaaatgaacttaacactaatttcatgttcatcagatactttagagaagtatggagacaagataactgtagcttttataaacaagtgtgaagttcttactttgtttacataggcccttgcatgtctgtgttcgggatgccagcttttcctatttaccactagtggaactggaaaatgactttggaagcacagcagaaaatgagcattttgtcactctttggcagcctctggatttcatagtaacatatattccaggcacgaagaacagacattcatttaaagacacttaaagtgaatgtgatctgtggtgatgaagctgcctgaagctttgaagcccaagaaatgagaagaactatatttacaaaattggtagttctcagaagttcttatttcagtggtaaacttaagagatagatagctcaagtaggattaaaattaattcaaagtctctcttaccttctgggctgataacctattctgcaaagcaatttatatgtaaatattaatttgaaaaaaaagcacaagattattgggataaacacccagtgcagctgaatgtcagcaccatgttcaagactaaagtaagtctcatttgttccaccaactatatgccttgctttgtgtttggtggttgtttgtttcattctataagatgttaccatccagatgtctgaattccgattagcattgacttattcagacaaattgaacatcactgttctctaccttaatgataactaaatatcttgtctctatggagtttgaacagagggatataaagatgtccaatgccttgtacaattttctcacatacttgctaaactgagttgacggtgaatcaagaagagtgtattttagtgtgttaatggctaacttatttctgcaagttcactgtggttcttgtttctgggtctgaagaatctgtttcctcttaaacttgttaagtagtaattattgtgttactagttacataatgtggcaaatgagtcaggcataatggctatttgttacatatcaggttaggaggaggcttcttcagtttctacaaatccctatcttactttccagtcatttggataggagataaactgattccctaaaaggaattcctaactaaaccttgttgcactgtggcttagttaggaatgagagtacattactctgctatatgcaaattatattacttgaaaatgaccacccccttctcgatcactttctgggtctctcctccttttcgttgtctttgtttttctttgggtagaaagaagaattgtactttgcctccctgtctggcctcagactccttaatgtcctgcctcagtttatcaagtgctgggattacaggcatgtggactgccactaggtctagcttgtaaatatttttttttatatttttatttaaattagaaacaatattattttacatatcaatcccagttccctcctcctcctatgctccctagtgactcccctgccccctttgcacccctatccactccccaggtagagtgaggccttctgtgggggaatcatcaaagtctgtcacatcatttgtggcagggcctagaccctccaccatgtatccaggctgagagaatatctctccatgggggaatgggctcccaaatccattcactctctagggataaacactggttccactgacaaaagccccatagacaaacaagacctcttaactgacacctaaattcagggagcctggttcagtcctatgctggtgacccagctgttagactgggttccatgaattcccactagctcaggtcagctgtttttgtggggttttccagcaaagtcttgacccctttgcttacctcctctccctttgtacaactggattccaggaatttgtctcagtgcttagtatttgatctctgtatctgcttccatcagctactgaatgaaggctctatggtatcatttaaggtagtcatcaatctcattatagggaaagggcatttaaggtagcctgtctactattgctgagattcttagtcggggtcatcctggtggattcctagacatttccctagtgccagatttctcttaaacctataatggctgctgcaattaaggtatctcatttcttgctctcctctattctcttgaatcaatattcctaatcccgcctgttttcctccgctctcctcttctctcctcctctttctcctcccccctcccttcttctgtctctccaattctcccaatttgttcaggagcatttgtccctttcttttcctctggagaaacatgtagatctgttttagggttctccttgtttcttagcttctgcagatgtgtggatgatatgctagtaatcctttgctctatgtctaatatccatatatgagtgggtacataccatgtttgtgtttctgtgactggattaccccactcaggatggattcttctaggcccaacaatttgcctttgaatttcaaggtttaattggtcccccacaatgagtagtactccattgtgtaaatatagcagactttctttgtccactcctcaaattgttccacatgatagaagcagaagggtcattgccaaactcactgccaaactctttttatgaggctacaataccttggtacccaaaccacacagagacacaactaagaaagagaactacagaccaatatttctcatgaacatttattgaaaaatactcaataaaatattggcaaatcaaaatccaagcacacatctgaaaaatcatccaccatgttcaagtaggcttcatgccagggatgctgggatggttcaacatttgaaaatcgaccaatgtaatccaccacataaacaaactgaaaaagaaaaacctatatgatcttcccacgagatactgaaaaagcctttgacaaaatccaacactccttcatgataagggtcttggagagaccagggataacaggaacatacctatacatgataaaggcaatatagaacaagacaataggcaacattaaactaaatggagagaaaataaatgtgattcctctaaaatcagaaacaagacaagatccttcactctctccctatctcttcaacattgtacttgtaattctaacttgagcaataagacaacaaaaggagatcaagggagggtatacaaattggaaaggaagaagtcaaacttcactacttgcagatgatatgataatttacataagtgacccaaaaattctatcagggaactcctacagctgataaatgctttcaataaagtgtcaggatacaagattaacttgaaaaatcagtaaatattctttttatgagagaaatttattcagaatcttggtgtgtcttgggaagtttgtgtttagaatccttcttgaacccagaatttaccatgttttcctcatttcttagagtccaaaaactattaggtacattctgtttctactccatttatgcaattccaattaaaataccacagtatttttaccatgttagtgttactatattttccaaacatttagtgtgtaatacgtcctttgttttatttctagttcagtaattgcatttgtgcatatgtctactatactactgaaattaaattcaatagtcatgtcacactattgtctcattgcctcataaaaacttcttttctgaggctggatggtggtgttccacacctttaatcccagcacttgggaggcagaggcaggcagatctctgattttgagactagcctggtttacaagagctagttccaggacagcctccaaagccatatataagccctgtcaaaaaaactgaaaaaaaaaacttttaattttcacttcaatgaacaatatattcattttaaaatttaactgaaaatttggataaaactattttagaatccaggttttaactttttaaagaactttgtaagtattacatatcatgtgttctcatttatgtcctaagtctggttgaatttgtatgctagtttatttgctacaaagtcaatggcaaaattaaaattttgataaacagttgaaagccatgttgcctttgttgttctacacaggaggccatctttatgattggagttgaatccatttatacactgaaatgatctggctattgacttcagctctgtgaggtttcagttccctcctcttaaccagtttacataactattaataattctgtagtcttgcaaatggtgtgtcccttctgtgagtcatgcatgctagtgtccttcagccctttcatactggcaaagctcaattatcatgctattgtctcactgcattttgcacagagaagaccaaagcattatcagtgtctgtccactgtcccactttctctctgctcaaagttccacactatatacattccagctcttctgctgacagttctgttgtgactgggttcacaatctttttttgttcacccagtctttatagatgatcctttatagattattgttgggagccaggaaaatcccattaaggaatttctggaagtccaaacctccagagctctgatctacaattgtatttcggatgctagctgatttgctattgaatagcatggtctcagtggataatgtctcctactttgcatctatacagacctaagcatttcaataggcctgcaccagggcagagggctaggtgtacaggatgagtgaggacactgagacttaggaacgaccatacagaggggttgactggaggagagagaaatggccttgtggtcagggaagcacagttaggaaccagccagaaagatgctaaagagtctccagttttgcagcatggaactaagagctctctaaagatgacaagatgcctgtgtttggtctttattgcctttgggtcgctaggagtttccaagtccaccctcccccactcaggccaaacctcatggctactatagcttggggctgagacatgctgggccatgacatcagatgcagagaaaagcattagattttccaacttagatatccagaaatagaacctagactcttggttttgcaatattttgttattataatggctcctattacataattgcttcaaatttcagaactctgagaatagtcttcctccaaaagagagtggaatgctgtgtcatttagggcacccaacagtatacaaattgaataagttagtgaaaatttatgttcatttgaaaattccagtaagtaataattattatttatcattggcaaattattaagcatattgaaggcatacccccaaataaaccaaaatgatacaaacaagaaccacaatttttcggcaaaaatgtgagatattttaaccataaaattaatgggcatagtaaattaaaaataaaaataattactcaagaaaattctgatattcgatttctagtctctgtgaaattcagctacactcagttaagagctattttgtttctgttttcaaaatgaagatatgacatatctgggactgttgattttacatatacatataatatacatttatatataatctatttctgttggctttgatctagcaagtatgatagcacgcatttaataagctcaagaaagtctttagcttcattggacataaatatcacctagaaatgttacctgatgtgacccttgtcaggtgacatccttggaataaagccatgtgttgatgtgtcagttagttataaccttccttagactctctcttagtctcaagtgatgacttctaatacagtgtcttctgttcacattgcaagtatttatatttatgaataattgtctaggtctgcaccataaactgagagataaattatagccccagtctcataatcttgaaaatacaattacatggcttccttttccgttcaacatatacaaattgtatacctcttaacccatggcatgccacatatatcccaggagcaaatcatgaatgctgtgggattctgaagagttaccaggaagatagggtttaccctgggcttatagcattgatgataaatctagtttcaagtcccaatttgcatttttgttagttcaaagtatatgaatgagtttctgtattttcctatatatcatttttcataagtatggaaaagaatgacttagtcatatcacaatgatggtgtcagggtagatatgtgtcttgagtctgggaggcagaaattatttaaaaccatccagatcctgtttctactatacaagggctatttaaatataaaatataaaatatcccctgtgacttcatgaatttgatcactttgtcccaagcttctgatgctgttacaggagattgtgggaactagatggtggagcctttctggaggaagtgcataactgaggaattctaggtgttatagcctgaccattattatctctctgcttctcactgtctgaatgacatcagtctggcttccaggccttccctgtcatgacagattgtatttctctggaactataagccaacactaaccctttctcccctattctgcttctcaggtgtgttttatcactgtaacagaaaagaggctaatgcagacagatgaggtttatttccagtaatgtcacagtaactctgtgtatatctatttctctaacctatgccatacatattctctaagcggacatcaaaattgataacatcttttgtgatatataagccttgcagttttggaaagccctgccaagtgatatgatttttcttctctcatatcagatcaagaatcaggtatttgattctgacatctcaggatgtctgcctagtaactatcattgaagctcatggaaagaatagtatcttcagctacaaaatgttgcagtgttttattttacttctttgtcttcctctttgtccttaaagctcaggtgcctttcttccttttctaattgtttaggattacagaatgtgtagtttcattttagttatatagagaaacagacagatgataaagacaaaaaatgtttataatatatttatggatggtgatttctctcaggtaatgttccttgcagctcataaggctaatgaagtacaaacactatactagatgcttttattctctaagccctttgtgtactctttcagtaggacccactaatatcttgtctcaatacaacatatgtggttttgaactaacttggtgatttttgaagacaaaacatgctctttctaaagtaagagttctccgttttacttcagtgtataaagagtgtgagccaggagtacatctctccactactttcaaatcaaaaacatcattgaactttgcctttggaagcttggagaatattcaaataagtgattttgagagttcattggaggggagatggggagatgaggaaaagtggaagaaatgagaaaagattattttttaaaaaattaaaaaataatttggcagaaataatttctaagcactaagtatatatccaatacattttagttttatttttaaagatatgatgatggaattgctgtcctgcatggtgccacagccctttagtcccaaataaatacacagaggcttatattaattatcaattgtttagcctatggctcaggcttcctattggctagctctcttttaattgttaacacataactattaatctgtgtgccttcacattgccttctcttattggagattccttggtgtcctaacttcctggtggctacatggcttctccacctagactgcttgcactctgcctccctcttaccagcattctcctagtctggtaaccccaactatagttcctccatgactactggccaatcagcatttattcatcaacaaataagagaaacatgtattcaaagcatagagaagggcatactccattaaaggttagattaaggagttatattaagaaaacataagcaataatctcaccttccttttgtatacacagagccaataactgaaagtgaaatttttatttttgtgttttatcaaagcataccaaattcaatgtgtccatttcatgaggttcaaaaataaattcagttctccttcatatttaatacagatatatccctttttaagtgttataatgacttcaactcatggtgagtatttaatgagagctacagttggcaatgacatgccttggtgagaaagcagcaggtcagtctgccccatgaatttgcaatcagtttccaagacaacttagtcagtttcctttcaaccctgtcactcactccaagtatatacagtattgctcactgatacataatctgttatcaaaaaccatgaaaagggtttgctaaattttccactacacaaatgtcaccaggacacactggatgctacaaagtgatttcacaatgacctaagaataaaacaagtttccacagagcttagtttttatttgatcagaatttccaaaatctcacattttgttcagttctcctacgaagctgtagattactattctagaattttccaccctcattaagcaaactgttgcaatttgttttcttgaaaaacacttttgaaaatgcacattaatatataaactatatataaatgttatatgtaaattgtatatatatatgtatatatattatatatatacatatatatataataattttttccagtcacccagcgcttttttctgtttaatgcaactaagtttaaaaagtaacattgcttatgaatgtgtctgtatggagaaaacacacaaatctatttacaatgaaaagatctattcataacaaggtcttaaatattttataacctgggtattttctttcaatattttagtctccatttagccatgcctgggagttagtattcatctttatcacacagctctgtaatagctaaggttactgcttataactgaaatccctatcctgctaaacagagcttataaatgattgagaactattcttttttggaaaattttagtaaattaaaatataacaataaactatttatatctatgagatgtgtttttgaagcaattttaatgtaaacttactgcccgaaacagaagtcatttggagaattaaaatctttaataatactggcaagtatgtcagcattgctgccaacttgtgtgcagcatgatgatcagtatttgccataacaagaggatttaagaccagataattttcagtatgattcagcttattcgatggttgtttgacaatgttactattcagtattccttgtcctagttgcttgagaatattcaatagcaaatttgaaggagctgaacattgtatattatgggtaatttctttccaaacaaaatttccaaaaataatgtaatgcctgaatatattctcaataaaaagtaggcaaaataccctactttaactgaacagagtatatacggtagagaagaatcaagcttcgaaaaaagccacaaatcattcatgacaaagagagacagccactggaaattatcacaattaggaataaagcctgaggaaccttggaggattccatggcaggcaaggctgaggggcagggaacaacaggaagacagagcttaagtgagaagctttattagaaaaggaagataggtgagaggaaagagaaaagatataaagagaaacagacacagatgatagaagagaagagggggataggaaaagtcctgtctgccccaggagaacagcaggagagatagagggaaagtgagccagaaagagaacagaaaagaaagcagagagcatgagtttgtggaggtctttcttttaaaggggttctttgcacctcgactaaccagggtactgcctgagagcattatggcaggtgatgagggcaggcaagactaatgcctaaatccttacaaccacaccattggtaaggcaaagataccaggtatttttaaagacaatgtttcagggaagcaatcactattttaatgaattatacataatatgctttggatattcttaactggaagcagttaaaaagtgtcacaatttttaacttaagttttgtccatggtgacagatttttgattgttttttcaatttaaaatgttgatgaatatgtgctgtgttgtctttggagtggaactccaacatatacaaaaattagcttttttttcagatgacttctggacatggcctaaagataagctaatgcaatatgcttttattattatatgaaatttgtttgtcatgctataataaaaatccagagctgcagaatgtcagataattcctctctaaacaagctataccccaagggatatacaggacttcaatgatttttatgtaaaatttcacttatgcactttgaaatataaacaacaaagatagtaacacagctacccatggatagcaccatcttttgtagtcagacattctgtgtttatattaccattgttcctggctgaataacatgctactcacagtcacttacttatacttatccacactactgtttaaaagttaaaactgttacacacacactgttagatggtgagaactgcactgtcaagctgacagagaagagaagcacagaatcagagacctgtctcagtttttacacaagtgcagcagggatggccggcagctttagtctttacctacaatgtatttcgatgtattcccacacaatgagttttctcttctggtgagaatcagcataaaaagctattgaaagtctaaaaagtgaacccactagggttcatgaggaacatcctggtacacagccttcctccggaatttttttcaactattcagtggtttgaaaattagaagtccctttttttttcttatctgttgaatgcttgtacattcttttttatattaattagaaagaaaattattttacgtgtcaattccaggtccctttcccttcactcctcccctgccctgcccacaaacaccctacctatcccataccctttctgttcccaatccataggggtcttcaacgtctgtcttattctttgggatagggcctaggccaacccccttgtgtcccctttctttttcaacaaggaaagctttcttgttttgtttgactcaactttttaggagaagataaagtccttaagtaattgtaacctatagcctgcttgcacttcagagggaattgcaagaaaagcaagttacatgtctccacattttcatggagttgtgcctgaacaaaagggagctcatcaattactgagaggtttgtggtgacaatatcagggttatgattaggtaataaaaagccaactgagccgggcattggtggtgcatggctttaatcccagcagtcgggaggcagaggcaggcagatctctgtcagttcgaggccagcctggtctcaagagcaagtgccaggataggctccaatactacaaagagaaaccttgtctcgaaaaaccaaaaaaaaaaaaaaagaaagaaaagaaaaagaaaaaaccaactgaaatgaacatgtgtgaagaaacttagtaaaatcaaaataatgaactacgtactgccaaattcaggtaacataatgaggcaggatacaaagtggagcaatcataaccccacaccaaatcaaaagacataaggaacaatgggaaaaaggcaagatttagtgcagggtaggtgtctacctgatcacaacaccactgaaaacaatgagaagtgttttcaaggcagaatcaaaaaaatagaactgccaaaatgtttaaatgttcagaaaactatttttctattctagatatagaagagaatgaagataacagatgttaagaaaattcagcctcttactcatttagaaaagatttcattttattggcggagttaggatggagtctgcccagagctactcaccctgataacaacttaatcagctgcttccaaaaatagtgagcaaattctgtgagctgtgagctgtactaacggaatgtcaccagaatctttgatatattggtgatgatgatctagcaagaataataccttgtggaggaaaacattttaaggttgtaagtaaatgtttcaacctaatttcctaaaaccaattaactggttctttatttttctagtggttttgataatttattttttgcacataattttgtgtcaagaattatgagcacatcctctaactaaacccatatggcagtacttccagttgtatctgtattcccagaacttgaatactacagacactaacaaggtatttgtcaattatttctattttcctcgtgtattattgcagtgttgactaccaggccatggtataactctaaggtttagtgtgaattcttgtgttttcatagtatcctggcacaaacttctcttattacatttcactttgtaatcctacttcaaagtgacattttaaagccttataaagaatattgacactaaggaaatatccagagatctaaagtttgaccccaactaacaatctaaacaatagtagagaggctaccttaaaagcccttttcctataatgagattgatgactaccttatctgccatcctagagccttcatccagtagctgatggaaacagaagcagacccccacaactaaacactgagccaaactctggaatccagttgcagagagggaggagtgatgagcaaagggtcaagaccaggctggagaaacccaaaaaacagctgacctaaacaagagttggcttatggacaacaaactgatagccaggaaaccagcataggactgttccataccccctgaatgtggatgtcagtttggaggtctggttaatctattgggactctggtagtggataagtatttatccttagtacatgaatgaactttgggagcccaatcaacatagaccgatactctctcagcctagatacatgaggatgggtctaggccctgttccaaatgatatggcagactttgttggtccaccatggaaggcctcaccctccctggggagcagaaagggcatggatgggggggttcaatgggggacagaggaggaggggaaagagaaggaactgggattgacatgtaaaagaagcttctgatgtaaattttaagaaagaaaaagaaaggaaggaaagaaggaagagagagagaaaaaaggaagaaagagagaaagaaagaaagaaagaaagaaaggaaggaaggaagaaagaaagaaagaaagaaagaaagaaagaaagaaagggaagctttatccccaaaagacaaaactgagtactcagtttgcccataactagacttagcataatactcattgctgccttttgtgataggatgcatattttcctcttcttgcaggatacagaagtctgtcaatggcaggtttcattttaatcatcattacatttctagtgcttagtgtagtgtctgataaatagtaggtatgtgtgactataaatttaactataaatttatgcatttaataataccaattaatagtgattattcatagcttaattctggtgtttacaaactgcacaaagtttctataatgctacttctgttttacagatgagaaaaatgaactctagcaattactgaattaatcttgagaacagagacaatacatagtttgttaaagtcttcgatgttcttattaaaaatacaacacctagactcatatatttgaatgcttggtccaagttgctgaaactacttgggaaggattagtctgcatggccttgttggatgaagtatgttattggaggggggctcattttttcagaaacccctaccattctagcttgctctttctatccctcgtgcatatggatcagacctatgctatcagttactgttcaagggccgtgactggctgtctggtgacatgcttttggcatgatgttggactctactagtctctggaatgggaagactaaaattaaacactttcttttataagctaccctttctgtgatgtttgtcatagcagtagaaaagtgactaagacagaatctaatctctccttgatgtttggtcttctagaaagatatatctgaaaatcttacaactttactttttctcacttcattcttttctatttctgctttctttgctgtaacattttttattattatttcagtgcttcagcattgtgttcttttgtctcagttctaggattaacagtttggttcagaattcaaacatatacatctagagaatatactctcacaactgactagtatccagtagatgcattaggcaggactgtatcttttaggcagtcctgaacttagaagatggtattatttgatgcaagatgaaaaatatttttctttttgcaatatttgaaacaatttttcttactgtttatataactggatgtgtttccttctttcgttctttcatttatttcttctttatttcttttctcaagaccaggtttctctgtgtggtccctgtcaagcctgatactctctcagtagactaggctggccttgatctcgcagcaatccatctgcctctgcttcctaagtgctgggattaaaggcatttaccaccaccccctgacaactgtgtgttttctaatattcggtagctttattacttcattagtgttgctgtgataaaattctatgaccaaaagaagcctacaggggctagtgtttttctttgtgcactagaagaacaggatctatcatggtgtcgaagacaaagaaacaagttgggaaatgttgaccagagcctgactggtcacaatttcatccacacaaaggaaccagagggaagacaggacatggggcgaggttgcaaaactttaaagaccacctacctagtgatgtccttcctctaatatagctccagccctaaagggttcagaaccttcccaaacagtatcacaaatcagacagcaactgctcagatgcatgagcatatgggggcattttatattcaaccataaagctatctggctttgttcacttcatactcttcaataaaatgcgtctttattgtctaagacacatgtaatatcacagcaaagaaaaaattatatgtttggtggtatagtgcaccagatactaacatttaatttttagtttatttctcagttattttacacgaattactaattctatctaaaattcaatttatcctggttccatgattattctggaatattacaaccttattgctttttgtcacacccaaatctaaccagaaaaatctccaatatatatttgttttctttgtagagtctaaatgccatccttgtgacaccaaaatttcctggacataatctcagtaatagaaatatacattatatgtgtgacttgtactacagattaataacatagaaaaccacccaagtccaataaacttgtcaacaactaccatgcttctaaagaaagaaatacaggacacctgaaaatatgctttctttgcacatgagtctgagtcacttgttgtactgctgtctatggatgaccagtcagtaacgggttatgtgactccaaactaatatatatgtatgtatacatattattatatcccaagaggcaaaactaatgaaagtataatttgtcctgaataaacgcaaatgatgccaatagtgccacaccatcaaggtcagacaggtgttctacttatttctagtcaggacaagagctaaggagaagggagtactttagaagtcaaggagaattaagaaaataattcttcatttctttttagtacttctgaatttatttatgtattcggccttagtttttctttttcctatttcttgaatattttctcatagaactatatgactctgaactttctaaaaggcccagataagaggtctgtaacacaagttctaagaggtcataataataaaagcccagagtcagatatgtgggtaaaagatgatagataagagaaatgaaggaacaagcatagcaacactttaccttgacaacttcccagcagaaaggagagtaaattcttgcttcctccctcttatagtcctttctctgcccagccatcttacttactgtctccacccagccatctcacttcctgtctgttgtttagctccaccctctgatcatcatacatgttttatttataaaaacaagatatcaccacatatccccttttgtttaaaaataaaaaagttataaatgatataagaaaaactatatgcaataagtacaatatctacaggcaatattatatacaggcactaaggatcatcaatgtctatttcattagcatttaacaaattcagagaaaatactccattatttatcctatattgataagacgaaagtcttgtacctaatatagtttctattacaattcccattataaaattacattttaatgtctctcaacctattacacttaatacatcttttgtgggtttcttttttgagattggtaaacaatgaaaactataactacacgatctagactgaaactccctcagagacccaagaaggaattgatactgagtaaacaggatttaaaagcaagcaacttccaaaaaatgtgagagaaatgacaaaaacagctggctgcctggacagttacctaaggttgttctgctactttgggccatacatattcccttataggcctagaatctatgacagacttttctgtgaaggaggatattctgaaggacttcctgccttgtctaggcaaggtttgtagtcactctcttttttgtcttgtttgttcaatttggacagcatactttcagcaattgagaaaggcacactttcttgtccagtggctacttttgccagaaacaactgtagattccatgtggagcttctttgatgaacatcatcttctctgtagttccttctatgcccatcatcttgcctgaagtagattggtgctgccaggagaagacaatttaaatgtcttattctgtagctctctaaagtgtttgaagatgatctatctacaatatatctctgtttgaacttgcagacattacctagtataagtttgattgaaacaggtgagtcattattaatatacatttccttattatcttatatagttgttaataatacttttcaaggactagaaatttgcattacattattaatgagctgtgtaagtgcaataccttgaataatatttgaaatatatgcacactatgtcttaaattaatttcaaaatagtatcaatatacaatatttgtatacattatataaaaatctaatcctacataaaatatttaaaactagtagttgctttttagaagtagattcaatactttaccttcttatctcatcatatctatatacctccctttttcttttcacagaatattcaataatcaacctttttatcctatcatttatctatcacccaccccctctttttttcattaccaacaagttttaaacaatgccctaaacaatgacaaatatccataaccataaaccactcacctcacctcttgggaatgtgtcatgttcttaatgttacttcctgcttctgggggcaacagcatgtttagggaatcctaaaagaaaaaaatgtggttaattgcaaaactgtatcattttttccattctctgaataataggagagtgtagtacttgtctcatgtcctggctaaagtagtttgtggggctggctcatctcacctagccatctaaaaattgttctgatcagtgtctgtgaggctggatcatctcatatgacctcctcaaaattattctgagcagtatttagtacaaagtgtatcatttgttggagctgtccagcttaaaggtggtggcatagttctggtgaaattgctattctgggtccccaaaggtcatggcatggtcatggttaactgtcagaaaaaatggtaaagactcaaacacaaaatcatgtacaggaatttagaccaaatcttttctataattacttagttctctatatgaccattaatatcatgacaaaaagtttaaaatacatatatatatatatatatcaaaataaaatcaaaggattatgagattatcagcaatacaatagtccattactctttttcttctgttccatttaaggtggatcttctgacatgataaaaaaagatgtttgatttttcttttacaagcctactggggtttagagaaaaagagagccaaatttcacctccaaagccaggtttaatatttaattggaccaggattacaaaataaaacatttccattatgtctatagggaagagaagaaacaaacatttggaagatttaaaaattttatcctgttgtaaatatgatgtgccaataggcaaattttactcattttcttgggacaatttttctggatgatgttcttttcttcagatgtcttatttgtccagtactctctggattccttagctggatacatttattctcctgaaaagagaaaaattaaacccttccccaaccctacattttagggaggttctcctttggcttctccttatatctgatcaaatgagaagcatttgttggttttataggttagtttatattaaatggccatactgagtgaggaactatcatctcttccaattaagaggtgtcttggtaaaatcaattctttattgattttaatggttacctgtggaaacaaagaaaaacctcttttccaacaaaacacatgtcctagattccattctgaggtcaacacatttttgaagttcacccactaatttaatttcatattttttttatccaatgtctctccccagctgttgctttctcattagcattcagaaaattcaaagtgaataaagcactatttctggggttcgttatcatccattttagtttatcaaattcacttagagtttgatttgatctttttataactgcctgaaatgtagaattatttggtatacctgtactatgctttatattataataagcaagaaaacttttattttcatagacacatatggtggagcactgtccatttttatttgtgcaggtatacccattatggccataacttctagcaaatgtgcagttacttaattgttcttttctgtactcaaagaagatgcatattgaaaaactgtatgtgtattgattgtgtagtatacatatattaattttcctaattctacaaagtataacacatccatctgccagatttcatccctctgaataccctttgagttacattctgcaggtagcggagtttggttatataagaacaaataggaaatttccttgtaataaccttagcttgttgccaagtgatagaagaatcctttttaaaaatttgctattgacatggtgtttttaaatgaaatttggaagctttagcgtattttctatcgatagttgatcaatttgacattggattgtgctagaggggccagcagatctgtatggtatcagttctgcatcatctggtaaatattcagcagtttcaatatgcaaaacaactgtttctgcatatagggaatcagtaactagtttcagagtttctttatgatctattagcagcatgagaatagaatataattctgacttttggacagaattataaagactttgttccactttaaattttctgatttgtaacctcactttccttatttatttgcatcagtatagaatgtaggggctccagttatcggtgtttcccttacaatgtgaggacagatccaggtagttctttttcataagttgaattttcttgcttttgggaaaatcgttcatctctctcccaaaacaatattactgcaaactcttttccagggttcactttctacccatgatttgtcaatttcatcattcatgaaacatagtataatttctgttggatcattttggctatttgaaaaagtctccattttacttttagaatcaactgagagacacttttcaataagtttttaactttttagttgctttatgtggtaaaaatatccattctctgatagtatctttcttctgcattaaaattcctgtagcggaatgattagagggctttttgaggaaaaatcaattaagctttgcatcctcaaaagtccacaatgtacactctataatgttacaataaatctttctgccaaatgctgcctgagccccactaccaagtgtgagctttacaccagccacccgcctgagttagggcccaaatgaatacacagaaacttgtattaggtacagtgctgcttggccaatgactaggattctcatctgttatctcagtcttaactatcataaacctgtatattttataacacttatcttataggatgccttattgtcatccctccttgctggtagatcacattgtgctgctggagcaggagtggaggggaaaagagggacgcttcctgtttctcctttaaatatgagtctccttgctatgtcacttcctgcctggatcaccacttatctactatatttcccagaatcttagttgactccttgtcccatctaccttgctgtctcattggccaaacagtattttatttaacaattaataagataaacatatacagaagtacttcccccatcatctcctcttttatgtctaaaataaaaggataacttatcttttataataactgaagaaatctataaccataaatatctgtcttcaactctatcaaagaccacagaaggataatatatagtctctagaattgacagagacatctatctcgatacctggacagtcacccaaagttcctttgtaatgttggggcatccatcttcagcccacaggccatagtgtgtctgacacacttctctatttcaacaggaactcttcagtgctgtcttgttttgtaagttcagcagtcacttttttgggggttctgcatgtccagtttatacagcaacacacagtccaggcaagagcagtttcttgcccaaatggctaatcttgccatgttgaaagcaaactccataacgagtttcttcaatgcctatcatcctttctgacataattggtgtgccaggagcagttgtgtctcactgacaagaaaaaccctaaaccatttaaatgccatatttttgtaggtctttgaaaggtttgaagtatacctattcatctcaaatacatctttgtatatctagaaaacctaactaacctnnnnnnnnnnnnnnnnnnnnnnnnnnnnnnnnnnnnnnnnnnnnnnnnnnnnnnnnnnnnnnnnnnnnnnnnnnnnnnnnnnnnnnnnnnnnnnnnnnnnnnnnnnnnnnnnnnnnnnnnnnnnnnnnnnnnnnnnnnnnnnnnnnnnnnnnnnnnnnnnnnnnnnnnnnnnnnnnnnnnnnnnnnnnnnnnnnnnnnnnnnnnnnnnnnnnnnnnnnnnnnnnnnnnnnnnnnnnnnnnnnnnnnnnnnnnnnnnnnnnnnnnnnnnnnnnnnnnnnnnnnnnnnnnnnnnnnnnnnnnnnnnnnnnnnnnnnnnnnnnnnnnnnnnnnnnnnnnnnnnnnnnnnaaaatagaaacctgaccaagtccttgtttttgtagtctgtaaggctgtatcatctcagctttaggggatcttgcttgatcaaaccatattagtctggaaggaatccatagctttttattttctgtggaaatacaagtaaaacttttatttctaagtagcctgtccttagacttaaattttgaagttagggcatttttaaaatctataaattggattaatttagcagcatttataatcaaatgtattttagcagcattaatttttttcctcagcaatcaaacaatttaagacaacagtatggcatttagtatccagattctctgtgtatttttcatctctaggtggctttttttaccattctacttttactttcttttgtttatttttttgagatagggtttctctgtggaaatctgcctgcctctgcttccttcagcaaatcctactgacgttggccaccacaactggctactctatttccacctgttactttttctctcaaaagcctacatatatttttaaacccagtgtaaaccttcagagatttttctttatctggatctgtctttatcatcttgggagtgctgagtctaaactccagaagcctagggatggtgcaagcatatggaagctgctctgcgatgcctctcagcagcccgacagtgcaggctgtggtggcaggtttccctctttctctgggaaacttggggcatggggtcatcccactcactgacaacattctgttacgataaatctttctgccaaaagccacctgagccccccaccaccacttatctactacatttcccagaatcctctttgactcctaatcctgtataacttgccatctcattggccaaatagtattttatttaacaatcaataagataaacataaacagaagtacttcccccatgactgtaatttctcttccacaaaagccaattctctctcagcttcagctgttaattccataggactatttaagtccttgttaccatttaagtttttgttacaattaattagttgatcaggttttatcccaatagtgtgccttagattagaaatgtctcctagcaatctttgaaaatggttaagagtacataataaatctctcttattttgcacattttgcagtttaatttttgtaaacctatttcataacctaaataattaatagaatcttgtctttgtatttttcaggagcatttttaatcccccaagaggcataattttctttacttcttcaattctctaaattacctacacttgaatcagataaaggatgtcaccatgtaataataaacaatagattaaggaaagtacttacatattatttctaatggctgacatagaaaatgttggcacagtgtagggatatttttacattccctgtgtgagagtaccttccaatcatatctcttagcaggctgcgaattatttattatacatggtcactgtgaaggcaaattgttctgtgtgcctttgttgcagtggtatactaaagaaacactcttttaaatcaataaatataataggccatccttcaggcaatagagaaggaaaaggaatttcaaatttaaggagccagtttgttgtatcaccttataaacagctcttatatatgttaccattctctatttacctgttttctttttaataacaaatacaggagaattccaattgctggttgattcctctatatgttctatatttagttgctcatgtaccagctttcttttcttttttttccaagacaggatttctctgtgtagctttggagcctatcctggcactcactctggagactagactcaccatgaactcacagagatgctcctgcctctgcctcctgagtgctgggattaaaggtgtgtgccaccaatgcttggcacctataccagctttctaaagccttcagtttctctgttgttaaagactactgtgcaacccatacaggtttgtttttcagtgattttaatagtgggtctattggtatatttgaaagattagaagctgttgtgtcctattcttgtgcaaactgaatggttggttgtcattctttatataacctacttgtacatattccagagccatgtgttcatttatggtttgtttctaagtttggggtaatgttattctgagtattccattgctgtaacaaatcatatccccacaaattcattgcaatattaggaatatataggtttaatattctcttctgtccttctggctctatatattcaagccatcttgtgctctgttttacctaagataaagtttcaatccctaaaagttgaacatttacctcctaaagaggccaattttaatgccaatattctttctatataattgtcaaatctgcttccgtgtctatcaaaacttcaatgctaaaatcacctgctcatcctgttaatttcggtctctgatcatttatagaagttcaccaatatacttgctctgtgagtttttaaaatttttgttctttcttttatagatattttatcatcgcatgcagtatgattccctataatatatattatgcttttttattgctctgggaaggagtttccatggtgacaggaaagtgctgagtcaaacttggcacaggcatcagcaaaacaccctcagagagtttcacaatggccaagtaattccttgacaaaatcttgttgacttacattcttttctccaatgctcgcctttgtcgaaccttctgcataatccagaagggagagtattctgttttgtttatctttataaaaagcaatgtttctagaaacaccctgtttactaccccctttaaaatttgcaaaaatttaaaaaaattgacatttcaatttttctttaaaacttttgaaatcacctatctatatatcattatcatctttatgagtttcaatattaattatatcttggatctaatcctccaaaggtcttgaccttgactttaaatgcctaattatcttttggcattttcaaaagccattgattcaattattatttttctagattctgcatctgttattattctatttactgctaatgatcgtctttgttaggaatacatgaaggtttcctttgctccctatataacttctataaatgacttatttttatttcctacttccccaatgctgtcttaagcattcaaagatgatgcatggcatgaaaccaagaagtgacattgccttaataagtaacataatctcttctaagaaaatgatcttgggagatattcatacttgtctctttaaccctttgttcaatattcttagtctcttctctgactcaggaagtcccttgtaattgtggaccagactctagaacaactttaacaaatctatccagtctataaggataactctattacaatccaccatgtatttatcatcttcttcacaaatggtgactgtatgccatataaaactactgcatacttgaatttccctaaatctaataatgtgaaagactttcaagtagctctcatataagctactcaaatctcaaatcatcatttggtgattcctgtaaggttactggatatattgagattggttgtcttaagaccttatagtgttcatttttaacccgataatgccatgcagaatttgtttccacatttaattccccagcctgagttttaatatctctataatctgctacaatatattttactcaggcctgcatcttggcattcatgtcaaccatctattttatagataaaccaagaattatcaaattgatagttaacagtatgtcaatcttggttaaattgaccaccacttcatttaattgctccaggctataatgtttcccattttaacatggaaaaatctttttttaaactaattctttcctttaagtatttccaatagacttaacaaatattccaacattctcagtgaactttgaggtgtagcatctctgattctagaactagcaagtggatgtgagctgagagtggcagccagaggacaggggctgtagggaaggcccaaaatccatagtggtgttgggagaggtagagtgatagagaaagaaaataaagcaagatgtctgtctgaaaaacacacatgggattggtaagaagaaacaagtgtggtggttatttgtcagagggcaaagacaccagagtttgggttgcagctgaagtctgttcagaaaacctacacctgaatattctcacacttgctcaaaatttggggaaaatcaaaagaaaatctatcaggtcatgcagtgcttcagggatctcaggcctgggtcttggctggtgtctcaaagaagatttcttgtgaatttgtacctttatgtgggtgccaatctgtatgatgagtttaaataggtcttaataataaaagcctggcatcagatataggggtaaaacgattagcaagacgagtgagcaaaaccatagctgcacgttaccttggcaattttgcagctgaaaagagaatgaatatctgtttcctgttttctgtattcctttctctgcccagccatctcatttcctgtctgtctgttagctagagacaagctccaccctctgatcttcagaaatgctttatttgcaaacaagatgtcaccacagaggacagtactctaattgaactgaaccagtcctctaggctcaggtcaatataaatactgtgtatccatgtgtatgtatatatgtgtacatatatgtatggatctgtgtgtgtacatatttgtgtgagggtatgtgtgttgatgtgtgtgtgtgtgtgtgtgtgtgtgtgtgtgtgtgtactcgatatgtgtgtaaatggtgtgtgtgtgtgtgtgtgtgtgtgtgtgtgtgtgtactcgatatgtgtgtaaatggtatgtgtctgtgcatgtatgtgttttgtgtgtgtgtgtttctgtgtgttgtgtgagagtttaagtgtgtgtttgttgtctatagcatgtccttttttgcacagaaatgttgaggattttttttttttactgaaactttaattgacactcttcacaaagtattttcacaagaaaaatcattccagcaagcttgacctaaagtggaacatctgtaaaaaattaggtccttcctgagtacaaaaaaagtgatatgctggtttcacatgagttattttaatttatgaaaaccaagagcttcagatgtaggacaatgatgtaacagtttcctaaatatttttagggacatacatgcaatcacagcaagacacacgtacacacacacacacacacacacacacacacacacacacactccacacggctcaaagacatatgcatacatacatgtgacaagttccaggacagcctggaataaaaaagtgaattcctagttaacttgggtgacaaatagtaataccctatacttaaaaagttatagtaatgattattctatatcaaatgatctttgacctttctggggggagaggatagagtctcatggaatttatctcatacttttgtattcaagcaatcctcctgtctcagcttcccaagtacataacaaattattgcctacttgtacttggtgacacaaaacaaatattctattggctatacaaaagagcaaaatattatgagaaaagggatgagttggtgagcttcccacaacatgttcataataggacctgttgatacaagctggagcaaatcgaagaaaagaaccttgagagaaaaataaactagaagaaagaaaaaccccaaagcacatgtattatacttggatacactaatttactatgcaacacccttcttgtctcagtagattaaccatgtgagtgtgtgtatttcataaaagtttagtccctgtagtggtgagccattcctcttcactcttgaaaagaaatcatctggaacatagatgctcaaggaagcaacagatgtgatagagcgctggatagttcaaaagagcaaccagggctcaaaatgacttacctaatatttactatgtctgctcatgttccagtatatgcagcacaagatactttctatgcttagatgtggctatatgactgggaatgtattgcctatattcaaagaatggctatatgatgaacacctggttttgtctatgccaagacactcgagagaataaacactctttgcaatgaatttgacagatgatatgtgtttctttagagactatagtaaggagcagaaaatgccatctaaagaggagaaacattctttgtagcaacctcttctaattaaagggcgtaattactccatttatgagtctcatagtctacaggtaattagtgggcatgtttataaataatttaaaaaatatctaagatgttctcataatttctataggattcacacaaaatggtttcaaaaactgacataatgggtaaaccaggagcctgtctaaaactggcaatctcttgtagccatttttaagaaagaatgattcttacaacatacttataaaattacttctaaatcatcatcaggagttcagatgacaattcccaccagatctcaactattgtatatttatttcttttacaagaaattagaatgtctttcctcagaataatatttgtatcttactatgaaaggaaaaagaaaggtatgaaaacatatggggaacttatacaatcaactattccaactataaatttgtcagtaagaaatcatttctgcatacacatgattctacatttacttgcagtactaggagctgggttgtggggggacttagttgttgagcacctgccaatcatgcatgaggtcccagaatcaatccctagaaaaaccaaaatcaaccagtcagccaataatgatataaagtacatcgtaacaccacaatctttttatatattttatttcattttacatagcaaccctagttccctgtccccttcttctgcccctctcctgccctgttcccacccctgtccactcctcagggtgtttaagtcctcccatgggtagtcaacaatgcctggcacaacaagttgtggcatgagaaagacccccccccctgtatcaaggctgaacaagctatcccatcatagaaaatgggctccaaaaccagttcatgcacctggaatgggtcctgtccttactgccagctctctgcccaacagatcatgtcacataactgtaaccaacattcaaagggccaagttcagttccatgcaggtttcccagatttcagttcatagtccatgagctcccactaactcagctgtctttgtggttttccccatgatgctcttgaccccacttgttcatatgatccctcctccctctcttcaactgaactccaggagctcaacccagtgcttggctgtgagtcactgcatgtgtttccatcatttactggatgtaggttctatgatgacaattagggtagtcactaatctgattacagtggaaggccccattcaggcacccttacgaatattgctaggagtcttagctgggatcattcttgtggatttctgagtatttctatagctccaggtttctccctctatccagataacactttcattgttttcctccatggtgaaaaggttatcaatgtgaaaccacaatctttgatcaattgtcatgaaaatgtacgacttagcatgagaaagaggttaaagatagcaaaaaataagtgaatgaaatattgcattaaataatattatgttcagtaaacagtatcattcagagaccagtcagcccaatcaatagaattacatcaacatggatattgcaatctatcagcctgaataagaactgtgtctgacacagataattatttacttttagtgttcaatgaatggaaaccttgttcttctagaaagagtccagtattatctggagagataccagccttgtggagcttgcttacttcagcttcatgtagcatagatctgaagctgtgggaaagacaaggctttggaaatctggtttttgtaaacttctcaacatattgtcacaatcattaccatctctccttcagggtcctttataaaaatctgtcagtaaacctgtcaatagtcagattgtcttcttcttatgagcttgctcaagccattttcccaagcttccagctctgagttatgatatgtcaaaatgcacagataattggactgtcagtaaagtatagcaatattaagtaatactgacttttattttcattatggaccaatcacactaaaacactcagtgaaaaacccaaagcagataagatatcagaaaatcttgctcccaatagaagcactttaccttccttaattatttgaccatggtgttctggtccataacatttcatatatgataaggatagtgaccttgtgtttgtgaatgaagggacttggttatttgtaaatctgagaagtaaaagcctttagaatgtttgtttcccttaattcacattgcaggaaaaacatcttctgtgcctacaagtgccattgaattttcaacctccctttgataatgtatttcaaaggcctgatattttctaaccaggctttgaagaaagtctgccagcaacagcccaatagttgtttccagaaatcctttagctacatacactcatacaatcagatttcctattttgcaatgctcagttttgggaagcagctagttatttaactcatgaaaacatttgttataaaggagataacatcaagaggagatgcacttagagacctcatggggatctaataatctgtttccattgtatatgtcatcagttcagcaaatggtttgaattcatgcacacaatgagattggaataaaatacccaaattctcaaatttcagatgcaggatgaatgaaagaatgcaaaattgataagtgctaatgcttcaaaatatttaagtttatctttcccgattttttgccacaactgtaagaaccttcttccattccaggacctttctacagaacaaatccaagtaaattaatatactgatacattcttctctgatttgcacacacacacacacacacacacacacacacacacacacggacacaacacttcacagatccatgggaactttatatgagtgatttcttcaaaattagaaacaaagcgtggggatgtattgcttttctcataaaggtgcttgccttcaagactgagaacttgatctcaatacaaggtatcctaactgaatcctgaaaaattgttcctgatgtccacatatgcaccatagcgtgtcttcataaatacacacaaatgtacatgcacacacacacacacacacacacacacacacaatttaaaaataaagacagacgaaaagggaattattttttaaaataataaggattaacaagtttctacatttgcatcttacattggtaataagcagtactatctgaccagccattgagggatgaggcctagtttcatgaacaattttttttgtcttgttcagttacccaaagtgattcacactttcctgtgatacagaataaaattttccagctacacacaatgtcacagttacaatgcaaagtgctgtcttcaagaggatgacggggaaaggaaagataacctttgatagtgtctgattctatctgaacatctttatcaagaagtaagtcagtttgaaaagtaccagctctagttagtgatatcttccttctgttacttatcactgtgggaagttctggaaatgagtgaaactaatggaagattgagtgacacatcagttattccttatatagactacacacagctccctccaattttgctggagatctggaaaacagaatgctgcctatttggtagctaaaaatattaatccacttaaaatgaatgagcaaaatgtcaatgattcctcatccatggtttaacatgtgtttcaaaccagtttgaaatataggttaaaaaaaaggaaaacacagatagattagggggcattaatgtgcaacttgtaagaagcaaataacaggacatgcacacacacagttaatttactatagaattagaaatagttttagagataaagtttctacactaggctgaccttgatctcactgtggatgatattgaagtcctgatcatcttacatgaccacttaagacctgtaattaaataaatctacaacaaaattaagcttatttgatacagagaacagaacacatgctagaaaacactcgatcaaacaagatgcatggctgtcctgaaataaatgtcttcattttttatttctattacatattcaattctccacataaagaaacacatatgtgtattctttttatatatgaaatgcactacatatagttgtgactttctgcacgtggtgtcttttttattctgtattatgttaacctgagttatgtgactttgctgagtagcttctatagtttcatcctctcatttcatattgtcacacataacccttttctgccaaatactgacagtcatgccatcagaagataattataagttagaaagtgatatcatttctgtttccagaggcatggttgtactaagcacaactaaaaaagtgctcaccaggacattattgtgttctcttctggaatggtacttaggtacttaacattcattaaaaagatagttaaatttgttgaggagagattggttagtctcatggcaactaatgggaggactctgatataacatatcgtcctgaactcttcttaacagtgagattttatactctgttttcatgtctggtcccccttgagctctttttgtcttctcacttcctgcatcctgtggtgtgggaaagggaattgtatgataacaagctgtgatataacaaatggtggtggagaaaagagaatttctgggaaatccagaagggcagttttcctttatagataagttgtacctgctttcctgtgattttatttgttcattaattgccttgttaggttattgaaaagcatagtacttttgcttttaatgaacaattcccagggctacattataaaatatgagtaataaactgtcttccaatcacaaagaggtttggcctattgagcaaatattactgtggtaaatattacaatagatttatgaatgacagataatgaggacatgtgccatagcagagaatttgtcttatgggctgagacagataattcaaagataccattcaaatgtaattgggattcaggacatttcacacagcataaaatgaggtgttgctgtgtatatacttcctaagtcgacaaatacatacaatcaaacctcagacaggcagtgacagcaaacttctttaatcccagtacttgggcaacagaggcaggcggatttctgagtttgaagtcagcctagtctacagagtaagttccaggacatctagggctacacagagaaatcctgtttcataaacgaaacaaataaaatcccaagtccttttctacataaacatataaacattttcatagaaactaacatttcatcagaaattgagaacaacactaattttttccacagctgtacttaggacagttatttttttctaacataatattttattgagtatttggggaatctcacatgtacacacccatcacattgcttcccagtccacctccctgcacttgtgaccaatcccccaatcaaaaataagtccaatttgggttatttacatactaattggagcatggtcaaatgtgtgtcttcagtcattcttattactgccaaagtggcttatttgctctttagtctgtgggaccatgaatcatggactttcacatggtttctggggctcctggttgaagtagggacacaggcccacacctggccctcagatacagcagtgactagcacataaatatgtcttcaggtgaaagaatagaccaccaacatccacctgatattatgtcagcattggccactacatcagcccagaccctgctgcaataagaccataggcccagacagaaccttcagtggcatcaccaacctagatgtcaccacagcccttggtggcagcacagctgagaaacatcaacatagcttcaggctgattcacagaccacagggaacctcaggcctctctcatgcccatcactgctatcatgtcaccagctgcatatctttccacagtgtactcactgctctgcctctctatcacttccatttccccatcatctgttccttcatagtccttccccacactggtgggggcatttcttaggagagttttattttttgcatgtggagtggacagaatgagaaccaaacagacacctgctttgcacagttggagttaaaatgaatggcactccaggtgattttgactttacctcaaaaagcattgtcactcaagaggtgttttcagatgagtcactaaaattaattccagctggaagggcactgtgggtttgtctgggtgatggtctttaacagttggccaatatcaagaacttaaggcattgatgtggatccatggcagagcccttgcctcctattttcaaagactcgtgttcatttcccagcatctcagtatggctattatcagcaatagtagcatttagaccatacctggctcttcctccacatattaagtgaattaagaaaattgcaaactctagtacaatcatgagcaggtgatgaaaatttagagaagattaaattatataaagatggcacaagtcacttagtgttcaaagaaaaattatacttttaacatatttataaaaattactgtctgtccctcaagctaaaatttaccttggattttatataaaaagataggtttcaattattgctaaaggcacatatattttcctataatactctacagaagaatggaaaaaatacacattatttgaatagattatctatgagtcctaagagtagtactgaatattgaaagaaacaggaaatgcaaatgagaaaattaaatcatccttttggagagaagatgtgattggagtgatcctgtgttggaaagggaataaaaccagaattacatgagaccagagggagcatgtgtgagtcacacaaccagaattaagatgagacctgagaggaaggcatgggtaaggacacacaatcagaattaagatgagagatatacatcaacacctggaaaaggggaaagagacaagatctcctgagcaaattgggagcattgggggatggggaggaaggtaggaggaaagagaggggtggaggagatcttgaggtatcaggaagataagggaatacagaaaaagagcaagaaaagagatgcctcaatagagggagccattgtaggtttaaagagaaatctggcactagggaaatgtcaagagattcacaaggatgaactgaattaataatcttagcaatagttataagattgataactaccttacatgccatcctagagacttcacccagtagctgatagaagcaaaaacagagattctcagctaagcagtgagccaaactcctggaattcagttgtagagaaagagaagtgattgagcaaagggatcaaaaccatgctgggaaatcccacattagcaacagaccttgttgggaaccaaatctcagggttgggcatgagatcctaggccatgcttggcaggccacatagttaacctttacatagcagctccttagaacatcatctccagaaaagaaacaacttaacccagtcctccacccacaggctcagtcacctaagcaaccattccttaatcatgaactctttatcctgccaaacatcctctttttgacttcctaatatcctgcctataccaacacctggtgtgcaaagaacccattctgcccatccccatatcctgactatataagctagcctgagaaaagtaaagtttgccacttgatcagaatcctgtcttgtggtcgttatttctgcgtctcttgtcctcattccctatccctgaatctcttgccccaggttgatgtcctgcaggtcgggacaaaacctgactaagtgtgaattcacagatgcaagtctgacagctgggtgaccagcataagaccaaatcatgcccgctgaaagtgggtgtcacttgggagatgagggagtgtatgggacctctggcagtagaatcagtatttatccctagttcctggacactggcatcccattccctatagagggttactctctcagcctaaatacgtggcagagtgccacaaatgatgtgatagattttatgatcccctatgggaggcttcactctctttgaggaatggatggtggtgtgggatggggagttgtgggggccatgcaaggacagaagggagagggaagttggattggtatgtaaaatagtattgtgcttaatttaaataaaaaatcttaaaagagaagcaaaaaagaaaagaaaagtaaacaacaacaaatgatgatactagagggggaatcatgggtaaggacatacaatcagaatttgaacttttctggtttctatccactgactagtgacttggataaaattatgctttggaatcagttttgttgttgattgtttttacagaaatcttaatgtcattggtttctaaatgggataaaaagaggacttgaaatatttatgatagtgggaattttgatgatttgattaaattaaaataaaaagtcacacgtattctaattgtgtcacaaagattctaatcatgacatgagtccagttagcactaatgacaagcacacatttgaaaacttgtcaggagataataatgtttgtcttgaagaaaatttacacataaagaaagcagaaactgtgtcaacaagaagctattgcctgagggggttaggaaaagctcctcaaaagttactatttgaccatttactttaggcactcatatgagtctaaagagagatgatcaaatttgcagatttcagttagtgcctcacagttggacagacaataagatattaaaccacacaaagacaatttcatagagaatcttatgaaaacactacagtgtttctcatttcttttaatggtgggtaaaatgggttcattaccatagcttttttcctgtattatctaattatgccagcataaagaaggcaagcttcaatacaacaataatgtctctaaaagaaaaggatgagaatacagcaatactgaaacacatattatgtatatttctgagattatataattagggtgttttatgttaaaataacagatgcaatgacattttcattgttatctgatgagtgtagatctatagatttaattgattcaaaagctcatctagggtaggtttctcaataaagaaaattctttaaaaagaatgggctctagtaagagtgacacaaacagaaacaaagtgtctgaagggaaactggttcttgaaaggatgatagaaattgattgttagagtggaattttacaaagatttgcacttttcaatgtgaaagagacatgggaatatgcattcaattctatgtttctagtaagataggagtaaaatgatggcaaagactagcaccaatacttcatagattcttccaagagagagaactccccctaacattctctgtgggtactattgagactgtagttgccttgtatccaaaaggagaaaaatggaataaatctacaaaactaaatgtattttgaatatcaatacatgcaaatagtatcaggaggatactcatgaacatgagagttttatcctagaaatatcctatttgtttaccatatagaagtgagtatgtcacaaaatgcacagtcttaaatagaggtatctcagcagcccttactataaatacataacagcttgtttaagtgagaaatatatccacctgtcatcaaggctgcttatgtctgtcttgttctttttgtctaatctaaagtaacaacacaattggattaatatacgtttgtggagtgtgagagtctacaagagggaaaaatgccaaagtataccattccataaaacttcacttaagactcacataattttcacttaatacctaattccccttacagttaaagtaccaagattcctggtaatgggtttcttggattactggcagtgtgtagctctacagtgtagtttgtgctttatttacttttcttgaatatggctggtggctgtttctaaccatggatcccaagccttagctcctccttgctctccattacttacagggtctccactttcatctagtcaggaaaacacaggtatcttaacatgcgcttttctccatgctataacaagtacatgtctagtactgtcctctgaaatgatccagttcacaggaaaaatcagtcactataagaaattagaaaatgccctttgcattttctgtgcctaaaataatagcaatcacactatttatttattcgtttgtttgttctctcatgtatgtatgtgtgtgagtgtgtgtgtgagagtgagtgtgtgtgtgtgtgtgtgtgtgtgtgtgtgtgtgtgtgtgtgtatgtgtgatgttgtgaatttggaagtcagagatcaactttaagggttagttgtttctttttaccttgcatgtttcacgtatcatatccaggtcatctttctaggcagcaggtgcctttattagttgaaccatctcatcagtatgagttttgttttatcattgactcttaccaccttactcactcaagattacaatgtgctattcctgtacatggatatattgtttcttccaagtcagtaagaaaagctttttctaaacatgctatatcattttttcttatatttttcttaaaaaggtcagtttatctgaataattctcctacacccataaatacatctactctcatagttagcatgttattatcttttctgtaatgtttaattcactcagactttctccacacataagactgtgacatatttagtgttacagaaatatgcaagaagtggatgctgtactatttcatttttattgcagctgtgttagttattgaaataactaactgtattgcatgttgatggaagatatacaagttacttaagattgagacactgtcaaaattcaatataaatctatctttgttttgacagtgaggtaaattttccatagggcattcattcaaaaagttattattcaaaaattaaacttttaatggttttcaaaaccatgaaagaaacaatatcgattgccatgcaaaagaagagtcttgactgaagactgcagagtttcttctctctcttacaaaaagatgacttttacttctgccaaatgtgcaggttgccaagtgaagtacttctcaaacatgcatcaagaagtcctcctaatttccttcctttatggtgaggttcaaatgaacaagaatattaaatgtgagcattattattgactaaaagttatgacatgacttaataatttatacatatattgttttgtttagaacttgtctaagacaagaaaaatgtggttaaaggagataaccatagaaataaatacataaataaacataaagcagagaccagatgaaatgacaagaatagggcatagtgttctttttattgtacttctttagttcattcatttctttacttctatttgtaatttcagtgtctgattgtctgagagagagagagagagagagagagagagagagagaaggcttatgagtacatttctgtgcatacatatgggtatcagagatggacactgagtgctttctgagttcaatatccatcttccacttggagataggctaagtctcatttgaatacagaactcacattagcagtctagttagccagtttgcatgagtgatccctgtttcttgctctcaaggataaaatagagatgcagttgtgttaggagccgttacaagctggtgcgatttcgcactaggtaactttgtaacattccatcccttggtctccgcccctcctgtgacgtcatatgatccgatcagctgacgtcatatggtccgacgagcttcagccagtcagagagtaacagtctgaggcggcggttgccagcctatataagggaggggtttttgggtgttcggagtctccgctctgtaagctgatgctctctctctcaagatgcattaaagctttactgcagaaggatcctgattgtgtccccgcatcgtttttgctggcaaggcagttagcgcgggacacagttggggctgcatacccacccatcatttaaacagtgctggcttcatgtgctacatataatttataaaccccttccttctcagctattttttacctgatagtgaaaattagtaatcagttctgttagatcccactgtttctaatgatacaccaggtgatgaagttttgggttaaggatgtcaaggcatcttccccatgaaagaagatattgccttcaatccagaaagtgagcagaatgtaaaatcactcatgattgcttttcttctattcattctgcctcagtagtccatcatgttgcagtgagactatcctaccacccaaggactcctttcacatttataatggtaaatgaggtatagggtaaggattttctacaatgtgcacaaaaattagtttattatgtgttgcacaaaaaatgtttgggctcattaactcacaaggaaatggcctgttttcatttattttacaatctctgtttcatttcttcagtgcagttcctctgtccactccaaatccaaaatgaggaaaggtagattatttccattgacaaaacatattacattctgaattactacagattgcactagataatattccaagtcttaatgtgggaaagtagattaaaactattcattttcagattattttagctgtatctgtgcagttaatttattaataaagcaagataaataattagataatctctttgtcattgatttctaaatgggctttaaaatttccaataacttttattttaataattataggggaaacctagctatattactttcaatttcaaataatcatatgtgagactgcagagctgcagcctattaaaaactaagtgttactgagagaaaagaatgttgaaaacttgagctagagaaatagttcagcattttagggcatgtactttcctggaaagggacacttgttctcttcctagaacttcttccaggcagctcacaaccatctccaattccagctccaggggtccaactcccatttacagactctgcaggcactgcaccacacacacacacacacacacacacacacacacacacacacacacacacacacacaggacgagagtactcctaaagggcaacagtgccactttcatctcaggataaacaatttcatcaatttggagaaattcatgccaagcactataaacttagccaattatctgtgcctagttaggtctggcaatctagagaagaatgtactactgccattttctaaggctgtataatctttaagtacattaaaattacttatccttatgttgaaaggtaactagaagttgctcattgtcaaaattgcttccgtttttgtagcagacagagatcagtacagaaaaccataactagtcaaaatgcagagatctattgatgtgatggcgtaatgcttgtcacaaataagtatattaacaatacaaaccctacatttaaggcttagataacattgttgatcagtaactacaggcataatgcagctcatccaaatgcaaagaatattcatgtggttcttgtcgccttctcatgattcatttacaacacaatccctgcaacacttgaagctaagaatttcatagattagtaattgggaagtttataagagtcagagatacatgatgtgaagtttgatggtatttgcttccttgaaatgtctgagaagctctgaattataatcaagatgactgcctaaagaaaatctgaacagcaatgaaaccaacagacatgttaacatgtggtctcagccttacacaaagaactacaggtaaccaaggaatgttgagagtgggaacaatgatcttccccaacttggtgatctttctgggaacttttgtacatatactggattaatgtcatgatatgtgtgatttattgtagatttgtaaggatagttgaatgtaaggaagtttatttatataaatcattatctctataggaacttccctcacactgcttaaaggagttacctaaaatttaatagttaattctgcataactctcaagtacaaaatcaagacaaggttaaaatccacaattgtcaaaagccttagcaaaatagaaagtcaggaatggttgaaaccattttcttaagatgaccagggatatgagtgtataaataaaatatgtaatcttgtatattaataaaatttcatgcctttaattaaaccttgaagctatcattggtgtaatcatcgctactgctaggactaggaattgaacctaagcctacatgcatgttaggaagcatcatattagtgaatatcagccccatccatatataatttagtagtttactagctgaggcagtttaactgtacataaatttgccattgcttctcagtagagaaatcaataattacttggtaaaacccactgataaaggagtgatatttagctttggagcaatgtggtaggagcgttgaccaaggcatatgtgtggtataaatttcataacaaatgaaaatagcaagttacagaagaatttggatatttttgtttctgtggagaagttaagtataaattcaaattcaacacaacagacatgcaaacatgtacagactcatcctattttaaatcatccaaaatcaaatgggatctagacaaagtttcattatacagcatgactaaatttaggtttattcttcatggacattcataacatataccttattttttaagaaaaggaaaaaatagtcaaaacattaacacaacatttccttaaaaaatgcatttctacatgttcattgtggtttaatgatccagaataaggatgtctaagcaggaggaaacgtaccagccaatgctaaaagcaagattttctcctaaagcaattgttactatagtcagacaaatgtactggcctgtcctaggggttctgacaggatgtgccctcagcagcagcccctaagagcccaacctgtgtgtatattcactgtgttctctttttaaaagaaccctgcctacccccaatttttgtctttctctctgcttctctgtgtgtctcactctgcctctctcttctcttctgccactcctgtccccagaggcagatctcccctctctggttttccattcactttcccctaataaaaaaaccctcaacccaagctcttacaactggaaattttttcttgcatggtgctttttaaaattacaatagcaatcatgttttttgaataatcaggattttaattgaaagtgtcaccaaagagcctcggggtttatccaaagcacattttccttccagtctgattctttgtaacttggtcagtataatttgtcaactttttcaatatgttctaaatgaccatcaggtgctgggcaattgccattggaaggagacagcagtccaccctttccttcatttttgttgatttttttatttgaattcgaaacaagattgttttacatgaaaatcccagttcccttctccctccgcaactaaaaccctaccaatcacatatactttctgctttgcctggatggtgaggccttccatagggtgtcatcagagtctattgtatcctttggtatagggcctatgcccactcccgtgtcttggctcagggaatattcctctatgtggaatgggcacccaaagtccatacctgtgatagggataagtactggacaactacaggaggccccatagatttccaagacctcactgacacccacattcatggggtctggatcactcccatgctggtatcccaggtatcagtctggggagcaagagttccctgatgttcaggtcagctgcttgtgtgggtttcaccagcctggtgtggactcctttgctcttcactcatccttttctgcatctggatttcggttcagttcagtgattagttgtggtgtctgcttctacttctaccagctgctggatgagggctatcgggtggcatatgtcagtgatcaatctcattatcagtggagggcatttaaggtagcctctcctctgttgattagattgttagttggtgtcatctttgtagatctccagcaaacactttcttatgaatcagcctggtgaagccaaacataccttggagcacaaatcaaaatgattatggacacaaattcatgattgcaaccaatattcttttatgcaaaaaattactcataaacagacaatgtaggaagttaatatgctccagtgtgatatattattttctagctaaaagtatttcatgcttttaagagaatggtagtatttgagaattttctagaaatttacacatcaaaaatgatgatcaactagatatatccagctatgtcgtggttacggtaaaatgaacaaagaaataaataataaatatataaattttaaaaaggaatgaatttttaaatcactctcttgacctagagattttttaaatcccaaaatctgcctcctgggaaagtgaaaacagtagcgagaatcaatgagaggttggaggagccaaagtcaatgcagaaataatttgttgttttcaaagcccaagataccaattatcatcaaggtgagaacttttcccacttactgaaaattatttgaacctaggttctctattgggtgtcactgaaatgcatattagttggctcaaaaaacagaggcaattgaaggaagaaaaggcaccttaattataaagccttttactctgggatctgggaaaatcagaactaccaacttcccacttggctgcactgtaatagaagtctcatttttcttatttgtctccattttgatgagtttaaaataaatagtgttggggtatttttgtcacacctgttacaacttcattatgagagaaaataagtcatatgaaaatacattaaaatagagatagagttgaatatctcttagtaatacacaaatcaatatggactattttgcttagaagtacattttattgtgagcaatcaaaggagttcctaaaaaatcacttttctttgggcataggattctacagttttaagaacttctaaggtgagcagggattgcagttgctggacttgggacccaactgcagggatcaaggcaagatctctttgatttattgttctgtgctctcagtcacgtagttctttgtccagcctaggatctcataggtacctccatgattcagctacactgtcatggcaacagtctaggcctctctgtctctacctcagcagcaatggcattataggaatgtgctgctgctctccacccagatgtttacatggatgtcatagcatgatgcttctgcaggaagcactttattaatagccaccttgttagtgctttttcttgttttctaagataacactatgaaaacataattataaaatattattttttcaccttttgtttttgttgttgttgtttactttggtgtttggcattagagctgcattaagccaaggttatcctcaaaatctctacacactcaagaataatcttgaacttttgatcttcctgtctctcctctccctcctgaatcctgtgaagacaggtaagtgccaccaactggctgtcttctgagattaaaccttggatttactgcatggtagatgagcactctatcaaagaacctacacccacattcctaggtatcaggatgttttttagacagggtctcattatgtatttctgatatgcctgtacttctatatagatcagccaggcctattaactctttgttaatatcttgagagtttgttgtctgttataaaccagctatattctcttgaagaaatctagtcatttgatgtgggaaattaccaatatggtgccaggtaaaaatacaaggggatttaatagggaaaagccttacatacagagccacctcaccagccagcatggcagcagtctgtacaacaagctgaaaatgaaagcaaaagcatccgaccacataagtgtccctcactgtacatcaccctgaccaagtcctcgaaggcatggtcaggcacacctgtagccaggccctaagcaggtgtggctacagcatcccctacaatcattagtctagatcatgttgtgacctaatttccgtgttccgtctatagaaatgcatgttccatgattttataatgtattgaaatacttctaactcactaactcactatcatgagtgactgtccagcaagccaagcatctaccattatagagagttcatctgtgccctctctttgcaaaagattacccaagttgagcatgctgagagtgtgcactcttagagctgaaaaatgccagccatcacctgagtacccagatattctgtacgacctgccctatgcacaaggcctggagtatacagagaactagagagtagagcctgggctcctatgtggctcccagatgcttgatgaggcttttgggagcagtctttggaaggaggagttcccacacaactataaatagcccctcgcttaggttctgaaaagaagcataataaataattagttgccagggttaaagttagtgaaaatgtgcctcagtttgtccttgggacctctgaaagagagatagacattgctttatgtctttcctatggaagtattttaacagcatttgacaatatgcttgaatttgtgattattctaaggcatttccactttgtatgtgtcctacataaaagcatatttgctatagaatgctgttgtattttttaagtttaatgtcatctattctgtctgcccattatatatttaacttaggaaaattcttcttctggaaaaatgcaatttttcatgttattgttctttttggagcattaattaacccttaggtatccatttataatagagtataattcattacatcgtcaacatagatgttacatacttgtatctcaatctattgctttcataaatctcctttattaactttcagctttactgacttttgtctctgatagtaatcatgttatataatttagagcagtgtaatttagttatgttaaattgtataaaattgttataatctaatattacacatttcacacactatattattagtagttcataaggatttatatcagcatcttttactgatttcagatttttcacatttgtaattttcaaaatcattgtcagaattttctaaattccatgagaatttttaattaatatatcattaagaaaacttgcaaatgtgaattgtttaagccatattttgaggtatgattattctgtagcattctaattagatgacattctctgttgtgtcccggtgaaagaccgccgaagggagaccctcactcaaatctcgggaatagcaagcacccagtgaggcaccgagaccggacttgctgcaatcacacgaggaagtttattgaaaaaggaatggaatgagatctcaggccagcatgctggggtagagactcatacaccacgcaggggtggaggagttcgaccctgacccaaacttgtgacaagcttataaaggcaaaaactataaaggagggggaggactagggacggaataggggaagcccaaagttacacatttactcataaaggcaaaaatcacaaaggagggggaggactagggaggaaataggggaagcccaaagttacacatttactcataaaggcaaaaatcacaaaggagggggaggactagggaggaaataggggaagcccaaagttacacatttactcataaaggcaaaaatcacaaaggagggggaggactagggaggaaataggggaagcccaaagttacacatttactcatcagttaaactatgtggacacacctggggcatttgaacttttcacagaggtcgttgggacatcctgtggttactccaggaactgtttttttctcatgagagttccgggagcggccacctgcaggggatgggaaccccaaggtgatgagcccatattcttatagacagctagtactttttttactcttcattccccacttcttcttgtaaatagctctaatcttagagcgatccctcagtttcttgtagtatctggtacttctgtcttaagaccattacctggacagcatttattctttcttttataaatgccaccagcctattgagaatacatggcccaaaggttaggatcagtatcaaaatgattaaaggcccggccaaggtggagaccagagtagagaaccaaggtgaccgattaaaccaattttcataccatccttggtatgcttctctttctttttttctgttttctagcctttctctaagctttgccatgaagtccctgatgacacccaaatgatctacatagaagcaacattcttactttaaggcagcacagagccctccctctttaagaaaacacaggtctaatctccttctgttttgcagcactacctctgacagtgaagttaatgactgttctagtttagttatggactgctccaatgctcccaggtctgcatccatagcagctctaagctcattatagtagtagggttgttggatgagggcggctgctccagttccaacccctgctgctactcctagtcctaacaagacagctaaggtcagggtaacaggttccctcttgtaacgagtacagtcatcaaattcatctataaatgaactatcatcatgataaatgaccctaggcaccgatgaccctaggcaccagctggaccaaaatacaaaagtccctagtactgttaaaaagggacatatgcaagcagggggtcaggccagtgccacaagcccaccaagtatgtgtgggggtgtactagatattgattttggccatctgtcagggtgtcaatagttacgttacagaggggctggtgtctggtaggcactttgcctatgcatagtccagtgtcataccgctgaaagggtcagcttccgttggctcccccaggggcaatgtgaatggtcataagtaacattataactccacacttgagctattccttcataataagggggattagaagcaaagcacacccagcaagattgggtagcagtgcggtttaaaacaacaaacgcactatcgagcagattgaacaggcgatcctcagttctcataggggggagggaggatgtgattggattagggctggaagaggcctttggtgatggggtgagactaggaagtctctcaggcctgggtaggagattattaagcgccggattggggcctacgggtcgttcgggcagactctctatcttcatcctgatagcgaaaaggaacccagggtctcccgttccagtatagactctccaaccccagctgttgccttttactcattggcgatcttgttttccccatgctgtgaagctaatataaagagggttgcaatagctgcctttgcatggcccctgtgggccacccgaggccacaggagcacatccagtcttataagctaggtatttagatgtgtctctctctctcctttttctggctcttcaggattaggacccttattttactataatcagatcccaggaggaggaaggattccagtaggcttctcctgtggtctcacatccccatnnnnnnnnnnnnnnnnnnnnnnnnnnnnnnnnnnnnnnnnnnnnnnnnnnnnnnnnnnnnnnnnnnnnnnnnnnnnnnnnnnnnnnnnnnngtagaagtctgctgcctggaggttggctcggaaaaattgtccagaacatcccaatgtgctccctataccatgagggacacattgttcctccgtgggtgctttatctaaattgtcataattagaaagatcccaggccagggaaccggcagctaacttacagatatcaggtgcaagatcagatacaaatctgccctattctacatggatcaccaaattatccactagtggtgcacattacaactttgagtttccactacataggaacatgagggttattccccaaggttggggctacggcgaaggcgcaacttaagaggattatcactggtggccactgtccaattattttcacggttgttttcattttgactgggtgccttttttatgtgggaagcgtggatccaggcagcaatcccttttacctttactgccatgggcatagtcaacagcacgagatagggtcctttccaccgaggctcaagcttgccagcacgatgtcgtctgaccaagactgagtctccgacctggaatccgtggggcactgtggtagtccctggagtgtaggcttctttgatctgattccaaatctgtgttttgacaacttctaaggcctttaagtgggtaaacagagcagaggaggagggagagttagtgcaaggatccaatatcctgcctgactcagtcaagggggacggtcccccatgtagcattttgtaagggtaaggccgaaacatccacgtgtttttcggaccctaaggagcgcaaaggggaggagggtcacccagtctttgccactggtctcaatagccaatttagtaagcgtctcttttagggttctacacattctttctacctgtcctgagctctggggtctgtaagcacaatgtaatttccaattagtccccagttgggtggccaactcctgtcttacctgggcaacaaaagctggcccgttgtctgaaccaattaccatggggatcctgaaccggtgcaggatttcttccagtatcttcttggttaccatttgagcagtttcagacttggtgggaaaggcttccacccatcctgaaaaagtgtctataaaaactagaaggtacttattaccatattttcctggcttaatttcagtgaagtctacctcccaataaattcctggccgatctcccctcattctttttccacgttctttgaacgatggggcagcattggtcaaggtgcaggcttgacatgactctactacctcttttattattgtgtttaatcttagaatacaatatttagaacctttgattaattgcttaagtttttcaattccaagatgagtcagctggtgtattcgtctcacatagttttgtccttctttagagggcagaatgattcgtccatctttggtttttgccaatcaaccgaaactgaacatccgagcttttcctgcacaggtcatatcttcgattaaaccataatctttatagggatagatgaagctgggatccatggcttgcgggggttctggcggggttccagtttcctccgccagcactaccgctccctgggcagcttgctttgctgttagatcagccatctggttcccctttgtgactcggtcagtccccttctggtgtcccaggcagtggacgatggctaatttttgtggaagatgtatggcttctaggagggccaggatttcttctgcttgagaagagcctagagtaaggacttttgaaggtgagtaggcccctctgtctgtagatggccccatgaatgtgagccatggcgaaagcataatggctgtcggtgtaaatgttgatagccttaacttctgccagacacagagcttgaatcaatgccaggagctcagctttttgagccgaggttccttatgggagactgctagcccaaattacctgctttccatccaccactgttgctcccacccttcttttaccttctaccacaaaactgctgcggtccgtgtaccagttaggcacacccggccaaggttggtcggtcaggtctttcctggtcccggtttcttcagccaggacatcaatgcatcggtgcactggggtagagtcctctgcttcagggagcagggtggccggcttgagaagagcaggaggagtgaaggttatccgatcatataacaacaagctctggtaatgtgtcatccgggtatttgtcatccagcagtcggggggctgctgcacaatattttctacccgctggtgacagggtctagctttttagataggtaggccaccagccacttccagggccccagggtctgagtcagaactccacgggccactccagccnnnnnnnnnnnnnnnnnnnnnnnnnnnnnnnnnnnnnnnnnnnnnnnnnnnnnnnnnnnnnnnnnnnnnngcaggagctgtgagcagggcagtctttatattatcaaaggctctttggtgctcctccgtccaggtgaatgggactttttctttagtgagtgggtacagaggggctgccagcatggcaaaccctggtatccagggtctacaaaaacccgcagttcccaaaaactcacgtacttatcgtggagtgataggggtcaggatctgcatcacagtctttttccgtgcttcagtgagccattgcttcccttctcggagggtgtatcctaggtaggtcacctcctagtggcataactgggctttcttggcggacacccggtaccccaactcacccaattcctttaggagatttctggtcccatcgagcacagttcctggttcgaggctgtgagcagtaaatcatctacgtactgcaagagagaaatctgnnnnnnnnnnnnnnnnnnnnnnnnnnnnnnnnnnnnnnnnnnnnnnnnnnnnnnnnnnnnnnnnnnnnnnnnnnnnnnnnnnnnnnnnnnnnnnnnnnnnnnnnnnnnnnnnnnnnnnnnnnnnnnnnnnnnnnnnnnnnnnnnnnnnnnnnnnnnnnnnnnnnnnnnnnnnnnnnnnnnnnnnnnnnnnnnnnnnnnnnnnnnnnnnnnnnnnnnnnnnnnnnnnnnnnnnnnnnnnnnnnnnnnnnnnnnnnnnnnnnnnnnnnnnnnnnnnnnnnnnnnnnnnnnnnnnnnnnnnnnnnnnnnnnnnnnnnnnnnnnnnnnnattaattgagcaggcttacgtaccggcaggaggtgggtattccaaggggactggcagggaatcagtataccttgttgtaccagtctctggatatgtggtcaaatgccttctttagcccctggagtcatggggtactgtctgactgagacaggggtggcagccgcttttagctccactaccacgggtggcacttgtttagcaagactcattccagtctgctctgcccaaaactctgaaaaagctgtcagccactctttagggggcaaaatcccagtcttgggttcatggaggtgatattcttcctctagacttagaactaagcatgttataggggcttctcccatggtgacttctggtccctttggggtgaactgcacctgagactttaatttggtcaacaagtccctccccagaaggggtacagggcactcaggaatcacaaggaaagagagagttacttggctttttccaatttctaaacttctttcggttgtccaagggtaaagtttgcttccagttgctcctatgaccagagttttttttaatcctaattatcctaagggtttagtcaaaactgagtgttccgcccctgtatctactaagaaattaacggggttcccctccacagagagagttaccagggttcccctccacagagagtgttaccctaggatcggggagggggaccgagccccgacacccctaatcttccttgagggccaacatcttggggccctattgtttctttcggggggcaatctctggcccagtgtcctttttctttacagtatgcacattggtctttttcaagttgtagtctctgtcctcccgggggtcttcttgccctgttgcccaggtatcctgactgtcctctctctgacctttctctacctactactgcggccaaaatcttagtcaaattcctctcctggcggcgatcctgccgattctccctctattctgcctccttattttttctttcttgtttttcttcctcggtctgtctcttgtgatacactttatctgcctcttttactaaatcctgcaatatataatcctggagcccctctaatctctgcaaatttttcttgatatcagaggccgactgtcgtataaaagccatggctacatctgcctgctgtccctctgaggagggatcaaatggggtatatctcctatatgcctccatcagtcgttctaagaagacagagggtggctccactggaccctataagatttctcttacctttgccaaattggtgggtcgccatgtggcccccttgagacctgccactagagcccggcgggagaccgtgagacgccccctaccttccgcagagttgtaatcccagtcagggcggaccaaggggaaagcagcatctataagattagggagattggtgggggtcccatctggtcctggaacattctttctggcctctaggaggatcctctctctttcttcagtcgtaaagacgacctgcaagagttgttgacagtcgtcccaagtgggctgatgagaatacatcagggactcgagcagtcccatcaagcctgaggagttctctgaaaaagaggggtagttagttttccagttgtacatatcggctgactaaaacggccaatactgcagtgggactaattcccctggagctggggcgggtccataagccagtaatggtaaggcaactgtggagtcaggtcctgcgccagatccctctgggctgcggccccggcggcttcaagtcccggccgctggccctattttggaggccgggagtccgttggggcctgtgggggggctacatgaggaacgggttgaggatatgggggaggagggtggtcaaggaaggagacatcatcaatttcaggatagatccgcggggaactgatggagtgggcgccggcggatctgaaggaggcactttcggattcgtagccacggcgaccgtcgctgtccctattcctgatgtccaaggtttcatccaggggggtgggttttggactaggtcctgccacatgataatgtatggaacctgatcagggtgtccccctgtggcctgaaaaataatttgcttgacagcggaaataatagatagattaaaagttcccccgaaggccatctcacactgaaacttggccatttggaggaacaaaaagtccgccaaggtccttttctgacctctacacaaagattataagccctagtctcaatgtccgtccaatggtccagagtcagtgttagtggggtcgttacggtctgtcccatgtctacctctattacacacacaataaaaacaatcacaannnnnnnnnnnnnnnnnnnnnnnnnnnnnnnnnnnnnnnnnnnnnnnnnnnnnnnnnnnnnnnnnnnnnnnnnnnnnnnnnnnnnnnnnnnnnnnnnnnnnnnnnnnnnnnnnnnnnnnnnnnnnnnnnnnnnnnnnnnnnnnnnnnnnnnnnnnnnnnnnnnnnnnnnnnnnnnnnnnnnnnnnnnnnnnnnnnnnnnnnnnnnnnnnnnnnnnnnnnnnnnnnnnnnnnnnnnnnnnnnnnnnnnnnnnnnnnnnnnnnnnnnnnnnnnnnnnnnnnnnnnnnnnnnnnnnnnnnnnnnnnnnnnnnnnnnnnnnnnnnnnnnnnggccacctgcaggggacggtagccccaaggtgacgagcccatgttcttatagacagctagtaatttttttactcttcacacgcccatatcagctccaagccaaggaagccatgaggttcagcctgagtgggtaatcgtggacttggaaactcctagcaacccaatggcgataaagaccaaacacaggcatcttgccatctttagagagctctcagttccgtgttgcaaaactggagtctctagtttattgtgcatcttcctggctgtatactaaccatgctttcaaggccatgaggctatttctgtgtcctaacaatctgtcctcacttgttactcacacacctagtcctccacccaggtgcaagcctattcaaatacataggcacatagagatgcaaaccaggaggcattctacactgaggccatggtattcaatagcagaagtgctcacattagcaatacaattgtaggctggagctactgggtgttcttgtttactgaaaccagaagctggaccttaagtcattccataatcaaagttttttggtccccaacaattatcatagtctaagcttattacaattattccacttactatgatttttgtgcctttaaatatttccttcaattttatgtgtatgtctacaagtatgttgcctttctgaggatgcctggagagcacatcagaagccctggaatagcaaccatgggcagttgagacatcttgaagtggaagctgggagcaaatccctgtcctctgccagagcagtgggtgctcttacccactcagccatcttttcagctcccttaatgaaatgtaaaaccagcacattttgctattatcagcctgaagaggtgacaaactaagaaatggttgagaagagaatggtgagattgtacacataatttcatttgggaagtgatgatcaaatgtgatctagtcattaccagttgttaggcttttctttaaaaaggtaaatttactttgtagaaccagacctatctgttcccctggcctccattcttctgtcctccttttctcctcctgccctccttagcaaaaagaaaaaagaaaaaaaatacattagctgattctggttgaagctacttcttttgttgaattacaaacagttgatattctccagatatttaaatagtactacctcaaaagttgcagttttctgttgtcatctactccaggagctgccgcacaatctgaagatgagttcttggaggtttcctgtctcataacttcgaatctgggcttgtctatttttgtttcttttttgtttttatttgtttggtttggttttttaattctatcacatacatattaaccccacagatcttttccctatctcttccaatttagtgtatgggattcttgagtgtttgccagagagtatctgcatgtatacctgtttctctattacttatctttgctcttttccttctctttgttttgtcccaagctaatatgatattatttcttttatcttcttatgttttattttatttttactattactctatgaaaatatctttggaggcttttttttgtttgttttttcgtttagttgaaaatagactctcttcaattttctataaatagacataatttatcccctaattctactcttctaagtttctctctacatcccctcccatccagatccaccctcttaatgtctctcagagaacaaacaggcttctgtgagttcatatgtgcattgatcatgttgatatagagggtcttgtttgcatggtgtcctccatcccctctggttcttgtattctttcctcctcttcagtggggtttcctcagctctaagtagaagaaattgatggagacatcctgtttagaaatgagtgttccaaggccccaaactcactgcattatgtctggctaaatatctcttttatttttattatttattaatggaggaaacatctctgatgatggacatggccttgatctatgaatacagcacaatgcctttaagagtcttttttccccagtaatatatgttttaccctaagtccctgtgctatctagtctcaggttttgttcacctaagcagtgttgggtatagtggttttttgttttttttttttttgggggggggtggagttctgatggggtttctctgtttgagcctgtcctggaactagctgttgtagtccaggctggtctcaaattcacagagatttgcctgtctctgccccccgagtgctgagactaaaggcgtgtgtcactactgcctggtgctggatacaggttttctcttgtggagtagccatttggtgaaaacagatattcattggttactcccacaagatatgtgccaacattgtcctagcatatcttgtaggcaggatactattttaggttgaagggtttgtgggttggagtttaatttattatttggcatcatgcagagtacctttctataccaaaaacactagcacctaggggtaaagtctttgcctaggcttatgttagatttctccattttcaatgagttttgtgggtattatcttcagtaatggggacttgctgtcagtttttggagagcaacctatagtcttggtaaccaactaggttgtttggggtttcacatgggtcctctttggtggacaaaacattagatgtaacccaatcccaagactggaagcttcatttggtgacaaggaatggccagttggggctatgtctccccaattatttggcaatttcatttacatcacctttatacatgtacatattttaagagacttctattgtattaggtttccctattgcccctcaaatagcctttgattttagctgtctctcccactatttcctttgcctgttctctccattatacctgaccctcctgttccagcatcctccaccatcagtaaccatatattctatttccctattctagggtaatttgtgtactcataatcccttatgctatacctaacttctgtggttctagaaattgagcttgattaccattgattacacagatgatgagagagtcgatctggggggtatgggagaagggggcagagaaactgggacaagtggatgtagagaagactattatcaggagtgagtaaagaatctattttcaataaatgaaggaaaattaatgctagtttgagtgatcttagttatatggacaatacaaatctatgtgcagaaatttgtttctaatgtttgaagagtagaaaatcacataaaattttgaggtattcccaattttcacttttatcagttttatcaattttcacttttatcagtttgtttttagtagaatctatatttttcccagttagcaactttactaattgctactggtaaaatagacatttaatcactgtataagggccatctttatttttgatgccttttgaagcagaatgatgtcttggaatttattagtggcaactactttaattaattcatctagattttgcctgctatactttcattttctatattatttttgcacttttatttaaacatgcaattttcttagtaatatataagagaatattttatatttaatccaggctgaaaatgacatagaactatagaattaaattttcttaccttttacctctacttacatactgaagtattttgctattgcttaagttgttcattttgcctgtcttaaccattgtattttcttcagttcctttctcagatgcagagaaggaccagtgaagagcacagaggtccagaccaggctggtaaaacacacgcaaacagctgacctgaacatccgggaactgttgttccccagtatgatagctggaataccagcatgggactgatccagacccaaggaacatgggtttctgtgaggaaacctcagaaacctatgggacctcctgtagaagcccagtatttttccctagcataggagtggactttgggagcacattccatatagaggaatactcccttagccaagacacaagggggtgggcctagtccctatcccaaaggatagaaagactctgatgacaccctatggaaggcctcaccattcagtgggagcagaaaacatatgtgactgataaggttttagttgggggtggtagggaaggatgggtgggagaggggaactgggattgtcatgtaaaacaaccctgtttctaattcaaataaatatagttgggaaaaaataaagctgaatagccaataactaggaagagaaggatatgcagggctggcaggcagagagaataaataagtggagaaatctagtcttgagaaaaataagagaagacaaagagaggagataacaaggggaaagagagaccttacctggggctagactggcagccatcagctagcagactcagaggaggatggacacacagaaagaaaggtaaaattccctgaggcaaaaggtagataaagaaacaagttgacataagttaaatgagctagccagaaatgtgcctaaggtaggccaagcaaggccatgctttcacaactagtaagtctttttgttatgatttgggagctggttgatgacccaaaagtaaaagcctgctacaatacatgtttggagaattcaattatcatttaaacagttcttaaacactattgttatggtaatctagctgcaaaattgtcatagtaaattttgacaaatcatgaccaaatactttaatattcttcttctcatgtgaagaaaaagcctatctttgcttgagagaaaaagttagagcttgagaagaacctgaacaaaatatggatagcagtttctcagggatggggatgagtttattcctcttactattgaaattatttcaggtgtttccaaaactgctataatttatacaacaatgcagataatgatggagttttgtttttcagacaatgaaacaatggttttaggctccagacttcagctctaattctttaaagaaaacattacttctaagcatattttattgttgtcttatagtccatagctttttcctttttttctgtatgtttaaacagtcaaggtgtctgctcactccttgtaaatcaggtgaagacagctgggaacaagttcatctggttctgctcccttcaatccaagtatccacactgcctgaaccatgattgaggagacctctaggagaatccttactttcttttgcacagagacaatggaatgtaggaattcttctcctaaatcacatacacacacacacacacacacacacacacacacacacacacacactagcaataaaggggcaatttctgacttttgaagatcctctcacttactgcctgccagctagcagtctcctatattgtgtttgttgtctatattcagtgtagttttaattattatattttgggtagatttgaaatgagacattgtgttccttttgttcttgtgatgaaaattattttagcacttttaattctttgatggatttatacaaatttttaagacactttattttatttggtaaaaacatcggtggaatttggtagggatggcatggaatgtgaagtttgttagtatggcttttagcaacactcattcttttgctccatgagcatggagtatctttccattcctttctgtcatcccgatgagagagtcgatctggggggtatgggagaagggggcagagaaactgggacaagtggatgtagagaagactattatcaggagtgagtaaagaatctattttcaataaatgaaggtttttttttgaagacaattcaatgtgagaatatagaaatgttactgaattttgtaaattgattttacttgatttacactattaaattaattataataatttgttgtgattttaataacattattagaaagttgagacaattagttatttactattatcttaggtgtcttctgtctattttgcgaatatttatatggctaggaccaccaataccaatattacatttagtaaaatgtgacaagagaagacaatgttgacaatatttgatcatatatacaaacttccgtggttcctatactgatcatgcactgatgaaatgcatgcatttcttctaaacctgacttttggtggtggtggttgtggggtttatggaagagatgtgatgggtttattcctgtgcatacatatgcatgtggaggacaaaggtcaatgctgaacatcattctctccacctttgatttttgagataaagtctcttacttaacttaaagctaagaggatatggggttcttgtggactcttgtcttcacctttagatactgggattacacaaacacacatactttggggattctgcatgggtactagggatataatcctggattctgatgcttgcaaagcaaacactttactcaaaattagtttcatggcttctaaatccaatttttaaagtgatttttttcattttgaaaggagatagtatttatcaaacacttttacatttttattgtaatgatcatatgactatatttttaatcatgtatatatcctgtgttatatttatagattagcatattttattttcaatgtttatgaatttgcatattaagaactgttataagtccttgaaacaaatctgaatcagtagtcaaagatccttataataatgcaactgaaaattgttttctgaagtttcactggacatttataaatttacattcaataccattttggaatgtaatatttttgtttggttgggattcggaacaatttgatccccacataagagttttggacataccatttttaatttttggtatattttgagaaaaatcagtattatttatttcttcagtggccattgagctacgcctcttactggtgagacaggtcagattgtcatcctgttctgaagagggctcccattactccctgacagagcattcatgagtgctcccatcactcccagactcagcattcatgagtgctcccatcactccctgactcaacattcatgagtgctcccatcactctcagactcagcattcatggaaaaaaaaatggaatcttgaaattggcaggaaaatggaactagaagaaaccattgtgtatgaggtaacccaatcacaaacagacaagcatggtatgtcctcactcgtatgtagattttagacatagtgtaaaggataaccagcctacaatccacaattccagagaagctagtaaacaaggaggaccgtaagagatacatacatggtcccctggagaagggtcaagatctccagagcacattgggagcatgggaggaggggggaaggatctaggagactgagaaggggagaagaggagggatgcggaggacatgagggaacagaaaggttgagtcagaggaagaatagaagaaaataaaatggagataccatactagagagagacattttaggtttacagtgaaatcaggcagtagggaaatgtctgtagatctacaatgatgattccagctaacaatctaagcaagagaggagaggctacgttaaatgccctcccctgataatgagattaatgactgatttatatgccacctgatagccctcatccagcagcaggtggaagtagaagtagacacccacaactaatcactgaactgaactgaaattcagatgcagagaaggacaagtgaagagcaaaggggaccagaccatcctggtgaaacccacggaaatagctgacctgaacattgggaaactcttgctccccagactgatagctgggataccagcatgggaatgatccagacactaggaacatgggtgcagaaacctcataaatctacttgacctactgtagtagttcagtccttatccctagcataggtgtggatttgggagctcattccacatagaggaatactccctgacccaagatacaagggggtatgggcctaggccttatcccaaaggatgccatcgactgtgatgtcacccttggaaggcctcatcatccagggggagaagaagggatatgtgatagtttgggttttaattggggtggggggatggtaggggaggatgggagggagagggaaatggaattttcatgtaaaaacaactttgtttctaaatgaaataaaagaatctgaaaagaaaacaaaaaaacaaaaaacaaaaaacaagacctggtaagggcttgagacacctgtatcatttaatctagttttagcttggttgttgcttgcttagtggtttgaaatgaaatatgaacttttgagatcttggtgctctgcaatagtcatttattatatggtttttctcataggatttctattgatatgaccattaatttgatagctcatttattaatctttttcttaagaagttttaattagttatattttcttgatttgctgcttaattttttgttgttttctgttttcagttaaagaagatggcatttctatgcctttgtgaattttctaaatttatttctgttcttgatttctagttgcatgctagtattgttacaaatgatacaatacctgatgtcattctcttttatttgttaatatttgattcctagccttaaatacatgtacagcattccacatatggctaggaaaaatgttgaccacgcttttactggatgagaggtttgcagttgtcattccatccaccaaatttaagacttgaagttcaagtttttagtaacttcctatttagacaattgccattacttagagtgatgtaatcaagtcagagttttcctttctgtttacatctggtaaaatttgtcacatagatgtaagtttctcagtattaggtccacctgtatttatatcctttcaataagaattgttatttaagcactttatgggctcagtgtaaaatatcttacatgcagtttttataaaacagataaaaacaacctagataatttcgtctccattttcaaaactcaattttcatttttaattattttgatccatatatgttcttgaagatgaaatgaggttattccagatagtaaatatttgagtcacttcttgtccatttaaatgcttgtgctttatgattggaaaggataaacctttcaggtttaggtagtcactgttaggcaaagattttctaccactgtttcagtttttctggttttattatagattttgttatctttttatcctctctcaaatcatcatccaatgtacttagctaattttctgcattgatacctttcaattttaaactacttgttcttaatccataaggatttcatgttttttaaatatatttaccctctttatctttttacatacttatgcagatctgtgcaagacttgggctttaaggactttaaagaatgggacagactacagtctaatgctgtagacaattttacttcagtttcactgtacttttatatatgaatgtaacaaagaacacaatgattcaagaaaggttgtttgagttcaggaaattttgatcacaaaattatgtaaataaacaccaggaaagcacatactcaatattagcagagcagccctttcccagaactttctcaggacagaccatttgaacacagttgcctggcatgtactgcaggttatatgtgtgaaagcatgtaagaatgaaagaaggccatccccatattcagagtacactgaagatagcagtctatagctatgatatgacatccataaagaataaacacgtcttacaaatggaatgcaaatgtttaacacagaagccatgaaatcacacccaagaacaaccgagggcacaaaatgcacgggaggtaggaggtcctctgcttcttttcctggaacctctctcacaattccccaatgcattgtattccatgagtcattcttttgagcatctctaacacttatctcaagataagctgggcaatagaaacattatagtttttaaacataagctacatatttattatgcttctgttttatgtctgctattaaacttacatagaacaacaattctaataagctgttttaaactgatcaaagaaaacattctaatgacattgaaaagccctacatttttactactaaaactgcagtttatattttatattttgtaccaaaacttgaatattttatattttgtctatcttaacatttataattattttatttttaatgaacttatttatttttcattgcaactgcagtttcccctcccttctctcatcacagtccctccctcccatctcatctctgttcccacctcacaatccactgtccctccacctctatcctggaaagggcatgtttcctgtgaatatcaacaaaacatggcacaccaagttgcagcaagactaagcacctctccatgaagtaaggctggacacagtgacccagaacacggagtagggtcccaaaggcctaaataaccttttctttcaagagttattgcaaagataaaattaattttcagaacatcatgatctgttagtataatctcaattcagatgtggcttttatgagtgagttccttgctcgtaacactgtatgccttttacccctcatacttctgcctacatctttgcgtgaggagcaatcctctaggatctgagcatggaaataggtaaggggataatggctctgcctttcagtgttttgctactgacactggtgcccagtgcacaagcatccttgctactgaattggcaagtatatgccaggtctaagtgcttgtgaagcaacaggaagtcaggaagcaaggctctggagagcccagctcaggtctctgcagaagtttagtggcttcacaagtccagtcacatgcagagatatcttggttaatagttgctaaatgtgctaaagcatgttttaatggttgctattgaggtgtgatagcaaacagcacatgtttgggatcaaaattttgctgtgcatgccaaccctagaaaagcatcatggcagcatagctggggagttgagcttaaattctatagagacatggacctttggacatgcaagttggcttgctaccatgatgattcttgtcggaagtatggattgatgaggttcagccctggactagactctagcaggatactttcaaaaaggcgtgcataataacttagagaagtgatggctacagtatgaaagcttcccacactgaaccttgaggggttggagtcgttaccaaagtgccactttggcattccttggcaaatatagaaatgaatttcactatctcagtttcacacattctgttctcttcagaatagtccaggaaacctgagtggtgggggtaccacatgataaaagtcatcaacttctgcatcttctctgtctaattgttatgtggagtgtacattgtctctatctgttggatacagataatgtcctactcctcatcttctttactctgttggataaatgttgatatccacaatctactatcttatcgtgtctccttacttcatcaaatgatgctatctctttatcaagatgtgtcactctgtccatgacttagagcatggatttcaaatgtattagcagctcctgatgcaccttgttctggagtctgtttggtctaggaacaccaggataacataaacagacaaatcacattctgtttattgcaaaaatgatttcaagcagttgctttgaatttgtagtctgaagaagggcttgaagtactgtctcatagaatggcacagtataaattcataatgccatgattacaggtagtaaggacaaagactaattatacctcacttttgttgtgtcattgtagttgttgttggtagcaaaatacgaattgaaagaaaattgtattttcattattatcagtttcttaaatatttatctatcttcatgacttttttcccaatgacaataaaagttagtaaaaattttatgttgcattgagtatattcattaagctcaaaataaggcataaaaagccagcaagatggtccagcatggaaatgtatttggtgacactcctgacaacctcagtttgttcccatggactcatgtgcaaggtgtcctttgaacttaattgcatgttatggaatgtatagacccacagtcatgaaccacacacaaaaaaataaataacttattttctataaattgtgtacatttaatgagttttgacaaaaatacagaaccacctgaagggctctaatcaacagatctccacttccatccacatgaaggatgaaaacagatgtggtaaaaattaagtacaaaaatattccagatggccagcataattttcacaattcacaatttccaatttatataaacagagtaacactgagacagaactgaaggagcagacattaatttaattgattgatagccacatgcaacatatgttctactcattttgtagatttccaaaggcagaggaggaataggcaatgccacaagaaaacaccatcaacttcagcctcccctgctctgtaaacacttgacactcctgttttttatgagtgtgatttgctgcagggttcnnnnnnnnnngtaatgtgtttatattatatgtgactatatgcttttgtcctagttttcactgtcaacttaacacacccttgaatcaccaagaaaaagaagtgtcaaggaagtaattatccatatcaggttgcctgggtatagctaagcaagaatgtcttagttgatgtatgaagtcacagtccactgcagggggtaccatattgaaggcaggtggtcctgggcaatatgaggaagttttcagagtgaccctgatggagggctagagacagcacacagtgttctgtcatggcccctggctccattttcccaccctatggttcttccctgaccctgattactagtagctggtgacctggaagtataatagaaaaaaatccctttgttcccccaagttgctacaggtaacaggatttcatcataagaacaaaaaagtggcagggacttcatatctatggtttccctggatgagaaaaaaaatgagattttcccccacatctttccccatattcctgccagcatatttctgctatttgctctcaaaaatttagattatttaggtttctgctatttttatggaaagtagtttttttttccatgcatggtcttgctgcagtttctcctcctctaaatccttccatattctcttcacatccctacccacttaaatccacagccctcataaaacaaagaagcattttgaaaagataaaagaatagggaagaaaaccaaagaaacgtgagtaagtcaaaacaagtgaatgagctgaaaagaaaagagtcaaagaaaaagcaaaaggagcacacatacacacaattcccacacacacataaatcccatagtggcagctaatttggaagccataaggtttaagcaaaagaactgtaagggggaaaatgctccaacaaatgagaccaaaagaaaaaaagaataataagaaagggagaaactaaagaaaccctcccaaatatattgtgttttgtgataatcatctacttctgggcatgaaacctgccctaatgtatggtttgtatgcccattgagacttcatcaaataaaactaattctcctttggaagtggtcaaccttggaaacagtttctggattagggatgggggcttgtattcactttatgtctcagataaccagataatctgataaccagaagtcaatgacatcactcactcaagataattttgcacatggtccaagaccccatgatgaccacagtgcagtatacaagcagagaaaagtaaaatatgttgaacaggtgagcattcttgggacaatgagcttgggaccttaggaatttagattgtgaaccttgtatgatgaccctcagcaaaataaaatataattttcatgtgctaatgacctgtatctatattcttgctaccaacagttgacttagtcagcaggatctttaaagaaggtgaaactaaggtgtcatcttcttgctcttccaataccatccctagacttagagaggaaggtgattttctgactgtatcacatccatccaagaaggcaagggcttctgccttaagactcagtagtggagagggggttacaggagggaaggaaccagaaccccgaggaagaacctctggatgaggaactaactcccatgaagtaacaggcttaagattaggcagcaggagaagctctcttatctttacataggggactggaaagtcaagaaaatagttagaaggccagatcttaaatttgaaaagctgggatttcagacctactctaccagcaaaataaattggtacttcagaaacagggaattaaaattcctctattattagcaaacaaattgttaagatgtagagaatattaagaattaagaaaatgaatggaaaggacaagcattgtcccaagggtaggtgggacagaacacatcacttagtaaaacaaaatttacctagtcttaagaaggaacctaagccttttggaggagttgatgggatgcgggttgcaggagatcaggggtgggtaagagaggagggaggggaactgtggttagtatgtaaaattaatacaagttttaaataaaaattaatgaacctaaagtcaatattccattgtccaccccagtgattattgagtccttgctagagagaacagatcccctcagaggttactgtgttcttttgaaaagtaattaaagacattgcctctgataggatgaaagacaaacagttcactaacaacttgtcagaaagatggagaataacccattcagagaggacttggaggaagttcataagggcacagtgagattcctcagtgacaccaagatctgtctaccagtaactgactgtaaggttaaggctactcctagctgtttaaccagtcatactcatgaaataccatactcatacctctgagtaccataccatacataccagaccatccatgtacaaagaaagagctacagaaaataagacaagattattgcaaaaaggagggaaaggatgcatcccacatagctcatttatggaagaaacggaactaatacagtaatgttaacatcagaagaaatgaagaaaatcaaagggattctagaaaatccccacatatttgaaggcctggaactaatattagatacagctagagggaaaaccctccctttattgaattgaataatggaatcatggagactggctttcctcacacttgttctaactcaatttgaggcagaattacaatagaaaactatgaaaaaattaattgaaatggctagaaagttgggtacactttacttaatttacagtcgtagcccaacaccacaattgtatgcactgctgcccagcatgaggaaaattctaattaaaggtgaccctcggaatttgataatgttatttacagaaactctggccaattgccaaactgttggagaagctattaactttcataaacagactagaatactagagacagataagatagtatccttccagtctaatgtacagaatcaaaccaaaccaacaacagagaagaactcatccctccacccaaggcttcatctgataaccagaacccagtggcatcactctagataaccagacataggtctagaccacatgacacttactagacagagttaagcagagaccaagagcaatgcactgctctgcacttctggagagatgccaccttgatctgccctgtggctggagaatttcccccaggatcctgagcttcaaatcaaagacttctgttagagactggacctgatgtcacacacatgagtagccttggggagataggcttaggatggtagttaggaatttagaatgtgaaccttgtgtgataactccaaggctaataaaacatgattttgttatactaactatatgtatctatatgaatcttcctgctcatgacagttcccatctactgcacgaggaatcttcccagtgatagctaaatcagacactagtctatgctaatcaaagtcattttattgctgtgttcctttaagaaaacagtagtatttggttttcccctaggtccaaggcctatcttgtcttgagttcctatacttcccatggggtggaccttaaatacatcagatagtggtttgtttctcccacaaattttgtgccacagtttcacatctgtattatgcagtcaggtcatcattgtagatcttaggctgtagagctgggttggtgtttatctttggtgtgttgagagtaccctacagtaccaggaactctgagggtaaagtaagagcaataagggtgaatatggctcaagacaggcaattgttcaacttctttgcattcaattaatacaaggtccttggtaatgatagcaattctaatttgtgtatgatgttatcatagtttgtttttgtcaacatgcacaaaccaagatgtatctacaaagagggaatatgtgttatagagttgtctacatcagattgactggagatcatgcccataggtcatttcttctttgccaattaatttaagaaagttaagtccaatgaaggacacaccatcctgaccagtgggcctgaactgtgatataaagctatttgagcagaagtttatcaagcagaaaatattgttacactggtctctttccatttctgcttccagtttccagtcttatgttcctgacttaacttctctaaaaggtaggttcaaacctatgactcaaatagacccttttctactccatagtagaaaagtgttggtttgtgtattgtttaagtttggtcagtgaaactacatttaatatttaagcctattttatatgtttccaaatgtgtattagcggtttttatttcgttgcttgagaaatgcctgtttaatttatttgcctattcatttaaaggatgatgattttggatttgaattattttcagtttttttttttttgaatctcagtattaaccccatatgtagtttatgactagcaaaactttccacatattctacaggtcatctctttatactgctcttcccttctttctgagaagaaacattttaattctacttattctcattttccataatctcctgtgctactagctgcgttttataaagtctatgcttgtgcttatttttagttcctctacattttcaacaagaagttgtggatgtccaggtcttttatcaataacactattatatttttaatggctttttgtaaagggtgatctaagcatctaatttactcttccatgtgttgattccaatttttccaatcactatttgggaaaataatctcaccccaacatattttctgacacctttgacaaatcctaagtgactctctgttacaatttgggatctggtattgtgataagtccaacatggcagttactacttagaattcctttatctctaacatggtttgaaccttcatataaaatttgggactgccttttctacctatggtaagaatgttggtgttctgactttcattgtatgacatctgtagattatctccataatctaagtaatttcaaaaggttaatccttcaaatttataagcacaatgattaatcccatattctaattactttacaacttctccctggagttaactaaagttttcatagtagaaatctgtttccttcttaatattattcttaactgtctatatttgaaattttgggtatgggtttttccctctgattttttttattggcttcttatattggaaaatcacagatgtagtagggtaattttttctttgctatttttctgaaagtatttatcatctttggtggcttttggttgggaattttgtttattttaattatagggtcccaggactgattatgacttagctagtaaagtgcctatcacaggtgaactcagtgtccatcaccagctccacataaacagccattgtggcacacaccagtaggctcaggaatctgaaggtagagacaggagaatcagaagttcaaggtcatccttgttcacttagataatcccatgccagtcacatatttgaggctctgtcttaagaacaagccaagcgagggcaaaggaaatagctcagtttataaacgtacttgttgccaagtcttaacatgtttgtcaaatcctggcctcacaagctaggagagaaatgacttctacatgttattttctgacctctatacgtgtgccttggcccccaattcaataaataaaacaaataataattaaaaattcattcaatgaatagtttcttctggacttttaacaggaagttgtgttgaaaatttttttctgcttctgttaagatgacatattctgttaagatttctgttctttgtttatgtgctatacaaaactcactatatatttatcaactttgactccttgaagagaaaatctcttggttatggggttgaacttcctaatgtgttcttgaattctgttaacagttattttatttataatttttttttgcatttctcttcagcatggaattggtcaatgttttctttgtgatttgtcctgaggaaaaacatgttgatatcaggttttactgggtttcgtttcctctttgggtggacccaagtttatgttatccattttcatttctttttgggagagagtatatatgctctgttttctaatatggaaaaaaatgttttccatccttcaccatgttagagatcagtagaaagaacagtaaataattataggtctttattcttacatcatcctatgattacaccacagtcattgagtttcactggtcacattaggaaacatctgaacttcattatactcttgtagttcagatatctaaaattgtgtaatctttggttacatttattttgtgtgtttatgtttgcatgtgcatgcacctgtgtttttgacagttagaagacaacttagaggaaatgattatctctttgtaccttgtagggccagggtagtgaacaaaaggcatccagcttggtggcaggtagctttatccattgagctctcttcctgattcccatgattgtttttgtttgttattatttttcttttcacatgtgactggtcaaggcagttcataagttcctaagtcttgtactgttgctgaggccatttcaggtttaactagaatttgatatccttgatggagaatcttagggaaaatttcacaactctattttaggaaccaaaggtgacggtgtcctagctgacttagcttctcttaaagtgcctgtttttgtggaagcccctccagataaccacttatctcttagcttctgctaaacctgcttccttcaaactgtttgcttttgttaaagccccctgttgatgctgatgtctgcagaatgagattccaggtcatggtttttgcctgtgttctggacacttggacctctcctaggtccctgaacacttggatgtggttccagataatatttaatggattaaatattatctctctggagagcaactggtaacagaaattagctgttaattgtgtgcctcattgttttgttcaatcagaattaaaaatgaaagcctaacacactgagataaagaaagcaagtataaaaagaggaatagaatacattgattagctgagtggtctgtataagtagacaaaaacagggaaagattttatgaaatactctcgtctatcagtcctgataataagagtgacaaaccaaagtgttgtggctctttcaaacccctcagctgaagtgatttccgtcatgaatgttgcaccagcttttaaactcaggaacctcagtggggatgcaaatttacaatttgattaaaaacactcagggtccctgtttggcaaaatttgatttacctctggccaattcatatcctgccattccaagaactcactttgatattgaattggaaagttcaattttcattttgtaaaatggctttccaaggatggagtagagctccatgcagttagcttatcatggtcatgctgtgtgttaaagatgaatttttaaataaaaagcagctcataagtcaacaggaaagataattgttgatagtagcaagaactgaaatgaaggaattccacaaatataagcctttataattgcaaatcaaagttatagtttctagctttttagatttcttttattgtagacgttccttctgcctacaatgtacctttactgaaaagaaatcaaccacaatgcactatcagctttctttagttcacaaaggcacatgcaaacatgacttttacatgcaaaaacaagggaaagaagagaggactgggaaggtgggaagggcaatctataacaacagctttgggtttccttacatattaaatacaatatctcatcagtttttaaaaatagcaaccttctggaccacaaaagaaagtcccctcatcacataataattaaaacaacaaacatccttcatataaaatttgggactgccttttctacctatggtaagaatgttggtgttctgactttcattgtatgacatctgtagattatctccataatctaagtaatttcaaaaggttaatccttcaaatttataagcacaatgattaatcccatattctaattactttacaacttctccctggagttaactaaagttttcatagtagaaatctgtttccttcttaatattattcttaactgtctatatttgaaattttgggtatgggtttttccctctgattttttttattggcttcttatattggaaaatcacagatgtagttaattaactacactcgcataaacataggcatagatgatcccactctacaaaaacacaaaataaaaggcatcgtaaatccacatacaataccagtaccaacaacaaaccaaaaacaaacaagaataaacactcaatggaccttaatttccctcaatattaatggtcttaacttgcctataaaaagacacaggctaacagattggattagaagacagaatccatgcttctgctgcatacaagaagcacacctctaactcaaagacagacattatgtcagagtaaagggttgggataagatactccaataaatggacccaagaaacaagcttgagtagctatcctagtatctaacaagatagataggttgattgacttcaaactaaaatcaatcaaaagagatgaagaaggtcatttcatattcattacaggaaaaatccatcaggaagaagtctcaattctaaannnnnnnnnnnnnnnnnnnnnnnnnnnnnnnnnnnnnnnnnnnnnnnnnnnnnnnnnnnnnnnnnnnnnnnnnnnnnnnnnnnnnnnnnnnnnnnnnnnnnnnnnnnnnnnnnnnnnnnnnnnnnnnnnnnnnnnnnnnnnnnnnnnnnnnnnnnnnnnnnnnnnnnnnnnnnnnnnnnnnnnnnnnnnnnnnnnnnnnnnnnnnnnnnnnnnnnnnnnnnnnnnnnnnnnnnnnnntataccttcttttcagcatcacatggaaccttctcaaaacttgaccacattctccaccacatagcaaacctcaacaggtacaaaaatttggaataatcccctgtgtcttttcagaccaccatgctttaaatttagaaatcaaaaacaaatcaaagtgcaaaaaacctaccaactcatggaaattgaataacacgtaattgcaccattcctgggtcaaggaagaaacaaagaaagaaattaaagactttctagaattcaatgaaaatgttgacacaacatacccaaacttatgggacactttgaaagcagtactatgaggtaagttcatagctctaagtgctcacatgaagaaactagagaatagccacaccagagatttgacatcacagctgaaagctctagaaaaaatggaagcaaattcaccccagaggggcagacagttgccaggaaataatcaaacggagggcagaaatcaataaagtcgaaacaaagaaaacaattcaaagaatcaataaaacaaaggggctggagagatggctcagccgttgaaagctaggctcacaaccaaaaatataaaacaaagagttggttcttcgagagaatcaacaagatagaaaaactgctatccaaactaaccaaaaggcagagagagatcatgcaaattaacagaatcagaaatgaaaagggggacataacaatggacactgaggaaatccagagaatcttaaggtcatactttgaaaactgtactccacaaaatttgaaaatttaaaggaaatggacaattttctggacagttatcacttaccaaaattgaatcagaaagagataagcaaattaaacagacctataaccactaagaaaatacaagcagttatcaaaagtctcctaaccaaaaaaagcccagggccagatggattcactgcagaattctatcagaaattcaaagaagtgctaataccaatactccccaaattgttccacgaaatagaagcagacaggacattgccaaacaatgtccttaatagccaaggcacacaaagacacagctaagaaagagaactacagaccaatatccctcatgaacattggtgcaaaaattctcaataaaatcctggtaaattgaatacaagatcatatcaaagaaatcatccaccattatcaagtaggcttaatcccagggatgcaaggatccttcaacatatgaaaatccatcaatgtaatccaccatataaacagaatgagaaaaaaaaaacacatgatcatctcactagattcgaaaaaagcctttgacaaaatccaacaccccttcatgataaaggtcttggagaaatcagggataacaggaacatacctcaacataatataagcaatatacagcaagccaacagccaacatcaagttaaatggaaagaaactagatccaattcctctaaaatcggggacaaggcaaggctgtccactctctccatacctctttaatattgtccttgaagtcctagctagagcaataagacaacaaaaggagatcaagtgaatacaaatctgaaaggaagaagtcaaaatctcactatttgcagtcgatatgattgtctatattagtgacctgaaaaactctaccagggaactcctacagctgataaacaccttcagcaaagtggcaggatacaaaattaactcaaaaaaatccatagccctactattaaccaaagacacattggtgaagaaaaaaatcagagaaacaccacccttaacaattgccataaataagataaaataccttggggtaacactaaccaaaaatgtgaaagacctgtaccataagaattttgagtctctaaagaaagaaattaaagaagataccagaaaatggaagatctcccatgctcttggataggtaggatcagcatagtcaaaatggcaatctttccaaaagcaatctacagattcaatgcaaaccccatcaaaatcccaacacaatttttcagagaccttgataaaacaattctcaactttatatggagaaacaaaagacccaggagagccaaaccaaccttgtgcaatataggaacttctggaggcatcaccattcctgactttaagctctactacacagctatggttctgaaaacaacttggttttggcacaaaaatacactggtagacaaatggaattgaactgaaaaccctgatattaacccacacacctatgcacacctgatttttggcaaacagtccaaatttatacgatggaccaaagagaacatctttaacaaatggtgctggcataactggttgcagatatgtagaagactgcagttagacccaagcctatcaacttgcacaaaacttaagacaaaatggaccaagatctcaacataattccagctacactgaacctattagaagacaaagtgggaaatacccttgaattaattggtacaggagactgcttcctgaacattacaccagtacaacagacactgaggtcaacaattgataaatgggacctcctgaaactgagaagcttctgtaaagcaaagtagacagtcagcaagacaaaatggcagcgacagactgggacaagacattcaccaaccccacatctgacagagggttgatctccaaaatatacaaagaactcaagaagctagtcccccaaacaccaaacaacccaaacaaaaaagtggggttcagaactaaatagacaattctcaatagaggaatctaaaatggctgaaagacacataagaaagttttaaacatcttagccatcagtgaactgcaaatcaaaacaactctgagattccatcttactcctgtcagaatggccaaaataaaaaacaccaatgacagttcatgttggagaggatgtggagaaaggggaacacttctccactgctggtgggagtgccaacatgtacagccattttggaaatcagtatggctactcctcaaaaaaaatgggaatcagtctaccacaagatctagcaattcctccctttggcatatacccaaaagaagcacattcatacaacaaggacatatgttcaacgatgtgcatagcagcaccatttgtaatagccagaaactggaagcaacctagatgcccctcaactgaagaatggatagagaaaatgtggtacatttacacaatggagtactactcagaggaaaaaaaaataatggaaccttgaaatttgcaggaaaatggattgatctagaagaaaccattctgatcgaggtaacacaattgcaaaaagacaaacattatatgtactcactcatatgcagattttagacatagagtaaggattaccagtctacaatccacactgccaaagaagctaataaacaaggaggacactaagagaaacatacatggtcccctggagaaggggagaggttcaagatcttctgagcaaatttggagcacgggaagaggggtgaagggagctaggagaaagagaaggggagaagaagacggatgcctaggacatgagagagcagaaagtatgagtcaggggaagaatacacgataacaacaatggagatatcataatagagagatttttggtttacagagaaaccaggcactagggaaatgtctggaaatctacaaagatgacaccacctaactatctcagcaatggaggagaagctaccttaaatgccctcccctgattatgagattgatgactgacttatatgccttcatccagcagctggtggaagtagaagcagacacccataactaatcaccaatctgaactggaacccagatgcagagaaggaccagtaaagagcacagaagttcagactaggctggtgaaactcacagaaacagctgatctgaacatccgggaactcttgttccacagactgatagctggaataccagcatgggactgatccagacccaaggaacatgggtttctgtgaggaaacctcagaaatctatgggacctcctctagaaacccagtatttatccctagcatagatgtggactttgggagcccgttccatatagaggaatactccctgagcctagtcacatgggagtgggcctaagccctctccaaaaggatatgaaatactctgatgaaaccctatggaaggcctcaccatccagggggagcagaaaagatatgtgacagataaggatttagttgtggggggtaggggtggacgggtgtgagaagggaactgggattgtcatgtaaagcaatcctgtttctaattcaaataaaaaaagttggaaaaaatagcaaccttctacatattaaatgggtaaatggtagcttaagtgtctgttagctggatttctgctatgtcatcagttatataagactaattcaatcaaagattgaactcaagaaatattgtcaacttgaataagaaccactttcagagtagaggaaccctgtgatattttggaaatctttgctgatattctgtaggcgatgtgcattgacaaattttaaaggaggaaaaaaaaatgacttctggagtttcaggaatgtccttgggtgataaactttttatttgcagatactgatcattgcttataagactgtgtatgcattgttatttgttacaggttgggaatacaaaaattcaagaagcattgagtaaaaaagaatataaattattttagtactattatcttattgaatgttgacatgataaattgtgtatcagtttgactagatatgacatcattacaatgatgtcacactgcatgtttttcatgttcatgcacagttttaaggaagttcagcatcacacatgtgactcacattaccaatctactatattatacaaccttaaataatccatgtgcccagaataggtactagaggagaaacctaaacactgatgggactttgtcaaaaaaaattctgaagtttccaagtatcacaagatgcacatttctcaaattgttttctttatagtcatatgcaaaggtaagggaactctcaatcattatgtacatctacgtatcatttattttacccaatgataaaaaatcttcatgtctttgtgtatacaccatcttttactgtttcctgtagaatccttgaatactataactatgcaaaaatgtaatgaacatcaacaataaaatactacccagaaattaattatctacttctataggtttcagaaaatgttccaggttttcatgtattataatgaaaccataaagttttatcaaggatattcacctatttatagaaattatgtctcagagaaattatattaaactttaatgtgttatcttcataagacaacttctgttacactggcagagtttaaaagtgttcctttttgacctttctgaggaaatgatgctgctcacttccgtgagctgacattgtgtctagtaccaactggaatgggctcccagtggaaagcaaaacttttctttcaagagatttttttccactagagaactactgtgtcagagtaagacagtgacacagaatcaattactaattttaaggattattaaggcttaagagtagaatgaaataaatgggaaagagaacatttaggatgtttcaaataatgtcattctatgatgatggatttactgagaaaataaagtatcatttactgatgaagcaagctagtagaaactagataatcaaattgctttacctgagcaatagacagatactattggcttctaacaagaaataaacccttgtataggagatacatctggagaaactagaaatcaatgatgtattctagaaataatttcaattttcccttcctatgtgtagttatatcaagaggttgaatgtgagtgtgagtatcagacagggaccagactgggcttaaagtccaaaaacaattggtgttcatagaaaaagaatcttagatatgcactaacacaaaacaaaagtagctgatggaaagaacatgtttctaaaacttgccctgtgtcaagaaaataaacattggcaaagaagctgtgaagagacaggctcacgtgccacaatcttgcacattacttatggggaaaggggaaaattcagaagatgtctatatatctgagaaaaaatgataagtgaagtccatgagaggggatgagacactaaggcagatgaagcaatgccagctgtttaccagaaaactgtgtgtgctatacattaaccaacaaaatcatattttaaattattcttttatcatgtttacatcttcacatgaaacaaaaatcatataaggttcttattgctataaagtttgtcttttgtttgagcacagatataagcacagttggttgaaaggcatacagttaaactggcatggctattttcataatgagttaatccccagagtctacctatcatgagaaactagaatgtctgggatcatagttcacagagaaaataaggatccagatcgtcaacaaatagctctgaattgctactgcatatgggccatactcctaagtactaatgtgcaatttcaatgtatgggtgatttgaggtggatgatgccagggttaaagtactaaaatttgacatatatggattaatgtgttctatctggaatatgcctctgtacaaacacaaccaactcaataatatgtcattattttaagttctaattgaacaaagtttgcaatgaaaaatgagacaatttgcgtattaaaatattttgagctcagagagtgataaaaacaatgaaagacttccctagttctcttcaacaaaaggctgtggctctgttctctgaagaaataacatcttctacctggtaaattcttaaagttcttttgaactatacttgcaagagtgaagctaggtgctgcttggggtgacagcccttggcaatttccacctgtcattctgtgaaaagggaatgtgaatttattagatggttgcttctttgtgccaaaaatgagttgacaagagtggaattggttgtaataaacattcaaaggactcttgagatgtttcacagtttgctatgtgacctcaaatttgaacttgggatagtataaaaaatagaaaattttctactaacttgcatttcacaaacaaagaatcagcctcaacataaaacagatttgcatagagaattaaatttcatggctttttattaactgcttcataaaagtctgccatttgatgtcatatgtaatttatgtatatattcacatatatggattaatgtgtaggttaatcctaacaatgtttcaagataactatctttcttactaaatgagaaaatatggctatgcaagctgaggttcaataacttagtaactaacattacagtctttcaatcaggtagccgccaggatttcagcaaggaaattaaaagtttaagaaagacgaaaatatgaatgcttaaaattgagcacatgtggctgttgttatcaatctataaaagatgctatcttacttattaagtttatcagattgatactctcaacaacaaagtagaaaccattttttcagttgaataaagtgatgttgggagaggatggagcaattttccttcattggagaaaatttacagaacaaaacacagagaactagaaacatcaaaaagaaatgcctattgtgaagattgctatctgaagactgatcagttatacgagcttggcaaaataatgggttgggaatgcattataaaatcagagaaatagtttctatttatgcaaatacagtaaagaaaaaaactagtgattcaaagaaaggatatatatgttagaggcatgtaagtgtgtaagtgtgactgtttaatatgtttatgtgtgtgttatatgtccttatgtgcaaatacatgtgtgtatgtaggttagggttgggttagtgtgagtatattgtgcctttgtacagatgaatgtgtgtgtttctttgtgggttttctcacctgtagatatagagttcagaggtcaatatcctgtactttcttctgccactctttatactaatttctgtgacaagatctatctgtgaatctggaattgtcatttgactagactggatggtcagtgagctacgggactccatcaatctcagctctccatgcatactcctttacatgtggtgtttatgtgactgttatgcaggctctcactaaacatggtgccgtctcccaagtaaatgtacaatttgctgcaaggaacatattaaaatatggacttaaagtattatgcagagcaattacatctttgaaggggaagtagagacaaccacataggactatccatataaaaaaagtgcttaatgaataattactttgcttttactagcatgtgggagtaagaatccaaacaatcggcagagagattctggaccaatgataaaatattacctcataacaaaatggcaatgcaaagctaccagatcatcacagggttgctcgagatatcttaaaatgtgtggcttcaaaggttacacagtgtattctgaaaatgcccccatcatgttctttgttgcaaggtcagaagtatgctacattaaaataacaagttttagttaagacagacctgtcatgaagagaaaggcaaccagtcagaaaatacagttgcagattagatgtctgttgctatattgcatagagagatcaggtcacacctggtgatggcaataaatggctaagatactaaagaaaagctttaatccaggaaaatatgatgtctgaaagtagaattagggaagatgtttaaatgattatttcagataatgtgaacttgtgttttgtggtccagagataggaggaaataacaaaagtaaagcttagatatggttgaaaaggggaaaaaattctctaaacagtagaaacagtgggtgtgttctgccaggatgttagctctatcttctccatgttggatgtttttaacatagacataaaaacttattaagtcaggaggcagcataaagaatggccagccaatgctttgatacagagctgtataatgacagagacaaaaataaaatgtttcttcaggaaggaggtctccaggggattcctaaggccaggccagtttcatttcagtaagatcatggggtattttggtggctaagtatgtgagtatttgtgaactcctgacgacactgtattccaggggatgcatgagtatctcctggttataaataagataatatctggggaaaacgtgaataaacatagttatttaagagaaaaatcactggtaaaggcttgggataccttgaacactgacagcttcatgaagatatctgagaaacattgtgggatcaatcaaagttttcttgaggtattatcatttaaaatgacattctattaaaatgatgcattggcttagttatatgttccttccacatatttttcaaacagtcttcagacattttctcctgtgggttaataaaggggtagagaaaccagaaagcaaagccagggaaaggtgcaaggaaagtacagaggcaaaagtccactcctgctaagtcagagtaggtccaaaatttgtataagggccactcaattgatgagtttccttctagcacttgcccgtcttagtcatagaatttatttttattactgaaaagaaagaaggaatcctcactggtaaacaggtgttctgatgtgcttttgtgtgtctcctgcccattgcatgtccaggtgggggctcggtgcctgcatttggagacagtaaaggcaggaaaacacgaaattcctgacatttagctgtccattccttttctttggtgcgtccacttgtgtgcaggggaagtataagcactgctctagaaaatgtgcagctcatccattgtcctcttcatgttctacctcatggtgcagcttttgacagtgttcatatgctttgatatttgtgatgagggacctaaatgtctgataatagggaagtatataaatttcttatttactccacaccatgtgattcaatctgttataattttagctctttatgtatgattttttaaaattttatcttgctcatatcaaagtataattacatcatttgtctcctcccctttcctttctctaatatatatattcctaaatatttgaatacagcattctcagtccctttaatattacttcattgtatgtaatcatatattattaggatatcaggactggccacttggtgttggatagtgaattgagaagctcttccctgggtaaaatctgtgttatttgcctatatgtgccagtatatgtgcaagtatgtttaccatgaaaaccagtcctttggaagaagtgtctcagtcaagaaccagtttagaacttcaaattcctgtatataaagcttttggtgtctttagtatttggtatttattttttactctgggaggaaacaaagagtagccaaaatagccgacaatatttgaggaatctcttagccaaccctgatcaacaattcaaaaggggatttctcatgcctgttgttggggcttttttagatgatctatgactttttgtggaggcattgaaaactcagatggggcaattaaattatattctcactatgccctccatcattccttattaagacctcccattttgcacatgtctgtaggggaaatgttagccatgccctcttgggggctggcagaggtaacacagaccatgcacactagtgtgtggtcagtgatgtagcaagaccttaatatgagggttgcacacaggcagctctatgttccatggttcccctggtttagaggattgactcactgggtgagtattttcctattaaaacatctgttcatcaaatttggtctgactcctttggggtacacattatttgcaccccactttacatgtccacatactagtcacttttatcctgctctttccttctcattgatagactcttcaacagcctttttcattttccaggtattcctgaggttgcaggaaatgcttaacaaatcaaaactcaatggaaagtatttttattttcagcacattgtattacatgatcataagtgtcatcttatcattacagtaatttttaaaattgattattttacccaatgttctggtgagaaaaataactttacattcaataaacagtttttagtagacagcaagacagcactagcctctttaaatttgttaatcttcaagatctatccatcataaaaatactttttaaataaaataatatcttttgcttagcttgtttcctaaccataattttgtcctcagcattataataatctattaactaatattttgtagtctttttatttatcatttattgcttggtaacttcacactcttctaattagcttaaagattgagtttgttttgtcattttttcctggcatattctggatatgagaaagaaactgttaaagtagacttgtgaatataagtgcctagggaagaaaaagttggaaccaagtcatatgcccatgtcagttgtctgatgcattgtcagaaaattatttatttcagagatatggctcttgaacaaaagtgaagttgttcagcaattaattacagcaaataagacaaaaagggttctctcaaacatttcacataaatgctgagctgacagagaactgcttggtcaggccttgagtgtacagggtctgtggtctacacatataaacccaaggcctgagtcccaggaaccggagacctttgtctccatctgtagaggtcagaaatgtacaggtgcagctgatctgcccagaagtttgtttctaggtgttcaccaccagtagtcttacagtccatgaatagaaacccatcattcaaagatgctgatgacagcagcaggtgctagttagttctgtagattccatgctttggggatgtgtgattcttgtttctaaaggggcctatttttaaaggctttgggtgttaggaacctggacccttataacttgtagctctctggacatcctttggtgacaagcagcctatagatttggctcttcatcatcttttgccatttctacatttttgtggtctcagaaactcatcactacccctatttctcccatcagtggctttctggagttcttcactcatcaagttgctaacactgctgctactgacattgctgcctactacttgttgcctgctactgtttgggatgctgacactgccgaaaatattgctgctgtcactgctcctaatactgcaaccggtggtttctcctcttcaagttcccaccacagtctaccacactagtgagaaagaccaagagatggcaaggaaggccagctcagtagaaattttcacaaaaatatttgtttgtccatttgtttttttttcattgttgttgttatttggtttggtttttcgagacggggtttctctgtattgttttgaagcctgtgctggaacttgcttggtagactaagctggcctcgaactcacagagctcctcctgtctctgccttccaagtgctgggattaaaggtgtgcaccaccattgttgggataatttttataaaacttaatgctgaaaagaagtgatgtctcctagttgactcaaaatttaaaaggaactctgttgtgggaatatgttctgccaatagattcggggtaccagcctcagggtatggtatattgtctgcagatgtgactgcttaaaaagagaaatgggggtcttattctcttgggttgtggagatcaggtcaggcatcatgaagctgagtgtggtttgttcccagctcctttgcataaaacagaagaattctgcaactggttataccttgtactgtatctgtgagtctctttccccatagcactccttgataaacacacacacacacacacacacacacacacacacacacaatcaaaaatcacatacacacttttaatacatacatgcatatacacaaagatcccatttgacaatcaaggaattttctctgggattcttgactaagagttctttgtctttcagacctgtttgaagatggcctttgcaaggtagggaacagagagggttgtggctctctgtgatagcagttacatgtgacacatgctctgcaatacttgtctagagtgcaggatcattgctctagtgcccagtgtgaaggaaacaacctacttgaagcagtgctgaaatctgactacagtgtcctatgaagttgaagtgaacatgtagttcttaagaattctctgcacaaggctgccaagtgtaattatggacagtgtttgttcaatgttccactccatgtagttttattagtcacaaaaaaatcctcaagctgattacagtaaaagataaagtctgaactaacatcatgatcatacttaacaaatattcaacaggttctacaggccctggccagtcccaaactctagagagtgttgtatccctcagatctgcctcaatcatagtatcaattaaaactcttattttaattagagtctcaaaaacaggaagcataatagcaaagtttcccaagtgaagacactgtttctttgaacaaaatatatataatctgctccccagtagtccactaccttatgttagaaagggaagcattaaaacagtttgaatacagtttgaatacagtttgaaaactgccccatgattctttgaaaaagttatcaataactgaggaggagtatagcagttaattaattagtcaattaattaatgcattaaactaggtaaacattttaattagagataaattgaattttgatgaacatataaatttcattgttgctaaataacatttcatataatctaatcaaaacactgaagttgcacaattaaaaatatattatagaaattattttaaggaaactaataaagaacttaatgaaaatgtaattctacacttttaattaaattcatgtccataaactgctttttaacctattgtcttaacatcttacatttttcagtaaagtaaagcatttgggttgcttgatgttaggatgcagatttagtgtgaaaatacaaaatttctagatatatatgatgtatatcctaatatctaaacatagggtgttctgtaaataaataattatttttatattcaggaaaacttccaaactatctcacaatgttaattataaagaccaattaggtattatttaaatatacatatttctttatcatttatgctgcctccttcttttgcatccacatgaactaatgtccattctgacctttctttattgcttctaggctcaggcactcatgattcaccagttccaagccattggccttcttttgcatgcactcatgtctcagtactcatggatattacccaggtctatgagtaaatactttgatttttaacttacagaatatttgatttatatcccataaacaataatgttgaaatatttaggcatggagaaattcaaatgtcacatgactaatgggttaatcatagagttaagaaattctgacacagcagattatcaacaaagttgtttaaaactaagttttattgaaaatattttttcatacaatttttttctgataatgatttcctctcctatatctccttccctagtctcctcactttcatatccatctaactcttctttctctctcttcagaaaaccactaggcaattaaaaaacatttaagcaaatgcaaaattaaaacgaataaaaaacagaaaaacaaacagaaaaaagaaaaaagcagaagaaacacacacacacacaaaacactcataaaaaaacaaaattgggaacgataacatattagcaaaatactagccaggtagaaaaaaatgaaggattgtgaaactaaaattctctaaaagttccattgattaataatggaataatttgtgttggaataattgctggaaatgggatctccttttactatgattcagatgcccagctgacactccattgcagaaaactaatttttcttttgcaagaatttgaccttgacaatagtttctgagttaggaatggggactggtgtccaatttgagtctcagctctaagacccccatctagagtggacttatgcaggctttttgtatttttgtgtgagttcatatgttcatcagtctttctgtgtctggaaagttctgtttccttggtttcttctctctccactggatcttaatttttttctgtttccttttccccacatctcagagatatgaggggagtggtttgatgaagacatccaatttaggactaaatgttccaatgtctttctcttccatcacattgtggatgtgtaggtctctattttctcccatctactgcaggagaatcttgtcctatgatagctgagcaaatcacttatgtatgagtgtaacagaatgtaattgagtcattttattgccatgttcctttaggagaaaataggtatttgctttccccttgtctatctagtcacagattctttgccatcccagcattgatagcctcagattccattttatggagtggccttaaatccagtcagatggggttgattactgccatgatgtttgtgcctctagtgaatcagcatatcatgcagaaaggtcactttgtagattggaaggttttgtagctggcctggcatttaccgttctctcacaatagtttgcagaatacttcccactatcatgggtactagacattaggggtaaggcaccagcatgactttccatgttcaatgagatatgtaggtattgttttcagcaatagtgccttaccttcaatttgtagagagcaaccaatcatagcctttgcagtcacctgagttgtttgggggtttctctttgggggacttgcttgacccctggaaacttcacttggtggtaagaaccgtcctgacactttgtctcctctgttatttggtatttccatttagatatctttcatatgaatatatatttttaaagttttttctatagtaggcccttgtatgacccctcaagtgggccttagttctggctgtttctatcaatattccatcctttaccctcctgtcccctcatcatctctatttagtccactgattcagatatcccatgtgtctctccataatgttatagtctaaaatactttagggggtctcctggactggtcgtttaactaatacctaattctatggctatataaattgcattatgtctattgaagtctcaaatgtaaaatctgaatataataaatagagtatgtttggtttttggttgggggtggggtgttagttgctacattcaattttgcttgttttttattttatttttttagttccatctatttacctacaactttcatgatgttttctaatggctgagtaatattcaattgtgtaaatgtatcacattttcttgatccattcatctatggataggtatctatggtatttccaatttttagctattttgaatagaacagcaataaacacggatgagcaagtgtgtctgtagtgggttacagagtcctttggatatatgcccaagagtagtatacctggatgttgaggtagatatattctcattttcctcagaaaaggccacattgatttccacagtggcttttttaagttagcacactcatcagcaatggatattaaatatttctcttacttcaaagcctcttcatctttagctggcaagtgttttattgatattggccacatggattataaagagataaaatctaatagtacttttgacttgcattttacctaatgactaaaaatgttgaacatttatctaagtgtttctaaataaattttgttcttttgaaaagtcttagaactttcaaaggctaactttcagtagacaattctcgaactcttgattgccatttgattcaaaaagcataatagaaaataaaaaataatctcaggacttgtaactgacaggtgaacaatgagtctatattagggacattaaattattaaacatcacctgacagtggtgaatgtcatcctctccccatctcaaacacccaccataggtttcatgcaaaaaagagcaatgtttaactgactgtcaagttaaagccaacactaataggtaaaatacagtctttctttctcctttatcccaaaacgtcaaacaaattcctgtgtccaaaccttaggtgatcctgggttaaaaattgataaatacatgcctcaacaaaagctacagtgaacccaatcactggatagccagatttttgctctaaatccaaacttccctccatgctatcactctaaaaatctactgcttttcctaactttcacttgtttgaaagtgcaccttctcctctggtctggtctcctcagatctggtctcctcagatacggatagtatctgttcctcactgtacacaacttcaatcaaagtccatggtggtattccaggactcctatagcatgacttcatttacatgtagaatctttctaaaggatatttttgaggtaggaagtagaaagctcattactggggcttctgtgtggagatataaatactaactgcatggaacagagtatcagaaaatagaattagtagattttcaaaatcattgcagtttattctgtaaggacaagaaacacatcattgaatattattaaagccaaaatatttaaccagttctttggtatataatggatatgtggtaattaattaatgaatgcaagtaaattcaggaagtttggtgtgaccagcactcaattgtatttcagtgtacttggcaatcttctaaatattacacatacagatccacatgcacatacagatggacatgtgcatgaacacacatggaggtatgtgtgcctgtgtgcatgcgtgtgcacacacacaaacacacccaaataatgaggtacatatgcactgatatgaccaactttgttttgacttctgtattcaacatatctattttagaatcagaaaataaaggcacccagagtatcttcttgttgtatcattcagtgaagacagaggaaattggcttgagcaactggctcatggtgtacatgatcatctaattgcacaatggcactgttcaatatccttttgaaaagttcagggagaaattggtgtttgtgcagtacaacaactcttctatgcaataccaatctttatagaactgaacaccataatgaaactagtcaaacacgagacaaatgaataaaaataactaacacaatgacaacaaaaatggccaaaaaatagatacacaaagcagaataaagcacaattaggtttaaaccacgagtcaagtcaataaacactgagcacatctatcctatagtccctgggactgtgcattcattcttctccctaatgtgactcctctatcagactttgtaactttactcccctgaagctgtaagttctgctatttcctttcagtattaatgttagaaaacaaacagaataacaaaggaaacataatgaatgacccagtttgccttcaattccataggaaggatcctggcaatctcctttaacattgtcttcttcctcctgcttctttttctttcgcaccttctcttcatccccactccttctcccagcttccttcccttctctgtgcatggtgtaattaattatccttgtctcatggggaagcactccctggcactctcagattaccttattgtcttttagaaggccccaatttctttctttttataaatatatatagtgtatgtttattatttttttatttaaaatcctttctttttcatattacatactaacctgagttccttctcctgcccccttgactcccacccttctcactcccctcccatccactcctctgaagggtaaggtcttccttggggagtcaacaaagtctagaatatcaagttgaggcaggacaaagcttctccccccatatcaagactgagcaagctatcccaccataagaagtgggctccaaaaagccagttcatgccctgggatagtcccaggtggcattgcctagtacttccccaacaatttaagtgcacataactgtcacccacatttagagggtcaagttcagttgcatgcaagttctctatctgtcagttcacattccatgaggtcccactatctagggtcagctctcttcctggttttccccatcatggtctggacccccacccccttgttcatatgatgactcctccttctcctaaattgaattccaggagctcagccaaatgcttggctgtggatctctgcatccctcatgtagtttctatgatgacaattagggtagtcacagaaggccccatttctaagtatgcccacagtccagagtcaacaagtatctacaacatcaaattatttctgggaggcacttttcagactacaacttggttttaattgtaggcagggtgagttatttggacttataatcttcattgagactcataggttcactttcccttacacatccatcatcactgtgaagatgaccattcaagtaacagcatgtgtaggcctgaacttcttagggcatatatttacccacactgcagctacaaaaaaacctgttatcttttcctctctgcagagttatcactggatttttaaaaggaaattgatgagctaatagatttggtaatctaatttatttgtggcctcctgtgtctatacatattgtaaagcagcatggaacaaatgaactggtttattttcctgtatttttaacttggtaagaagcacataagaatgggaaccatagtgaagagccaggctgaattccatgcatagtcatgctgcgcatgtattttactgttatttctttaaaatttagcccagtattgggttgagggactcacatgatctggtttaagtacctggactgacatcatttactggcagaagaatacttagatcttcatgagcatcaacagcttcagtttttaaaagagaaaattatgtatgaaacattcatgagagttttgtgagaaaaaaaactcttaggtagagggaaaactggagaaatttagtggggaaaaaagtaccaggtgaaactaatttgaaattaaaaaattaatgactattcttagactttcatatttttttctgggctggggacatgtttgctgggggaaatacttctgcgtatgtttataaataaagtacttgcttggccaatgtgacagcaggttaggctggactaggagtcaaagaggattctgggaaatgtagtagagaaatggtgttccagacaggaagtgacatagcaaggagactcatatttaagaagaggaaaaaggaagtgtcgctctctttcccctcggctcctgctccaacggcacgatgtgatccaccagctaggagggacgccaataaggcgtctgataagataagtcttataaaatatatagatgtatgataattgatactgagctaacagatgagaatcctagtcattggccaagcagcattgtaactaatacaagtctctctgtgtattcatttgggcctaacttgggcaggtggctggcgtaaagcttacacgtggcagtggggctcagcggcttttggcagaaagatttattgtaacacatctttctatggggaaagtgtttgctatgcaagaatgatgactggagtgtggatttctagagtccttcaggcaggcctggtatcagggctgcaaacccagggtaagagacatgcattctccgaggcaaactgacttctgagactagtcaataggtaaaatttgaaggctcaggaagagataaaaatggagatgtcacataagaaacatgtgtcacctattccccattttcttgcatacacacagaaagccacattttgcccgcagatgtttcaacatgcatacacaccacacacctatagacacaaaaaatttcaaagtttttattaggaagtgcatatactttggaaaaatctaacaatgttgtgtaataaaataaggtaaagaatgaagagaggtctccctaatagatttctaggtacatgttttattctccaggaagtagtgttttgaaatgctaagtagagaaacaatgtatttaagtcattaatctcaattagcttcattttccatgagaaagttttttcacatgacctcacctgttcaaattaggcctaattactccctccaaaggatcttagttcaatttcctgcaaacttggagtagggacagtgtattttgtcccaaatacttcaaattgtaagaagttcatttaacatctctttcaggtaaatgcccctgatgagagctggtatcattgatctgcagcttagcttgtaatttgctacattctggcttatccacacatctttatcatagcattattctagctaaagttgtatattcagaggcccttcctgaagtatcaggacaacttcagttctaaatgaataattgtgaatgctttgtgacataaaataatgcttttgtatttctcaacccagtaatcctgacatctttctaacattcagtatttgtgtaccaagatctagacaaggggtgatcattaaattcttaaaatatcctggtaaaatctctctgtctctgtgtctgtctttctctccctttctctcctctctgtgtgttccccaacacaatgacttttagcattttaatctcaattttctcatacttaagtttaagattacactagtatataatactctatcagaatcctatggatgcttcatgtgagttcttactacagtgcttcttggaagaagttttcaagtagtctattttactattattgctatttggcaatgcaattttcttgatcaacacatagttgactttgccctgtgaatctcatcaggaagcctcatgaagtcctgagcacagagttcacaaacccacagaaaatgtcatcagatttttgagaaacagtgatgcctttcataattcagatgaaataaaaccacccctaatcagccaatgcctcttacttctttaagaaaaagcatggtggttctttgggtaatattaatagtttttctgctgagtccaacgagaaggtattctgctgagaaagtttgggggccttgttcaagtctatttccagcatctggtacctgctgcaaaggtatagaacagatgtctacatgtttcgtgaatagtttagatttcaatttcctaacagaatcctgatattgaagttagacacattgccaacagatttagaaggagttagactcattaagataagacctagattgcagcacaaagtcttctcatgttaagattattagtgtgttcttccctgagacagggcagtattccaaatgtctatattccccacagcaaataaagtctcatgatgaatttaatgcccttctctcacttactgtaatagcaagaaaacatatcaccccacaaaagataccttctctgaaccccacaaacttcaaataggatgcccagtcagaggcactctgcagatgtaattgaagttggagaattggaaacagaaagtttcccacttgcccaaacataataacattatcctttaaaatctaaaagctttcattatctgttaagccagcataaaggatgcagaagaaagatgagagagatttgaagccagggaagttcttgaagtattgctagagcttggaagagaaagaggaagaatgggagaagaaggataagaaggaaacatgagccaaagaatgaggtggcatctgagagtatggggattgtttttaaacacctaggataaggaaggcctggtcttgcaaccacatgagaatgatttctgtctgtaccacagaagtctgaaaagggttcattagcagagtatctagaataacagacctacatgttactataaatctttccaccaaaagctgcctgagacccaccaccacatgtgaactttactttatgccagccgcccgcccaagttaggcccaaatgaatgcacagaaacatgtattaggtataatgctgcttggccaatgactaggattctcttctgttagctcagtcttaactatcataaacatatgttttataggacttatcggacaccttatttgcgtccctccttgctggtggatcacatcatgccgctggagcaggagcggaggggaaaagagggcccttcctgtttctccttgcttaaatgagtctccttgctatgtcacttcctgcctggaacagcacttctctaccacatttcccagaatctactttgacttccagtcctgtctaacttcctgtctctttggccaaatagtattttatttaacaatcaataagataaatatacacagtacattccccatcatgttttatttaatttcctcattatgaaacctggagattaacagtggggtgattccctgcccacactgcaggctgcacactggtagactggaaatggatgctagcttccacagacaatctgtggtcacttggtatcataacaagagattccgtatacttacatccatttcctacttttctaactccttgattctgtaatgtgtgaagtgtttgagatgtgccatctgaacatacaccaaactgggctattgattagctcaaaaaacatactcaagcagacccagctctctgaagagtcattttgtctgcatccccagagctagtaggtcattctaattcttctaggagaatgcctttccaaatcaaggctagaaatagccatcatttcaagaaggtgatagttggagctccttgagcccaaataaaatgactcaacccttgtcttctggagtttgtgcattatccagaatgtatctctaaggatcatttccagagttgactaccacggtctaataatctgtttatcttataattctcctttgatttaatttaaaagtgaaatctagttaatttgtatccaatttataatgaaagactgaaatttttagataaagtaaggacaagactaggaattttagtaatcactacaacaaaagatttaaagttcagtttctatatagaaaaaataaatatttgtggtaaaaacaaacacaaaataaaaagaagcacaaatactcagattctgctttattacacatttacatattatattcagaaataacattgaagataaagaatttataattttaatttaaaaatatttactgtggccttcccttaaatgcttcttggaaaaaatagaaagcacaaaatagtgtgaagaaaataatgaggaaccactaagaacactttcagtgttacatgatgccaatgacagtcagtctctaagacacacaacaggttttgaaaacacagggagcacacttgctcattcctattgactaagagagatcacagagtatataatgctgcttgaggggcaatgacccaaagcaagatcaaagaggaggaaatgaagtgatgttatccacccccaaggttattagagcacttaacttaatcaaagatgaatagaacaacaggaggaaaaattagacataagagggattgcaaatggcaaattctactgacaacaagcataaatgactgccaacattgtggtcaaccattctccttgatcttctgaagggagggcatggacagtgtcaagaatatttcacatactgattatggtcatagttactgatctgtgttctgagtgaaccccatcaaaagatgttttatgtattatgttatatgtaaggggtgtattaccatagcttcttgaaaatagaagctgttcacaggacagtcttctgtatctcataattataatactggatgctttgagaaattttgttacattgaaaacattacaatgttaaaatctattttaccatacttgtattgattttactttcctcattagacatagagctccattctcattgttgtttcttttttcctggtaactttagtttcactctgactctaaaatacctgtgctcttagcagttttatgatattgtgaggttatcatatgttatttaatgtatctttggcatgtacaaattaacatatctgaaaattccataggatttggaaacatgtcttcctgtgaagtaacagtcctacattttcaatatgtccttatgtctgcctttatctgttctattgacaaaacttttatttgaattgcttattggtttggtctctctatgtcttatacttatttgtgagacattgagaatcctttgtaatatgacatttaagttgtattttttctggacagtgttctgttttccttgaaattttgtttagattggcttgattgttgtacttttattcatttaaaatttaagaggccttatgtctactggcttgtatctcaatagccccatttatgggactagaatgagtcctgcaaaggctgactttctgggattttcatatttatgaatgctgggaaatttcacataccagtctctgttctctgatggaccccaaggaattgtgtcatcatcattcacaatttatttgtacaaagatttgaatagatagatctgcttgtggagctgaatgccccatgcctgacattcctcaaagtctcctcagctgccttctaagagtcttctttctgatccaagtgtatccattgctgttggcccagctatgtccctagagtgtttggcaaactgttcagaggatgaagaaaaatgaatatgtttccacaagatcttttccttactcttaaatcaaaaccctgtttcttggtgcctaaatagagtacatgattttgatcaaaagtgactcatattttgttttaagatcatgtgttgtgagatagtcatactaactctttaatttgtcatgtccagtcattgtttatgagtctttttaattctatatcagtatttattgtcctatttggtacttaggcattcaggggcacagttctacttgtctcactgaagtaatgatctactctgctgtgcagtagaacttattagagattctgtagtgggacactagctcatttcaagtagtgcttggacattgtgcataatttaaggaagtcaagcatttctcacactcttgccataggaaaccatccttagcattttcccatctgtcatagatttatgttatttttctcattcaggtgactaaattgatgacaagaagcaagtaaaggagacataaaattttaggggatttaaatctggcatgatggagagagcaggtcagcagattgaggtcactattaatctctatacatgccagtcagtaagcagagaacaaacagaaagtggggcctagtatcaaaccagtcctcaatgacccacttcttctaagaatgctccacctgttagagataacacaaagtgtcaaatgaacaccagcccttggataccaaatattcacattcaggaaaccattgaggatatttcatattcaaaacacaatattctctattatgtacatttattaggctagtacttatctatcacccatcaagcatctatcatctatctgttcatcaattataaaatctatttatccatctttcacccatatattatttctttgttagcagcaaatgggattgcattccgtcctccagcctaaagggcatttcccacgagcttcaaaccatcctctctgtatcctttccagaacaaatttaaagattaaataggaaaggtcttagaattggctgcccatctgtttttgctaataaacttttattggcatgaggttatgtccatttgcataatgttgtctgtaaatggttactacaatagtggactgaatagtattgatacatactttaagttaacaagtttaatgcagttgctgcctgtggaaatattcctaaacttcttttttcactttggattcctttgatacctacaataattgcaaaagacagaatctgtgcactacagaatcagataatcatactcatatttgtagtaatgaatgaactccatgcaacatctaatcaagatccaaaaatgataagactagatttaaaatgggtaagagagccatgacatttggttatggaaaatactttagaggtaaagatatagatgggtcaagtataaacacaaatacaacaaattcacacaagcagcatccaaaaaaagaatgattataaagatattttcttttaacaagttatcattcatatctacaaagtaaaacctgatagaaatgatgacaaaatgggcaaatcaatttaaatggtgagaacagttacagggaatccaacaggcatttctgaaatctgtgcataccctcatatatggcatttttgtcatatacaaacacacacacacatgtaattaccttaccacaataaataaaaaataaatataaaatatttttaaaaagaaaaatgattcagataatattttctctgttgtcctgtactaaacactgcccacatcagccatgaacaatactaagcattttctttctgtttcattccttgaaggttttattggggctgttcaattttcttccatatattctaccactcacgtctatggtttaggctctgtcagtgaaatgtgatctaaaggcagatgaagctaagaagtatgctgggaccagatgatggctgagaataatgagtctcacatgtgtcagatacaggttataagtactttcttttactggctacagggaatggtgtggctaaaactgggagcagtaaagagaaagtaacatttctcttacacaaagttccaaataatatttagtgaaatgcaattttcaatgtccacgaaatgcttcttttacagatctcttttaattttattatcatcatcattattgtatgatatgtaagtggtgtatatacatgatcatgtgtgtttatatgtatgcatgtacatacagatgactgtggatatcaaaagtcaagtcaatcactctccaatctagtttctgagacagggtctctaaccgaacttattgctcactatttacgtaggctgactacagaaggattctcctgactccattttcccagaagtgggattttaacaacacaccactgtgctcaactttcataggagtgttgatggtccagttcaggtcttcataccttctcatcaagcaattatgaaagttagcatccttttcagtcattctttttcaaatttgttagggtgtaagtgacatgctattaatttcaaatgatcaacttgtagcaacagttgattagtgatgacatatacatacatacactaaaccatcattgaaatcatcatgatcaaattacagagaatctcaacatcagaatggctctcattttctaaaatcaggtacaagacaaggttgcccattctctcaatatctcttcaatatggtacttgaagttctatcaagagcaataagaaaacaaaaggagatgaaggggatacaaattccaaaagaagtcaaactttcactatttgtagatgatatgatagttcacataagtgacccgaaaaatactaccagggaagtcctacagctgaaaacactttcagcaaagtagcaggaaacaagatttacaaaatctatagccctactatatatagacaataaagggggtgagagaaaatcagaaaaataccactctttataatagccacaaacaacataatatatcttggggataaccctaacaaaacaattgaaagacttgtatgacaagaactttgagtctttaaagaaataaattaaagaagataccagaaaatggaaagacctcccatgctcttagataggatcaacataataaaaatggcaatcttaccaaaagcaatctacagattcaatgcaacccccatgaaaataccagcagaattcttcacaaaccatggaagaacaatactcaactttatatggaaaaacaacaggacaatgaaaacaaccctgtacaatagtgtccagaggcatcaccatcccagacttcaagctctacaatagagcaatagtaatgaaaacagcttggtattcacacacaaaaaaagacagatagacaaatggaatccattttaaagccctaatgttaatccacacacctacaaacactggatatttgacaaagaagctaaagttatacaatggaaaaaagaaagcatcttcagcaaatggtgctggtataaatggatgctgccatgtagaacactgcagacagatccatatctattttcatgcacaaaacttaagtagaaatggatcagagacctcaacataaatcagaacactgaccatcttagaagagatagtaggaggtacccttgaaagaagtggtacaggagaccacttcctgaacataacaccagtagcacagacgctgagttcgacaattaataaatgtgacctcctgaaactgagacgcttatgtaaggtaaagaacacaggtaacaagacaaaatgggaggacccagaatgggaaaagatctccaccaaacctacatttgacagagggctgatttccaaaatttacaaagaactcataaagctagtcatcaaaacaccaaataatccaattagaaagtggggtatggaactaaatagaaacttctcaatggaggaatctaaaatggctgaaagaaattgctcaacattcttagccatcagggaaatgcaaatcaaaacaattctgatataccatcttataactgtcagaatggctaaaatctaaaacacaaaagacagtttatgctggaaaggacatggagaaaggggaacactgcttcactgctggtggaagtgccaactcatacagtcactttgaaaatcagtatggcagatcctcaagaaaatgggaatcaaatgggaatcagtctacttcaaaatgcagcaattcccagggagactgagttcttctatgggagaggggtcttcagagtctgtcctattttggggataaggcctaggccctgccccatatatctagcctgagggattatccctctatgtgaaatgggctccgaaagtccattcctatgctatgaataagtactgatcccatagattgtaccatgaataagtactggccccatagatttctgaggcctcctcaatgacaacaacattcatggggtctggatcagttccatgctagttgcccaatgatcggtttgggggccaacagctcccacttgttcaggtcagctgtttctgtgagtttcaccaggctgctgtggacccctttcttttttataactcccccttctctgcaactggattccagttcagttcagggtttagttgctggtatctgcttctacttccatcagctactggatgaaggttacaggatggcatataagttagtcatcaatcttattatcataggggggctcctctgttgcatagatggttagttggtgtcatccttgtagatctctggacatttccttagtgcctgatttctctttaaacctatagtggctccctctctgatggtatcccttattttgctctcatatattctttccttatacaacatccctcttcctttatctcctcctctttgctccttctcattcttattgtggagctccctctccacaaccccattctcccagttttctcgggagatcttgtccctttccacttctctgggggatcactcatgtctcccttagagtcctccttgttgcctaacttttctaatggtatggattgtagggtggtaatcctttgctctatgtgtaaaatccatatatgagtaactgcataccatgtttgtttttgtgactgggttacctcactaagaatggtttcttctagttccatccatttgcctgaaaatttcaagattccattgtttttccccgctgactggtactccattgtgtaaatgtaccacattttctgtatccatttttcagttgaggggcatctaggttactttcaggttctggctactacaaataatgctgctatggaaatagttgaacagatgtctttgatgtatgaatgtgcatcttttggttatatgcctaagaatgggattgctagatcttgtggtagagtgatcccattttactcaggaattgccatactgattttcaaagtggctgcaaaagtttacactcccaccagaagtggagtgttcccctttctccacatgctctccaggataagttatccttagtggttttttttttttattttagccattctgacaggagtaagatggtatctcagaggtgttttgatttgcatttcactgatggctaagggtgttaagcactttcacatgtgtctttcagccactttatattcctctgttgaaattctctatttagttctgtaccccacttttttattggattatttggttctttgaaaactagcttcttaagttctttgtaagtattggagatcattcctctgtcagatatggggttggtgaatatactttcccattctatgggctgccattttgtcttgctgactgtgtcctttgccttacagaagcttctcagtttcaggaggtcctaattactaattgtcaacttcattgtctgtgctacatgcttaatgttcaagaaattgtcctataccaaatctttcaactgtacttcccactttctcttctaagaggttcagtgtggctggatttatgttgaggtctttcatccatttggatttaagttttgtgcatggtgatataattggatctatctgcagtcttccacatgcctgcatccagttataccaggaccatttgttaaagatcttcttctaattccattatatatctttagcttctttgacaaaaatcaggtgcttgtaggaatgtgagttaatagcaatgttttcaattcaattccattggtctacctgcctaatttttttgcaaataccaagctgttttaaggactataactctataatagagtttaatgtcagggatggtgatccctccagaagttcccctattgtacagagatgttttggctattgtgggtctttttttctccatataatgttgaatattattctttcaagttctgtgaagaattctgctgggattttgatggggattgcatttgagtctgtagactgtgtttgtaaagtttgtcatttttactatgttgaccctacctttcaaagagcatgggagttctattaattttctggtgtcttctttaatttctttctttaaagactcaaacttcttgctatacaggtctttcacttgtttgattagtgttaccccaagatactttatgttgtttttggctattgtaaagggtgatatttctctgatcactttctcatccctcttatagtctatatatagtaggcctactaatgttttttaagttaatcttgtttcttgccactttgctgaatgtgtttataaactgaaggagctccttggtattgtttttcaggtaacttatgtaaacaatcatatcatctcctaacagtgaaaatttgaattctttccaatttgtattcccttgatctccttttgttgtcttattgttctatctaaaacttcaagtacaatattgaagagatatagagagagtggacagccttgtcttatttctgattttaaaggaatcacatgaatttctctccatttagtttgatgtgggctattgccttactgtattctttcctggacctttatcttgaagggtgtttgattttatcaatggcttttcaagcatctagtgagatgatcatgtggattttcttctttagtttgtttatatggtggactacattgatcaagattcgagttaaaaaggaacaacctctcgatgaggacaaatgacaggtattctactaagatatatcttataaactaaatagaaacctcccaagggaaagggaaatgttttgcttttatcttcacagaaattctcatcttcaaaaggcaaacgacactacatgggtagatacttaaacaaaagcaacgtgccatatggtaaactttacagctgtctctcaaaaaactctatttctctttatttcctagttcatattcaactaaaccaatgctagatttagaggtggatttggctttcctcctcaaaaatccaagcacgttatttaactaaactttatcttttctgtattgtatcaagaagccaattgatataatacagaataaaagaagaatttggggactgtttttgtcttttcttggatatttctctcaaggtgtacaccactcataattgttatgctctcatggttgcattccccagcatgtgtacctaacaagcaaacatttctctgctaactgtttatgtttgagtctcacacagccaatgaagacttgcctgaaagcaagcccttgacaccctggaaaaaaatgggccacacctccttgactgcactagatacaacttgctccatttcaactgacactcaggccagagcttcgggtactgacttcaatcaagttgatgatttcaagagatatccatctagcatggacaggatacaatccattcaagactttcactatactaacattttcttcctacaggactccacaaggctgtcattgtcccatttcatcaggaagtaacttggaggatgctacgctcccttcccccattgttgtcacttaggtaacacattatctagtgtcaggaatggggatctgatatgtgtaatgtatataggattacttctgtttctgatagttgtctttaattctaaaaacagagaagttaattctgtatcatcaggaagaaattctttagtctcaatgtgtaacacgactctctctgtatactgagaatcagtaaatatcgattaagaggttctgtaaaatccataagtatgatgcgaattgcatataattctgccttctgtacagatgtatatggtatccaaagtttttcttctcctgtagaaaccaatgtaaaacccctaccccaatgtaacacatgtcctggttttcatacagaggttagtacatctttgaagtatactggctgattgagttcagcagttttttccgtagtccagtgtctttctatagttgtttgtcctttttcattggcattaagaaagtttagtgttaataaagcattatgtaacctatgtttggggggtttagtcttccaagcttgtttgttgagcatctctttaagtgttctattagatctctgaaccattgtttgtcatgtaggattgtgtggtataccggtaacatgttttatgttacagtatttgaaaaatttttccaattttgtagagacatatgctggagcattgtcagtttttatttgtgcaggtatacagataactgccatcaccactagcaggtgtacaataacagaatcagctttttcagagttaagagcagtagcccattggaaccctgagaatgtgtctttggtatgatacacatatttcaaatttccaaactctgtaaagtgaaagacatccatctgccaaacctcatttctctgaatacccttaggattacaacatgctagcaatggagtttgattataaaaggaacaagtaggacagtttcttactatctccttggcttcttgcctttcaaacctttgctatttacatgatgtttcttatgaaattttgaggattctagcacatttccaattaataaacaatcaatctcatcattgccttgtgctagtgggcctgggatctaataggatctaatatgtgtaatgtatataggattacttctgtttctgatagtttcctgtaattgtaaaaacagagaagttaattctgtattatcaggaacaaattctgtagtctcaatgtgtaacacgactctctctgtatattgagaatagctctacgtcttcctgaccatgcccttgcaagcatggtcaggcatatctgtagccagcccctaagtaggtgtggctacagcttcccctacaattccccttttagtctaaaagaggattaaaacttaacagtgtaaagtatccaaaattaacaatcataaagataaaatataagaagatacaacaagctgcttatgtcacatcctaactatttatgttaactaaactctaaagtcgtctaagagaggtatccaagcctgaacacctccttccaatcccaaccataaacannnnnnnnnnnnnnnnnnnnnnnnnnnnnnnnnnnnnnnnnnnnnnnnnnnnnnnnnnnnnnnnnnnnnnnnnnnnnnnnnnnnnnnnnnnnnnnnnnnnnnnnnnnnnnnnnnnnnnnnnnnnnnnnnngtggaagaatccagactgtcttttttatgaatttaattctgtcagtttggggatagttgttgttaattgttccccaaaagtcagtaagagctatttgccaattttcattatccttccataaggaggaaattactttattagttaaaggtactataatttctgctggatcttttccagtcagctgacgaagtcttaatttatcaaatcagaaatcttttctatatatgtctttaactttttattctgtttatgtggcagaaatatccattccaatatagtgtcttccctttgtatcagaatttaagaaaggtattctccggatgacaagataaccagaatacagtctaaatcaatgttcattctatctacatgtgtatctaatattctgttttctactcattgtaactcttcttctgcctcagcataatatacttggactgtttaggtacttatcacctttaagggtcatttttaaatgctttaagtcatgtccttctacaccaataattgtctgtaattgannnnnnnnnnctgtaattgagaaatttcccctaataatttctgaagagaatgaagagtttgataacgatctctcctaatttgtaacttttgagggctgattctctgtaagtctatcttgtaacctaaatagttaatagaatctcctctttgtatcttttctggggcaatctgtaatccccaacgaggcagaacttccttcatcatttcaaacatatgttccaaagtttccttattagaatctgataaaagaatgtcatccatgtaatgataaacaagagattgtgaaaattttcttacaaattattcccaaaggttgctgtacaaagtgttgacacaaagtagggctatttagcattccttggtgcaaaactctccattgatatctcctaacaggctgtgaattattaagagttggtacagtaaatgcaaatttttctccatcattttcctataactgtattgtgaagaaacagtcttttagatcaatgactatgataggccatcctttaggtatcaaggaagtctatggcattccatgatgcagagagcccattggttgaattaccttatttatggctctcaggtctgtcagcattctccacttacctgacttcttattgataacaaatacaggagaattccaaggactgatagattcctctatatatccagcctatagctgttcctgtactaacttttctaaagcctctagcttctcagaggtcaaaggccattgtcatacccaaactggttcatctgtaagccacttccatggcagggcctttggctcctcagaaggtccatcatttgtacctagtttctgtacagcatggatggttggtaaccgttttccaaagcatcttaccagatcttttctactatctaaagattgtacataatttgtatctgacagcggaggaatattaatctcagtattccattgctgtaagagatcacgaccccagagatttatagctatatctgccacatatggtttcattatccctttctgttcttcagtccaatgcagaccatcgagttaacactctgtcaaactttagatagagttccaattcctaaaaattgtacatttgtctctctaagaggtcatttctgaggccaagacttttaagtaatacaagttacatacgcccaagtgtctactaagccagaaataactttattattaattttcactttcaactgaggccttttatcattaatagaagcttgccaaaatatgtgtttctcattttgtccattcacacttgattcttcatcactcactgctcaagctaccatctagaggagtatcatttttcacaataggcaaaggactatctattgttcctgtgagagactgtctcccactgctactgggaatgagccgacctttctcgatgtgggggccttcctgagtcccccctcagggtttcccgaccttaatggctttccttgtatgtccctggtcgatctacattcattggtccagtgtctacccttaccacatcttctacacaatccagaatgcagtggccttctgtatgaggcattgttagaattcgttttcgaaaatgtctattagtatgtcctattttaccatctaggttcctggagcctttgtggtgtccaggggaaggctctttctacccaaggttctagtttatagcagtagtaacctctagcctcttggtacctatgttgacctctataaggtgcttctccttgcctagcccttatatcctcacctctagagcatttaatttcctgttgtcgttttaaacctttggggatggcttctcctacccaagctccagtatcttgcacattatagtcaatgttggctgcatccaaaacccatttttctagcagagctgatatgatctttaaaggcaaaagtattcttttgtatattgggtttgtattttccttttctaccacggtagttgggtacactaatggtgtacgagtaacaaccttagaagaatagtcataatacctgggattggagtgattctgcttttgaggcatcccaatgatctttaagcctagtaatgatatccttttgaaaagtttgaatctccttaaacataaaagattccaagcatgttagtgaatctgtaaattgttctaactgctcatttacatgttttcctaggtctttaatacgatcatccttaggcaacaactggatggcatggaaactgccttctaggtattagagcctggattcgaggtcatgatttgttgattttgagtcctcagcaatcgaccgcatggacctatgtaatctatcagccctgtactgtaaattatcttccaaacattcaaatctagactcaaatttctgatctgctaccttgaatgctttaataattgattgaatggcattgtccaattctttaacgctatgctggttattttgtaccattgtatctagttgctgggtaacattgcctatctgactttctagctggctacatatattctttagctcatcatggtcttctgacagcctagcctctaaggcctcagacatggaggatctctctgtgtttatcttatcataaatatgctgtatctcaccagacagctctctctttagtgtattggacacagagccaagcttattatccaatttctgttctacttgctgcacaattgtggcctgactaatctgttgtccaaaacctcattgcataaagctgttatttcctgcaagcaggtggtgaggttatctttgttcctgttcctgacgactctggctaggaatgtcattgtagcagcaagctaagtgccatgactgcatataagccagtaaatgacagattagcatcctcctcaaacagtgaattcacgtaataagcaaaaatattaccaattttagcaaacaataaatattccgccataattttacctgatttctactccagatgcagtaagtatctttgaccagtggatggcacaggggtttagttagtttgcagcgtttggcagcagtcggtcagcagtggagagaggtcatataagcagctgtgcttatcttagagagtatatggctttatggctgtaaccagtgaaatagatgctgctttaccacagcagcggccaggggaagcctctgctgaaagctgaggcctactcacctctaggcagctagaaactgtctccgagctgggtggatggttctgagaaactcagctgcagcaggtcggcttctagccgggagcacctgtgaagagagggacctttccctgccaaggccgcaggccctggtggacccacagcttgtcccaaatggtgtgtaggtttccaatatcccacttcttacaccagatatagtgggaaattaccaatatggagtcaggtagaaatataagggtatttaatagggaaaagccttacttacagaacaacctagcaggagtcatggcagtggaatgcacacaagcccaaaagtaaaaccgaaatcgagaccgcagtcccatgcaagtatcgcactatgtcatcgtgaccacgcccttgcaagcatggtcaggcgtatctgtagccagcccctaagtaggcgtggctacagcttcccctacacataactgccatcacctctagcagctgtgtaataacagaatcagctttttcagagttaagagcagtagcccattggaaccctgagactgtgtctatagtattatgcacatatttcaaatttccaaattctgctaagagaaagacatccatctgccaaaactcatttctctgaatgcccttaggattacaacctgctggcaatggagcttgattgtaaaaggaacaagtaggccccttttcactatctccttggcttgttgccaagtgatggagaagtcctttttccaacatttgctatttacttgatgtttcttatgaaattctgaggcttctagcacacttccaattaataaacaatcaatctcatcattgccttgtgctagtggaccaggcagactcgtatgggatctgatatgtgtaggattacttctatttctgattgtttcctgtaattgtataaacagttaagttaattctgtgttatcaggaatgatttctgcagtctcaatgtgtaataccactctttctccatattgagaatcagtaactatattaagagtttctgtaaaatccaagagtaccatgagaattgcatataaatctgccatatgtacagatgtatatggactttgaactactttacattcctcacttgctttataacctgccttacctgatttgttggtaccagtgtagaaggtaagaactccagaaatgggagtttgtcttacaatatatgcaaaaatccagactgtttattttatgaatttaattctgtcagtttggggatagttattgctaatcgttcccaaaaagtcagtaagaactattgccgatatccattatccatccacaagtaggaaatttcctcataagttataggtactaaaatttctgctggatcttttccagtcagatgacagattcttaatttggcctttaaaatcaaatcagatatattttctatatatgtcttttacttttttttgtttatgtggcagaaatatccactccaatatagtgtcttccctatgcatcagaagcccagaagggtattctctggatggcaagattactagaatacagtctaaattaaggtttatcctatctacatgtgcatccactattctgttttctacccattgtaattatttttctggctcagcagataatattctcagactgtttaggttcctttcacctttaaatgctttaagtcatgtccttctacaccaataattatctgtaattgacaaatttcccctaataatttctgaagagaattaagagtttgataatgatcccttccaatttgtaacttttgaggtctggttttttgtaagtctattttgtaacctaaatagttaatagaatctcctctttgtatcttttctggggcaacctgtaacccccaatgaggcagaacttccttcaccatttcaaacatacattccatagtttcctttttgaaatctgataaaagaatatcatccatgtaatgataaatgagggattgtgaaaataaagtcttttagatcaatgactatgataggccatcctttaggtatcaaggaagtctatggcattccaggttgcagagggcccattggttgaattaccttatttatggctctcaggtctgtcagcattctccacttacatgacttctttttcagaacaaatactggagaattccaagggctggtagattcctatgtgtccagcctatagctgttcctatactaacttttctaaagcctctagcttctcagaggtcataggccattgtcatacccaaacaggttcatctgtaagccacttccatggcagagcctttggctcctctgaaggtccatcatttgtacttagtttttgtacacactggttggttggtaactgttttccataacatcttaccagatcttttctgccatctaaagattgtacataattagtatctgtcagtggaggaatatgaatctgattattccattgctgtaagagatcacgaccccagaaatgtattactatatctgccacatatggtttcagtctccctttctgtccttgtggtccaatgcagaccaccgagttaacactctgtcgaactctggatagtgttccaattccaaaaatattgtacattcacctctctaagaggctattgctgaggccaagacttttgggcaataatagtcacatccactccagtgtccactaagccagtaataactttattgttaattttcactttcaactgaagtcttttatcattaataaaagtttgccaaaatatgtgtttctcattttgtccagtcacatttgattcttcaccactagccaaacaagcatctagagcagtatcatttttcacaataggcaaaaaactatcgattcatcctctgagagattgtcttccactgctactgggaatgaccggacttttctcgatatgggggccttcttgagtgctacctcggagtttcccagccttaataggtttccttgcatgtccctgctcgatatacactcattggtccagtgtctgcccttaccacatcttctacacaatccaaaaggcagtggccttcaatatgagacattgttagaatttgtttgtctacaatttctattgatatgttccattctaccacagctgaaacatctaggtttctggtaccttcatggtctcctggggaaggctcttcctacccaaggttctggtttatagtagtagtaacctctagcctattggtacctatgttgacctctataaggtgattcccaagcacttgagtccacacctctagaacatttaatctcctgttgcctttttaaacctttccacatggcttctgctacccaagctccagtatcttgcacattatagtcaatgttggctgcatacaaaatccattcttctagcagagctgatctgatctttaaaggcaaaattattctttttcatattgggtttgcattttcataaactattgtatatataattgattgtcttgtttctggatctgttacctgtaattctactgccctagttaacctttgtacgaagtcctgaaactgttctataggtccctgttttattctggtattggcttgttgccaagtgatggagaagtcctttttccaacatttgctatttacttgatgtttcttatgaaattctgaggcttctagcacacttccaattaataaacaatcaatctcatcattgccttgtgctagtggaccaggcagactcgtatgggatctgatatgtgtaggattacttctatttctgattgtttcctgtaattgtataaacagttaagttaattctgtgttatcaggaatgatttctgcagtctcaatgtgtaataccactctttctccatattgagaatcagtaactatattaagagtttctgtaaaatccaagagtaccatgagaattgcatataaatctgccatatgtacagatgtatatggactttgaactactttacattcctcacttgctttataacctgccttacctgatttgttggtaccagtgtagaaggtaagaactatttctaccatggtagcttgagtagactaaaggtgtacgagtaacaaccttagaggaatagccatgacacctgggtggagtaggtgcctcggattgcagtgattctgcctctgtggcatcccaatgatctttaagcctattaatgatatccttgtgaaaagcttcaatttcctgcatcataaaagattccaagcatgttagcaaatctgtaaattgctctaactgctcttctacacgtttttctatatctttaatatggttgtccttagacagcatctggatggtatggaacctgccttctaggtattggagtctagatttcaggtcatgatttgctgattttgaatcctcagcaattgaccatatggacctatctaatctgtcagctctgttctgtaaattatcttccaaacatccaaacctagattcaattttgtgatctgctaccttagatgcttcagtaactgattgaatggtattgtccaattcttcaaccctctccgggtgttttgcaactttgcatctattttctggctcacagagcctatctctgtttctagacggctacagctattctttagtctgtcacagtcctcaaacaggccagcctctaacacctcatacatcgaggatctctctgtgtttatcttatcataaatatgctgcatctcatcttgggtaacagacagctctgtctctagtgtattggacacagagccaagcttattatccaatttttgttaaacttgctgcacaattgtggcctgacctaatctgttctccaaaacctcattgcataaagctgttatttccttcaagcaggtggtgaggttatctttgttcctgttcctgaggactctggctaggaatgttattgtagcagcaagctaagtgccatgactgcatataagccagattagtgtcctcctcaaatactgaattcttgtaataagcaaaaatattaccaattttagcaaacaataaatattccaccatgatttttcctgatttctaatccagatgcagtaactatctttgaccagtaggtggtgcaggtgctcagttagtctgtgtggcatttggcagtggttggtcaggcaagattgtggctgcagtggagagaggtcacaaaggcagctgtgcttagcttcgagagtgtactgccttgcggctgcaaccactcaatgaggcacagctttatggctgctgtgcggaccctgttgaaagccaaggcctactcggcttatgggcaggaggcctcctggcacaggtaggcggcagtctgtgcccgtcccatacacgcagctagaaactgtgacagtaaccatgaggaggcctgtggaagtctcacacctgggcagacggttctgagcagctcagtggcagcagggatgcacttgtgtggtgcaacaggtctgtgtggcgcagctgggagcacctgtggagagagggtcctttcccagcctagggcgctgccccagtggaacccacaggctgttcgaaatggggcctatgtttacaatatccctctcctgacaaccagataatgtagaaaattatcaatatggagccaggtaaaaatacaatttttaattttataggggaaatttaataggggaaagccttacttacatagcgacctagtcagctggtggggcagcagtatgtacaggaagccaaagatcaaagcgaaagcaccccaccacataagtgtccctcactttagattaccctgaccatgcccttacaggcatggtcaggcatacctgtaaccagcccctaaggagacatggctacaacatcccctacagtggtgtctgtttctttccttgtatgtatggattctaggtcctgttccagtggttgcaagggggtctgatactctgatgggtctcaatgtgggtacaggcaagtctagggcacttgctgtccaggtggttgggagcaggactagcacagagatgtcatcagactcttggttgcttcgttctcaggggccaagtcgacctgcatgcagatcccaggatggaagttcccagagtgggctggcagaagttggacccaaggcaagaaccaaatcagctcacttctgccctgagtgggggctggagtagcccagtcattcagcagactcagggttgcatggtcctcaggggccgagttgacctgcctccagtaacacttttctgtcacacattttgacctaacaacagtctcaaaattcctcaatatcctcaaatattttgttactttttagggttgatttttttctacagaatgtaaatacagacttttatttctgaacatttatactcttgggaagattttcaagcctttgcaaacacataggaaactcgtaactgaagtatctttatgtgccaaaactttccaagttgtattctttgatgatatactttcttttcataccttggccaacacttcttataatcagtgctttaaattttagtcagtagttggatatggttttagtttgatatttgctggtattaatcgttacttaaaatttgttaattggttagtatattcactcattcatgtctttaataatttaagagatacttacatatttagttatattattgtttgttctaggatttcaacaaactatttcaagaaaattctcagttttatttcagatgtcaagcttgttggaatgaatttgtttataattttcagtctttcaaagtaatttgatttcccagagttattgcttgtgatctcttccatttctgaaatcctagtatgtattttctttttataatcagcagaactaggagtttcctgacattgggaactcactaaaatgtcacttttttcctctgcttaatctctttctatttattttgtatcatgtttaatttctgctccaaatttttgtttttccattattactttcacatttttgtgcttattttccccattcttttgtagcctaagattcaaacctgagttgagacttcagttttcttccctaatataaatattttatactgtaatttccctcttgatactttgtattttataactttaatatacttaaactttaagttatttttccaatccccttgtgacttcattttgatctatgaattatttaatacgtcttctgtaacttagtattttaaagaaacttagtaattaactataattttattttgttttcatttgatatttataattttccttgccttcagactttttcataggtggccacatacccttctccagtgaaaatatcacataaaatggaaagaaagatgtattaagttattttggattgagtttcctttaaaagccaattaggccaaggtgacttattctgtttatcttgttaggaccacagagacaaacagcttacacaaatgacattcacttctcacacctttgcatgctggggtcggggggcaatcagaacatggagtcagaacagttggtctgctgaatgcaatagatttcctttagagaagcccatcttctccttgtgtctatgcagggtgaagcagagataatttctcgcctgctttagtaattccctcatggacaccctaccctcataacatcctataaatataattatgtacgaaattatccatatgcatattcaatcatacagaaggttttgtatttttactgtgaagtttggtagaggacacaaacattcaatttataaaaggagagatcataactctgtattttagtgatgttacagaacaatttctacttctacatcatttgatatctttacacattgtactttgaatttcacttgttagtgaagatatttaagatagttttagtctttctgatgaatcaattttcattattgagaaatctctctctagtttttgatagattctttgtcaagaagcttactttatttgatatcaaaatatgacttcatgtattttgtaattggttagaatatattgagtttgaagcccacatgcccatccctataacagtaaacaaagagcagaaaaacaagacatactcccactgtgaaaatctgaagactgagaaatccatagccattgttaagagtagcttatgagtatataaacttgcataatttgatgatactctatgacttttttgtggagtgatatgaaaaccattgatttaccccagatagggcactattaacagtaaaagaaaagattccaacaagtctagtgtagtgaactgattggagttacctacagaagtacatgatgataaaagttagtgaatagatgaaaagcccattccagggatgattcacaaaacctgaacttctgctgtcccctacatgtcaagggggaagtgctacagttttgaaaatctcctctccctagaaactaatgctgcttattagcctggagtagagtgggtgccttgtgaaacctgtaaatttaatcctattcctcagtcctgtatgttttatttacttcctgagtcttaaagagaaaccttcctaaagagactttttcaatcagaaaaaaaaaagctgtgtagcaaacaacttactctgtgcagtttctttccttatcttcttgcctcagtcttccacatgataggataacagaaatgtaacattatgcccagtgaactcatgacaattttttcaagatatgttgcctggggagttggagcctagatctataacaccatgagaatgagaagctccgtgtcacctgtggttttcatctccacctattgcatgcttgggagacttttaatatttacaatttagggatattggattattaatgacaactaaaatatgagcaaaaggaagtgaaacacatgccaaaaaccaaaaatgatattatctatgttttgaaacaacatgaatgtatccctactgaattctgtacttaaaaaagaagcagtttgtctgctagtcaaccaggctgcaagattctcccaaccattgtggcctggctcacttccttctcttgccaactccttacatactctgctgggacctgtccactgatgtggatgcctcctggaaataaaatatggtggacaacttattttcagagctagtgatagaaacaggcatcatacaaaatgactatagcatttccactggtttggaacaattttcattttcattacagaaataaattatgttacatatcctgaattatacttaaaagcatatgtgtttgtcatggagatatagtacatttaaaaagacaggaaaaaatgttgggggctggcatagaacatcctttaaaaattattaattttactttatgccaccaggggaaagaactcttgagatttccatttatttagtctctacttttatagtgattttatatgcatatatactattagtttaaattttggctttttatatgggctaaaggggtcccattgatatattacagtcaattgttgtcagcactgaagggaaggatgtaattatatcactagatccaagataaatgataaatgggtgtttattgaggaacaattacacagaaaaatacaaagaaccacatgagcatttctctgctcttcctcgcagatccactgacccaccagaaagagtgacctgcttcaagctcctctctttctgcttccatcagcctaaatccacacccaaagaggtgtagtcactgttagaggtccacaggccagatgtctacaaagcactatttgttaatatctggaacctgatagtatgaccttatggctgaagacaggatatactagtatcatcaaatatagagaaactgagctggagcctaaccaaaagttttgtctttgcagactatcattcattgtgctgtaaggtatttgtgcatgctacttaaggagaaaaataatcatcagtttcatacaactacaaacccagcatgcaacacttgggacccgtatgcaaaatatactgatacaaatagttgcatgcaaaacactttttgatctgatttcatttaaatttacatgacatagaacccacacctgacactattaatgaggtaatgaatttgaaactaggtaggtcatgggttctagggggaaatctatttcttttattctattaaagaaacacggtgataaaataactcctattgatatataggagtttctatgactatagatccatttatcattcaaccctagtcagagaagtttcttcttgcaatcgatggtgattaacagagactaacaactgggcaacatacagagagtgagagcccttggatcacacatctttaaatgcaatatttttatcacaaccatccctcatgactcaaagttctctgtagaagaagaaatataaagactgtaagtaccacaggtagtgggtgactccaaagaaatgacattttccagacaacaggtctgatgtatacatgaattcacagagactgagagcgagaacaagttgataaagtcccaatatggagaagggagagagtagggacttgttgaagtaaaattaccatacacaagatagggatgacatggttaattttattggggagaaatcatttacatgagaaatagataacccagggtcagtgttcccaagcatccaaactcagctgctctctaaaacctgaccagaacagagagagagagagagacagagacagagacagagagacagagacagagacagagacaggcagagagagagagagagagacagatagagagagagacagagagagcctgtcctcccctcaggcctaaatcccacaagccctgtaagctcctgtggccaagcccaaacaggtgtggtcaatgccacaggtacctagtaagatctctccctacagggacttagagccatcactgaccaaaagctgtttgctattgatatctgctggcaaagggaaaattagttttatccaatggagatgcactggatatatcaaccatactgaagagcaggcctcatctttttatttttggtggaaacacaaagaacgtaaagttgattggtttgggtaaggatctgacaagaattgttagagaggaaacaatataaaaaatattttgtgtgaaaatttttaaacaataaaaactagaaaaatggctaacatgttttgtcatatacatacatatatacatatgcaaacacagatatatatgcatatgaatacaaatttgttttgccaagtgtggtacagaagctgattatctgagatcatctaaattatcattgcaagcatcttgagcacctgacattagaaggagtaagaactgtcagtgctgtcagtgatcatactatttactacaatatttcctaataaaattatccaccagatactattaaatgtaaaaatgtgtgagcatttaaagctgatgtccccatcagtagttaccttgggatgagtaacacacatagtacagtgaacttgggtagaaaagcctactagacatggtatctctaattggtcacaaaagatgaacagaaaatggctacagtgtagtccatcttgtaaattttggacaacatacataatgtgtttatattcccaaagtacagaaattaattcattcttccagttgatttgttgagattatagagactgtgtttggtgtgtcgttaaaaaaggaaaatgcaaggccaaaacttttaacataacatggtactgaaatgaaatatattcccttatttcttcacttttatgctgtttattttattaatttagagaaaaatacttgtagcttgtttactatgtcttagactatcatattttgattttttaaatttcagctacactgaagccatttgatattttactatctttgcaaaaactaaagagatttataatggacttgcagtcctggcaccctttctggttatgggaaaactggtctctttcctgactcacatctatggaacagacatcaatagatggaaataattcgttgcattcattttccattttagttcattttgaaccagggggacaatctggccaaccataacaaacaagccaggcctgtggccaattagaaacactgaggattcttttgtgttattggaatcttaccgtgatgccttcttctggattgaatgtctcaattactttgtttagtttcacggaactgtctttgttcatatcttatcaaactgcttatttctccaaaatgaaattgagaggattactacctccatcatgatagtgccagaatggctctcaactagaaaaccaaattaaataactgaactgactgcctcaaatactgaacatcacaacagataaagcaggtttgtggttcccgagggaagtaaacaaatgaagtatgagctctcattgtccatagtcatttcctagaggcagtttggagtcacagagcaaaagcgacagtcaacactggctgtctcaatgaatatgggagatcactggatgctgagagagccaaacagttcaattttgatatgagcactggggtgaagagaaaagactttcactgagagcttcagagatctttgcggagggaggatattcatttctagccattgtctgcatactgatctgaggggtgtgaaatgaaattgctcactgctgggaaagaaacacaagaaaccagaaatacaccagatcattccaatagttcatgcagtgccaggaatagttatcaagtccttccacccacctttcagaatagaaagacttcattgtattatggcagaagagtggagacttgagagagagagatttggaaattggtaaacgcttgggtaacaagatgacactgagcaaaggtacttggcagcaatccttccgatttgagttttaactgacatgtgtcctcttatctggacatgtacactggggtgtccatgcacatatgcacacacacacacacacacacacacacacacacacacacacacacacactattaattatgcaattaattaaataatcaaaaagtaactatacaaaatcgaattagcagaaaagactaaatgtgtttcccaacctggatttcacacagcaaaaacacacgcacaaagaaagcctctgaaatactaacgtgagagaagtggtcactatttcaatgtcctagaaagattcttgcagctagaggctccacacttctgagccatgctcttggctcatgttactagcccactcctggtttgggagttttctccctttcttagtaattggcatctatttctatgtctatttatgtttttgatccaagactgcctggaacacaaaagcctggaaaattgtcaggtgtttaaggacctttaacactatgtgagtagattcttcaatgtgttcactctcgctatggggttaaattcactctgtgataaattctgcttcatacctactcttacaaggaaaactttagtttgagcaaacttcaattcacttaagtatgatttcaattaagttaaatgagcattaaatggtacctttagtcccaggtcccaggaatggcaatatctagacatccaggagccactcagagcatattatgtgaactaagtagagctaagtgcaggatagactttcaggaaataccataaagtgtagtttcctgtgagtttctgaaaatgtaacataatttaacaaatagtttaatatgccttagtgcatattgtattttatgggcaaatgcttagtagtaatactagaataaagcattatgagcaaattacaggagataaaatgaaaatccgtttaaatagaagaaagtaaaagagaggctaggatataacaataaacagaaatggaaaacaaataataagattgttgagataaaactaatcaagtctagagaaaataaaatttccaataatttatgaatatcattaccagacatttccagatccacaaaaccaaactaagaaagcattttcagaataggtgaataaagcacattctcaacacaagaagagtaaatgtttctgggctgggaatatgctcagtgcagtgagttgctcaagtcatcgaatacaggtcagaagcagaattaagattctgatatcccacatagcagactgaaagactgggggatcacatataactccagaaatgagaaaactgagacagaatgctgcatagctaatctagcctaaactaaaaatttctgaattcagagagaggcttcagtaaatgatggagggagaaacccattgttaactttgggcttatatacacatgtacagaaattggcatgcataacccaaaaacatatgcactcaatcatttgtgaacatgcttaaacatatgaatgtataccatgcccatatgcaaaaataataaaaataagtgcagcaataataatgaaagaatggcaggcaagcaacatgagttttatacgtgccatgggaaaggtttgaagggagggtatctgattggagcttgaaagagaaaaggaaggagggaaagtcataggattctatttaaattaaaacatattaacaacaaaataaaagaatggtaaatatttatagcatgaaaatgatataattttatgtcaactaaaacatattaacaacagaaataaaagaatagtaaatatttaaaccatgaaaagaagtatcccacacaataagaatatatattttacataattttagattatattaaatatatttacatattgatacataatgaacacattagtatgtatataaatacatgtaaataaacctttatgaactacatatattatgccgggcattggtggcgaatgcctttaatcacagcactcaggaggcagaggcaggaagatctctgtaagttcgagaccaacctggtctacaagagctagttccaggatagactccaaagccacagagaaacactgcctggaaaaaatagacaagaatgtaggcattaaaaatgaaataaaatcaagtctactaagagaagcatctagtaaataatcagctgaggctgtcatcattatttagcaattacagtttcacatagctgcaatgtaacacagatgacaaaatcccagccaggtgtaacacatgttcgaatgcactaactgacatttaaagaaagtcatatttccacatcatagctggatactctagcatacctctaaggtgacagagaatccccacaccctgctgtatgtttataacatacttctaagacaatagagaaaacagtatctcattggagacaaagacagcaaaattaattcacttaaccaatatggcatatatgtacattctttgaagtgaaaccaaacacacttttttatgtgaacaaagaagatgcataaaaagtgactgtgttcattacctttttgcttttatgaccaagtacatggcaaaaagcaatttctggaaggaggatcatgctttgaatcaatgtttgaaagaatgcagtccctcatggaagagaaggcatgagtgtaggagagaaggccctaatgattttgtgcctccaatgaggaagcagaggtggaaaataagtagagcttggtgatcaaaccactagccttgcccctgtgatttatttccttttggaggataatgctgcttgcaggttccatcctcttccaaaagagtaccatcagctgggacaccaacatgtgtgtatgtgggagacattgcacactcaaatcacaacagcgaccacatagcaaatctatgctcataaagtctggttttgtaaactttcagatatcagaattcagagtaacttctctgaattgaaatagaaaataataacaaaccatagaatttatttcccctccaagttactaacttggctgtgcataagctcacaggtcagtgtagataactcactgcatgtatttgtactaaaataatagtggaaatacatgaaaagctttagataggaatcaactttttcaaagattgtacatgttaaacatccaatctctcctgctgattccaactaagaacccaaggggaaaaagaaacaaaagctagctgtatgaggtttgtgaaagataaatcagagcagcagatggcaaagctgaatcaacagtgggagaggtataagaatatctgaaatgttatctatctgaggaacgctttctttctgaatgttatacaaagaaaaaaaataaaatcacagttgtctgagaaaataccatcaggtagcaatatttatttacaatagatttctgtgactcaacttgtatttgtaagagcatcatgtactctctctctctctctctctctctctctctctctctctctctctctctctctcttaaggtcatatgacacgtgggagagaaagccaaacagaagcgttctctaatttatgtgaggtggcacactactcatttatagggggctgttaacaaactcattattatgtaatagtatcttataatcattaaaatattaaataaaatactgatgaattggtcgtgaaatattactgaaacacctcctaaaattactaaacttctcacaatttacagcttataacatgtttctcgatagcagttagcatcaaaatgaaactaatatcacataaggaatccaaaagttgtcaagaaaagaaagatatgtgaaagtaaaataagtaataccgtcataaataaaattatgaaaattaaaactatgacaatacagttcaaaagccaatttttagcttgctttcttgaacactatttgtatgcagtcacctactaaaatgaatgtatcataaagagtgataaaaaacaacaagtttctgttttgtgtaaaagataaaatttaaacaaaaataggttgagaataaatatacagaaacaaatattgtagagtaagtgtatagaaataaatggttttgttaacaatggatagtagatttcaaatctatgtttagatagacaattagtcaagatggatagagtaattgctaatgtttaaagagttacagcattaggaaaaaacagatttataataaaaatccttaataataatagaaaattaaaataaatgaagtttaaaaatagggataatttaattatcatattaagaaatttaatgcattctctcactaataaaaaaacactcaaaaatcaacaaatctggtgagacttttaacaacactaaatttggttttgctcttattgatatttttagatcattgctttcaaaattcacagaacaaacattcttccaaacagacatagaaaattgatacatgtccagaccatgtcaagccaaccaacaagctttgatgaaaactaagagttacgattacctagtgtatgctttcttaacaagaggacctaaaaatgaatttgattaaaagagaaaaaaagtacactgagaaccacaaacactttgtcccaagcagtgtcctggggtgttttacattgttaatattgctattgtgttgggaatatattttggtggggtgttagtaagaaaactagtctaatggtttaattcaaatgtgctagtttcagtttgtataatgacaattcaataaagctatgttttataaataaaaaatcacaggctttatatggcctagagtttcatcttagagttaggaagggattgatctaaaactcttaactttagatgtgagtaacccatcatgcctgacttcattgtgttgagacctctgagagtggcaagacctttcagttggaaacagttagccaaggctttgggtttagacttactgagtttaggttcccttcaagacttgaccactgataaaggacataagtgtttgaagttgtttcccaaaatgttataaatgagatatgaacagagtgtgtatcaaatatcagtaaatggattaaccattgtaggatttgtagatagagaagtagctggaactacataaaatatgcttattatcccatatgcaatacactgcttggcagtatgtttctgtctgttaccatagcaaagtcatttcctctttgagatcagtgtgcttgctttttgatagagcaatggtttaatagaggtgataccattgttagggctaagattcctgaaccttcttccctgtcaaacatatagggagagtccaaatacctatctgtctcacatttatctatctctatatctatatatcatctatcatttaatctattgtctattatctattttgtgtctacctatcatgtatctaaaatctatttatttcccatctacctttctattatctatctatatcatctatccattcattatgtttatctatgtgaacctattaactatctctgtcatctatgtgtctctcatctctcatctatttctataggtggggctaggaaacaaggagaattctgggaaaggagaattcagtggagccagccagagagttgttatgtagaccacaaaagagtaagatgtccagacccttctccagtaagataagaccacatggaaatacatagattaatagaaaagagttaataactaagacagaactagccaataagaagccctagtcatcaactgacagtttaataattaatattattttttgtgtttatttgggtctgaaaaaaggatggcagacaagagcagcaattacctagctatgtatcatttatctatcagcatccacctattctgtgtataccgttgtacaggagaaccctggttggtaaagactattttataaacccatctactaaagcgctaaagcacatgcctatgctggcacttgcacatgtatatgcactgagccaatgtattcacctacatcttctaaatacatttctgtgagcaaacttcctttagaagttttatttcaacctatgtgtttcacagtaatcccttctttttgaataccaaagtgctttaagataatagaccccaagaattgaggataatcagaaacaaacaccacatttgatctggtaattatacctagattctagtaaattatacagtgtggtgttttaagttaagaatattcccccataagcttatacattaaaatacttagccttcagggggtggcactaattagaaggattaagaggtgtggccttattgtagtaggtgtggctttgccaaaagaaagggttcactggggtgcattttgagattttaaaatctgaagccaggcagactgtcactttctcttcctactgtctgtgaatccagatgtagaattctcagctacttctgcagcaccatgtctgcctgcatgcaattgcattcacttccatgaagtaaacttccgattctataagccttggtcatggtatctcttcacaacaataagatactgactgggagagtgcctgtattatgaagaaagactatagccaatgacccactatatgaagatgatagccataaactatcaactaatttgaatggagaagactcattatttattctgtgtagacaacatttctgacaggaagaaacagcatgttaccatagatgtgaacacactaggaagatatattggtatttttaaactggaaatccctagccagtttctcttcttggctttggcttatttttaataggattcatttcattcttggtgacacaatgcnnnnnnnnnnagatgtttccgtgtctgggaggcaatcacttatcaaataaattaaattcctactcattttctgtacaacagctcaaaagcatgagcatctgtgccttgggattccaagggactttattacaaatcagaacaggaaaccttttaactatatgcaatacattttgttgaacactaaaatatttaaattatgatagggttcctttcagctataaaacacttaaggatatattaggaataaacaaatgtctctcatttcaattatcagttacatattgagcttttttttccatcaagaaaaaagcaaattccttatattatttcaactttgatttcctctgcctctgaagatcactggagcaagctaaacactatgatgtgtgctactaggctatttccttacatgcataatacaatatataatataggtgcatcagttattggttgtaaagaaaagcaagtacaggattgttttatgatagttgttagggctaattgtttactccaaacccacaaatgagcagctaccatacagtgaggctttgctacatcaagagagagatacattatcacctacattacagatggaggggttctgctcttgggatatatgctattagaattaaaaaacaaaacttcttgatgtcattgcaggagcacaattgagtatgagacagctggtatgctctcttgtttcgtgtgcttttgttcaatcgactgcatagggaaacaaaggtagctaccgtttattaaatcagaaatacacaagatcttggatgtgtgccaaaaagcagaaaggaccagtggcctggctccaaaacagcaaaggaagtaagatgcatcaggtatgcaaccttatgtatgtaatttgcatagtgctttcctctcccatattcctatacaggaaattttttccatcaggctccctttcttgagtgatgcctcagcaagcttcatcctgcacccaggtctctgtatttctatctcagtgtggtgttgggagatttatgtagcactcccttttctctctatctcaagttgctcatggtcccccggagaaggggaaaggggcaagatctcctgagcaaattgggagaatggaggaggggagggggaactaggagaatgagaaggggggaagaggatggatgaggaggatatgggagcaggaaggttttgtaaggggaagaatagtggacagcaaaataagagataccatgaaagagggaaccagtataggtttaaagcgatatcaggcactagggaaatgtacagagttctaaaaggataataccaactaaccatctaagcaacaatggagaggctacctaaaatgccctcccctgataatgagattgataactaacttatataccatcctagagccttcatcaagcagctgatagaaatagaaacagatacccacagctaaaaactgaactgaactttaatccagttgcagagaaggaagagtgatgagcaaaggtgtcaagaccaggctagtgaaacccatagaaataactgacctgaacaagagggagcccttggctcccagactgatcagtggaaaagcagcatgggactgatccagaccccatgaatatgagtgtcagtaaggaggctttagaaatctacagagcctcttgtagtagatcagtaatttgcatagtataggaatggactttgggatcccatttcacatagagggatacactctcagctgagacacacgggggatggcctaggccctacctcaaaggatatgatagactctgaagactccccatgcaaggcctccctctccctagagagcagaaatggtattggataagtagggtgtttgtagtgggcaggggaggaagggagtgagagagaatggggattgacatgtaaaacaatcttgtttctaatatagattaaaaaattaattaattaattaattaattaaaaaagaaagtttccaccaggtggcttaatttccttcagggaaatttgagcttttgctggtgttagaaatttgctggttatcttgttttgtgctctgtctcctcccttccatgcttgtttcagaagggtatagcttagttagctacattccaagttttacttgtttgagcttaactcaagtgtcatcaaaccaagacaataagagggacatattggcaggattacttcagggccagggtctgtaacatctttcctgttagctttaaaacttgtggtccatgttcacaattattcttttctttgtttgtcagaaacacttgctacactgttagtcttacttgtataaacagaaaatataatattattcattgataaggacagttaaagtcaaaactaagccctaaatggatgcaagccataacaagcgaatgtggggctaaatcttggtttaaaaccacattctggtctttcaattctaattattcatagatgtttccgtgtctggatatgtcttcctgaactatttgttttaatggtggtgagttagacactataaatatatgtgtttgtgtgtgctggtttgttattctcctggctggaggccttttgctctgccctgatggattcatggggggtgcatatataagcaaaagcttccagaggggatctctggaagcttttgtttgtccacatgcttgacaaagaggaattgacagcacagaccagaatgagtcctgggatgcagcgccctctagtggtgaagttctcacgtgggccttgcaattgcaacccttagctccccttttgttataggccctataaaccaaggatgccatgattgcttaggcctaggaagcagcttgtattgtagtttatgtacagggttacctgtcactgtgattttccaggttttcaaagggaccagtgttatatctcctgatctgcagtgtttgaggctctcggctttgaagtcttgacagttttctggaagcctttctacaaggtgctttgtagtttctcttctctggctttagcttgccctgactcttcagcctcagctctctgttcttcctccttccactacccctcttgcttctgccctgcacctcctgtctatttgtgaagctatttagccttcagctgtcaagcagtcactttgcacttttgtagcttggccttgctgatgactcagttgtggctaacgcttcacaccagcccagcatgcactgctagatgtacaagaagagatcctttgtagaagcctttgattgcaaaaccaaacgggtcagcccccaaaactgacttctaccacaggaccatgagcctggtcatagagccagaaaagaattgttaccacgtgcctcacatgcaaatgaaggctcctgttgcaccagtcaccatcagagctcttgcaatagtaactgcagtctttcttttaagtctcccagtggtctacatgggaatgcttgcagagtcatctgccgtttcttacaattacaggaggatggtgatagcaaaaatcccgggacagacaatttaaaacggtcctcgctatgtctgcaccttcgggatctgggaaaaccagctaaaactttatgtagttttcatttcaaggtttctgtaagagttaagaatgctaatgctggctaaaggaagcccatctggctttcggtttactcttctttccctcccaaaaaaagcagaagtggaaaaagagagaccacaatatgccaacttgagaaccaaattgcctaatctcagtgccattctgttggtggaagcataagcaacaggagcactcacagtgagagcagagggatttagcagcaatgaggattttctttgacagatttaaactgcctttaaaatcttttcattatgccagnnnnnnnnnnnnnnnnnnnnnnnnnnnnnnnnnnagagcatctctctcctgaactacccatccccactttcaagcaggagaatcagctgaggttttcccagcctgggaactttccacttcaacaggacttagctttctcaacaagttagcaaagtaactcgactttaccaaggcacagagggcaaatatgtgtcattgtaacagtcttgctaaggggtcagaggtcattatggcagtcatgcaacaggccaggggactctttgacagtcttaactgatgaaggtttttttcctggtttatatgccatgaattcaaataacatttttgttcagtgtcatgctacttttactaagattaaggaaacctctcaactataggacttgctcagtcaaaatcctggaaagatacataccagtaatctatgctgtttgttttatgtctctggaagatgaatgaactgacattcaagttgctgtcagctttatttttctagactattcacctaccttaccagataacactttctgactcaggagttgtgaaggagctagaaaatggctttgtgatttttttctggttgctcatgggcttttcttctactatttcattttatttttttccagacagggtctctctatatagcccaggccagacttgcaactgtacacctgcctcagcatcccataagctaatagtaccaaccaagcaggcttgtctctgcttataaaacttgaaagaattatctcagaacataatggcaaagctttgtctagtatcaacaatggacatatctgttggatgttttatatgcgaatgttttaaccacaatcccatgtgaaaaaatgaggtagatttctgagtgtagtgtgacaaattagtgcagacatgggacaaaattccctcagactttccatctatatgggatacttcactctctgtgaaacactacaaatcaaagcttgacttggggatgacctggaatactatgttactgaatctttgatatattcaagtgctaatgacatcatagtcaacagaacatatttcataccagtattttagccacaatcattctgtcatgactttgtctagctcaattacctaactggaaaatgttgaaatagcatccactttcccattcttcttcagtcactaagtgaggactatccccttgagaatgtggcctagaaacaggcctaaatgaagagagaaagcactgaatgccttgcaaattcatataaaatataattggtttaaggatataaaactgcagttggataagaggcatggactttgtgaagtcttgaggtctactgagagcatgataaatgtggttgataacaatatgctatattttaaaagttgttagtattctttaagtgttctcaaaacaaaaatgatgaatatgtgtgatataacatgttaattggtttaatttagccatgtcattgtgaacatactgtattgtgtatcataattgtgcatgactttatttatgagctaaatagatgaataaaaaaaaaggtactttgagagcccatcccacatgacgtggatgctctcatccaggattcatggggggagggcctaggcctggcccaggatgaggttgtggaatttggggagccccgtggagggctctaccctctattgggagtggagggtggaaggggatggtgggggattggaggggggagagggagtgaaattataatttgtaaaaattcaataaaaaattaaataaaaaaactctgaatgtgtaagccatccccaactaagtgttttcctttataagagatgccatggccactatttctcttcatggcaatagaaatcctaggacagtaacaaactcgtagacttgtctgttacagatttcatacagggttgaggtaggaagatccatcctaaaagttagtggtacattccaatggtacggaaactggaactgaaaaattaagtggcgagtagttcattattacatattacctttacatgtgaaatactaccatagtacaacattttgagcacttagtctctacctactggtgctttatgggggaaataaaggatacttggggatgcatgacctaactataagatattgatcactatgtgtctttgaaaactatgtgcagcctttggttcctttatctctttttgtttcaagtctgccattaaatgagcagttaatatcaaatgtgcacactaccacaatgtactgactttactacagacatagaaacatgaatccatttttaaataattccacaaggtagtatatactagcacaatgaaaacaatgactaaacacattcaatttcttaaataaatgaagtattttttcattaaaaatgaatgaacatgaagaactgaagccaatcattcacaaagccatcaccatatttctaaaaattatttttcatgaatcacattgtttaatatattattgttctgaagctagtacttagattacttttaagggaaccatatatatgtcagatagtacatctccatgaattaaacttttatgtaacaatatgaagtctccaaggttttatgacatactttcttccatgtaaatattttaaattcctttaactataaagttttataaaaattctagataagtggctgagaatttttgagggacagcaagtagactatggaagaaacaaaatctatttgtagtggggataaaaagatcctctaaagaatgctgtatagcaatgaatcccacagagagaattgaaatagatatctctggggcagaacagctcacatagccataggcaaaaattctgtgaatctatctgagcaggtctattttatgagagtggatgttgcctgagatttgtccttacttccaaatgtgcctaaattatatttcctttgtgttttcagtggaaattctccagagagaatagcagtgatttagaaatatatattggtctcattctgttttcatattttgtgagaatttactgtaattaatagaaaaattcaagtaccatgtcatcctaaatttacattcaaaacaaactaaaaacttttcgttttatgagttcttaactaatgtacacctcctgaaacccagaatttgataactgccacaaaatcgaaaaggaagtctcagttctgagtgctgcaattaaatggttgcctaatagtgaaggataaaaatgattgctttccagatattgtttcttctatattatttattctgagacacagtatcaaatattccagactagccttagacacactatgtaataaatgataatcttaaagttctcatctttctgtttgctaccaccaagttttgaactgagaactaaatgaccttatatacagttcatactttacatgaaatggaattcaaggcgttgtacatagtaagcaagctctttaccagtcaagctatatctccagtccctggatgctttatttcaaaccacatttttgcatcaaataaataatatatatgagatgtacatattatgtgtccatatgtaaagactactataccaaatacttagtatataagattaattttcattatttaatattttcattatttattataaaataatagatattataatatttgtaaaaaattgacaaagtagaataaccatctcttcataatcctaaaattttaaggtgataactgttaaaattgtaggaattatattttcaaatacttgatgaatttttatgtaaatgaaattatatttatacaatctttattattttattaatatcatattgtaatcatcatttgtactatttaaaaatgtttctaaacaatattaaatatctacataatatcttataaacactgcataagttttaagtattgctttagcattaacatggtgttggatctgtttaatgttgatgtgtgatttttttattcttgtttataataatgtataaaattttaaagacataccaatatattttaaaaaataaaaaaaacttgtaatattaacaaaaagctcagtcaattaaaaattacaatcatttaattattttttatgattaagcggtgggtcctttggataatattttcactaaagagtcagctatgcatctttcttagctctccatctgaacagggaatggatacatttcaaacagcttggactatattgcactaaacttcctctataaaatgttgtattatttaacaggctagtccatgatttagtccagggaggaggaaatttcccaattcttttgtgatccacattctggactgagtgttcaataactgtgttttagtttttgacctaagatatctttgatcacgaattcagtccaaagtcaaataatgaaataaagacaaagaaaactcttctatatttgatgaatatgctgtgatgtcagattgtaaagcattactttttgtgaattcctgtcttatttattacattttcatcagttatctaaaaatttcatatattgtgttttgatcctattaacctcctcccctcgccttcgaggttcagcttgtgaactttgtatccttattttaatttgtttgtgtgtttgtttgtttgttttgtaaatccatcaattctaatttgtgttacccatatacacttggatatgtggtcaacttaccagtgaatacactcttaaagaaagtatattatcctctcctgcatactattcattacttatatttcctcagataggggtggggctttatgtccactgtcatagtcatttctctattgctgtgaagagacagaatgaccacagaagttctttaatttttaatttatttaaaagtttttcattttacatatcaattaaatttccccctcccctcctgctgctcctccctccttcccaccatcagtcccccatccacttctctgtaagggggacctctcatggggagtcaacaaagtctggcatatcaagttgaggaaggaccaagcccataccccaccctgtatctcggctgagcaaggtagtccttgctacaattcataaaatcacacaactattatatcattaaataactcagaagaattaaggattcttctgatgagaaaaccagtacaaaagttgtatttggcattataatcttgtgaatgaagtggctatttcttgctttaggttcttcctgtgccttattcctttctgcaacaaacttgggatttacttcccatagttcagcattatctgatcatttactgagattaatttttcccatgcatttgtagtttgctgattagactccatagctatgtgtaaaacctgctccccattaacaagtgctagtttactgattacattccttagctatgtgtgagacctgtttctcactatcaggtacttgttcccctctccattgcaattgcagagatctgccttcttgcacttatctttattgacaggcatttgatcagtgtttagtgcataggcaaaaacattccatctaagacattcccagatattcaaggatttagaattattacacacccaaagttgatccatagctgtatagatggaccaaaaattcagtatgccctggttatacctcactggcagataaagaagcaataacctaaactaaccctgcactaaaaagattttcaaacttcttgttttattaactcaagattttagcttagagttttactgctccctcctatttgccctgagaagataaagacaaaggtaatcagtccatttgctctcctcaaggaaaggtaactttgctgaatgcctctgccacaactgaggccagagcactgcagtgcaccaggtgttttcttgtaggaattaaacttagagcctctctttgacttatagccctaaccaattgatgctaaaagtttctcctagcagttttagtttattgttctctatgtaaatcttatttgccttgctgaccttgagaaactcaaacctcacattctactgcaaaaaataattactgttgcaaatgtgtatgtataactttatccccaagaactggggagaaagagacagaagaacaaagagaaacaaaaagagaaagacagagaaagataaagaataattataaaggaacatgcagaagagcaattgtgtgtgtcgattccttttttccctcagtttttagttcctttgcttatttgtagttccttttttttcaacccagagcaaaatattttagatgcaaggcattttaaaaattttgataattcctccctggagaatgggctccaaaacagtccattcatgcacttggaataaatcctggtccccctgtcaatgaccccacagactgcccaagccacacaactgtcacccacattcaaagcgcctagtttagtcccatgcatgttccccagctctcagtccagagtcagtaagctcccactagctttggtcagctctctctgtgggtttccccatcacgatcttgatatcccttgcttatatcctccctcttccctctcttcaaatggactccaggagcttggccctgtgcttagctatggactctgcatctgtttccatcagttactggataatggttctatgatgacaattaggatggtaataaatctgattacagaagaaggccagttcacagcaactcctattaaggaaaacatttaaattggggacatgtgtacagtttcagaagcttggttatcatcatcatggcagggaacaggcagcaggattgcaaacatggtgctagagaagaatttgaaagctacttgcatcctgatccacaggcaaagggaagtgggggagagagagacagagacaaagacagacagagagagagaggggacagagacagagacagagagagaaaaagagagagaaaaagagagatactggatcttgtttgggttgttgaaacttcagagcacacccccagtgacacactgccccaaacaaggtcacacctcctggtccttgtattcctttcaaagagttccagcccctgattacaaagcattcaaatatatgatcctatggggacattcttattctaactaccatatccacatcctctttccacatgagtatttaataggtattgggcttgtgcatattttcccacccatgctgaagtcatatatgcagctatcctgttgtatccaggggacattatttactcgtagtctctgctcttatagtctttctgtcccttgggtgcagagtatgtggtaaagatatccattttgctttgagaatccatcagtctcatattctgtgtgctttgtcaagttgtgaatttatgttttaatcactgaacacttggaatagaagcttctctaatgatgactgagagttgcattgacctatgaatataaatataaatcaatagaagtgggcttggaattcatttaaaaaaagatagtagtacttttctgcctatgagtataatctgtctagccacagtttctcagaaaagcatgtgcatagagaaagagaaaaaaagtatctatttaagaagtcagtatacccaatgcctgtctgcaatgtattagcattgcatatgattggtacatacaaaacccatcaatgagatcatgcttaccgaagcatgattctcagattgcatggatgccataaatcacagtggatttgaaggtttatcactccttaataagcagtttggtttcatttcaagtgtttaggaaaccattataggttaaatgttggtgataacctaattgacttacagcttttaatttctattttcaacttcccattcttgcttttctttgatagttctatggttactaatgagtttaaggtggtcaacaagaatgagcattagggtaaagttaagggaagacccttcacaagtatatctgggttgagagacaggcaaagaaaccctaatatagtaaccacctcctggtatcttttttgacctactctcttaatgggcttccagggaaacatattgcctattgcattttgtttgttcatttttattttattttatttttcctgttattttttaagttcttctgagttggcctttcttttgtagaaattctcatccaggcacatcttcaatattccatttccccagggtgcaatatctaaattattctctcttctaaagcatgtctctttgctgagattacagtgcccatttttacctttatatttatgttagtcttgacatctttcagtttctgaaaagtaaaattcagtgtcaattttatgtcccatctgtttgtcttaaatgctcataaaatttatcataaattgggaagtcttaccagtggctacttttcaagtcactgcttaagtatagcctctttatcatcccccttctgtcatgaccagaaaggctttgctccgtgcttaagattttttacccactctagctttcagtcatggctcttgtcagcagcattgccattctcttatgtagcaggtttcataagaatcacatgtgtggaattttatagataggcacactactacctatactatttgtaaagcaaatcctaaaaatttatgattttatacatgtaaatattcttaaatgtatattatgaatatattgctattttagtatgttgatatattcttaatatgcttatatagtgaacaataaggagagcttaaatgaaaggcaaagttttgacaaccttttgatttaatgctaccagagcatgtattattatatggcaagaaatcaatgtacattgctacagggtaaacaatgcattgaatataaaagtctcttctgtatatataaataggaacataaacatataagtatcaaattgtaaagaagaatgtgtattgtatgatttttctcataaatctattacgtaaattgttaggataaaggatggagaccggcaagaaaggggatgtagtaggatattaggaaaatgaagggcaaataaatgtgtaacaaaatgataaatatgtatgaaaatatcattgtgaaacattattttgtatgctataaaattaacacaatatagttatgtttgtagcatgaagatagattattccatatactgggaaattttgagagaagcaagaatatttccatatttgtgtctatattcttaaactcttaaagttgaaaggcaaggaatggcaaaattatctgtgatctgggcatgacagaacatgctaaagtcaatgtagtcatgatgattaatcatatgctgatccaggattgattaactttccacaaactgtaaatatgaaggcttggaaaacaagacaggctttagattttaaaacttgaaaaataccataaaatcaagatggaataaatttttaattaaatgatccagtttgtaatacgttcaccagttgattgagatttttttcctttccatttatttcacttgattggcatgaaaatgtgtgtatggcacataaactattcaactctccataatcttctcattatgttaaaataaatcaagttattgtttgtttatagcttgtcatctttataaaaatattattacctccaccttttctctgaatataattaaatgaattatatacagagtattttacatacagtttgaatatcctgaggtcagtatactttgatgtgtgttactttgaaagttaacaaagaaggaagtcaagatatactgaggttagatactgtacatgtgaattttaacaagcactacagttttgataaaattaatctttaatgttttacagtgtttttatcacacagatgtcttaaatgaagtgtacttttttttttttttttggtttttccagacagggtttctctgtgtagctttggagcctatcctggcactcgctctggagaccaggctggccttgaactcactgagatcccttgcctctgcctcctgagtgtgagtgctgcgattaaaggcgtgagccacctacacccgtcctgaatgaagagtattttatggaacagaatttgacaataggaaacttacctttccttctcccagagactacttgatatttactgtcattgcatatagttttgtctcaagcctaaatcttcttctctagactaaagggggaattgtagtgatattttcaccctctgcacctgtagtactgaccatgcccttttgggtatgactggtcaaaggaataggagtggggctcaaagcctcttcaggtcacagaagcatcagtgtggcaaggtctgcatccttgaggctagagtggtgcatcagccacttgttccctatataagttcttttctccaattaaactccacttcattctactggtcaagcatcctgatttccatgcccttatcaatcactgttaaatgaatgatataaacattcaaatgaaaaaaatataatttgcagaaagaaccagaggcctcaggtgtttatatcaaaagtcatgaattggtaattcaaaaattaagatttcctaggtaactttttgaatactctttttcttgttaaaaatccctttctatatccattcattttcatatctaaagtgaatctctgcaaataagcacaaggcattattaggtgggagggaagtaatgcactcaatgtttaacaaagaaaggcctttttaaaattaagttaatgaatgctaacttgagtatttcccattaaccttccctattcccaaagtcccccatagttttcagctgtcactctgaatatgtctttcccaatgataacttgaatcacacttttggtagaatgccattctctctgacagtgaagagttggaaggcacatctcattaagagggtgaattccagagtgccaccagatatagcagacatccatcatatcatctgacaaaaataatacagagtataaccttgcatccatggaacaaaaatagtagtcttccatacatataaagacagaataagatagtatctttagaaagagaagctttaatctgaggtatgttatctgatcataaattagaaactggtaatttatagcacaatgtcaaacctgagcattcttttaaaaatatatgtaggggtgcttagttctaggaaccagcaggcaaacctaaggatgacttgaatctgattctcagtacccacatgtggaagtagaaaacaacatccacgggttgtcctctgatctccatttgcaaactgtgacacacaattatacacacacacacacacacacacacacactaaataattatgatacaatttagaaacaatattaaatttaaaggtgataattaaatattgcatgtatgcatataagctcattctatagaaaaaagccagaatttaacattttgatttgtgtaaatgaattttaaaaaaatagcaaatactcttcaaatgaatatgactgtcaaattatgttagggttctctacaggaacagtactcatcaaaagtgtgtgtgtgtgtgtgtgtgtgtgtgtgtgtgtgtgtgtgtgtgtgtgtgttagaagaatttattaaatcaccatatgttgaaataatcaatatacttgtttcacacctgagtggctgaaaacattgtcaaataccagtccaccaggatgaatgcctcagcagtcctaatctggaacagaaggcttttggaaaagcagctgacccctagtcaaagatggacatcataaaacattaattatcataccagtgacaaaaacagcaacagcagcaatggggaaaccatcttggggcaagagggaagagcaatgagcaaaagacaaataatcttccttctgtggtaccccttcctcatgggctcctgccagaaagttccacttgaatttggggtgggtcttcccatatcaactacagcaatcagaataaatctttgggtgagtctgcagactcagatgattctaatttgtaaaaagtcactattcaaaccagtcataacaggtaatgaaatcatacatggctaaatgcctctattattaaatatgatttctgtcacttacctctttaaatcacactttgcaattaacaacaattgttctcatgtaaatcagaatattgaaatttgtataagggctggcaagatggcccaggaggaaaaggcacttgctgctgggcctggatgcctagtctatccttatacaggataggagagcacactctctcaagtttgtcctcttaccttcatcccagttctattgcaagtattcctccagaacatacacaaaataaagacataaatataaaaaaatcattgactcgctggagaggtttgcataatgtctaatatgttttaacttcaaaactttagtaaagttaatgtatgatttgtttcctcataatcaaagtcattattcattggtcagttgcaggttttgaggagtgtccgtggagatgtgttcatgtgtgtgtatctggtacctttctcaattgtactctaacttgtctggtctctttttgtattttcccatgtttttgttattctttgtgaagacgtctctcactgaactggccagctagatccagaattccacctgacttggcagctagcatttccattgctgccattctggccagtgtttcacatgggatgtgcaggctgaattcaagttttataaagacggtttagttgttttcacagtttgctatctgtggtggacaaaggatcctgagctcttcatggcttaaagggcatgtaataaatgtccttggcctgacatcgcaactcctgcctcagagaacaatcatgttcactgtcattgttgccagcattgctgctttacacaacttattcattctgcttaaattgttacaataattggagccagggaaatccatgtaaaatgtgtgctccatattcagcaaaggggggattttgtgaaagggtatattttaaaactccaagaagatggcataatcttctcacttttaataatgtatctcttctattcagattcccaacaatgttgaaaaacatgttggaatatacagtcgatgaagtatattccagtatttatttgttgattgatattttatcattagtgtaaaatagatgtatgaattatttttcatatttgttacacagggttaaatattaaacagcttataaaaatgtaaatcatctccaatatctaagaaagctatttctcaacattcgaacacaccattcatactatttgtaggtatatcagtctgtctttgccagaggatacaagatagcataatactggattaaaacacaaaaatgttactctaaattgggtaactataaataagacaccattctgaggcttggtcatctaatctgttaagcacaatgatagtgtgactggtgactaaccctgtgctctgaaaatccttcatgatgctctataaaagagagcataacacagtatatgagaacaagaactgtgaagacaattttcaactgtggttccagccagaagagtaattaactgtgagattcccagccattacaaactgtgcattgtagggagtcaccctaaccccgcccaatagtcctggggcaggtaccaggtggacccaggactcgcccagaagggcgtggtgaaggaaagccaggatgacgtaaggcagcttcttaaggggctgcacatggggacgcgggcccctttgttctggccgcgctggctgggttcttaacctagctctggcctgtgtttcaccctgctgtcctctgaaataaagataccttaatccaatagtgcattgaattcccaatctgtagaattatctacttgcctacaccaaataaatatttacacatggatggaattgggatggatggctagtaaatagtaatgatgtatacatgtaatattcttaaccattaatagttgaattctacagaaactaacaattattgcttttttagcaaacatcatttaatataataagaatcaagtgacagctgctcacaggatccgaaatcggccggcaggctccagcacaaccagagactgccaaggcactggcaacagtcccaccaccatccacctacccatgagaagaggacagatatcagattattggaactgtttgcatctaccagaagggaaccttggtcccatacccaccagaagaggaagagactcccaccagaagaaaggatgggaagaagacaatataaaagcacattgaacaacagaaaaaaaatcaatgtgagaccaccagagactagtgaacatacaccaacaataccagaacatcacaatgcagatgaagcaaaagagaataatcttaaaaacttcttcatgaaaatactagagggcctcaaagaggatatgagaaaatcccttaaagtaatggaagaaaaagcaaaccaaaaaatacaagatatcaaaaattctttcaaggaaacactccaagatctaaaaaccaaaatagagagaataaagaaagcacaatctgagggaattctggaaatagaaaagcttgataaatgatcaggaactacagatgcaagcataaccaacaggatggaagagagaatctcaggagttgaagataaactaggagaaatagactcatcaaccaaataaactcttaagtccaacaaatccctaacacaaaatatccaggaaatatgggatactgtgaaaagaccaaacgtaagaattataggtatagaagaaggtgaaaaaacccaactcaaaggcccagaaaacatattcaacaaaatcatggaagaaaactttcccaacctaaagaaagacatgccaatgaaagtacaagaagcctatagaacaccaaatagcctggaccaaaaaaaaaaatccccatgacacattataatcaaaaccccaaacatacagaataaagagaaaatattaagagcagcaaaggaaaaagtcaagtaacatacaaaggcaaacctatcatcagaattacacctgacttttccatggaaacactgaaagccagactatgttggatagatattctacctacactaagagacaaagaatggcaacccagactactataaccatcaaaattttcaatcaatatagctagagaaaggaagatattctatgacaaaaccagattcaaacaatacatatccaccaatccagctctacagaaagttctggaaggaaaactgcaacccaaggaagctaactacaaccagaaaaatataggcaatagataatcccagtttaccaacacccaaagagaaaagggatggaaacccacacataatttcactaccaccaccaaatccaaaacaaacaagaatggaaaatcaatggtcattaataaccctcaatattgtcttatctcacccatgaaaagacacaggttagcagaatggataagaagacagaatccatcctgcttctgcatacaagaaacacacctcaacttcaaagacagagggtacctaagaattaaagattgggaaaagattttccaatcaaatgtatgcaagaaacaagtgggggtagcaatcctaatatccaacaatcaaataaacaatcaacaattaaaataaaatcagtcaaaagggatgagggagggacactttgaaagcaatggtaagaggaaagttcatagtgcaaaatgcccacatgaagaaacaggagaataatcacactagagaattaatagcacaacagaaagctaggagaacaatacaaagaatcaatgaaacaaagagttggtactttgagaagatcaacaagatagacaaacctttatccaaacttaccaaacagcagagggtgaacatgaaaattaatgaaatcaggaatgaaaatgtgaatacaacaacaggcctcaccctccctggagagcagaaatggtattggataggtagggttatagttggtgtgggtagggagaggaggggagggagtggggactgggattggcatgtaaaacaatcttgtttctaaatcaaataaaaaatataaaaaagagaaaaaagaatcaagtgacattagaataacaaaaaatacaaagtattgtttttcttaaaatatctttttcatttactcaaagaaacttaaataagaatgaaaaaacgggatagagaaatatgcattaaaatgagagcaagaaaaggggtaagagaaaggtccagtattctagcttaatctagccattgtgtaaggagctgcaaaatactgcgcccaaaagatggcgccagtttccgccctccgccagcccgacggcgagcgctctctgtggtaaacaaatcctaatttggtaaaggtcatgtatcttcttaattctgcttggagacaaccaatcctggcacaccacgtagggttaggtgattcgtagatgtagactatatcaggccccatctcccttggccctggggccgccaccatttacactgtaaagcaaagaggttcccgattaaactgtgttgaagaagattcctcagtgttgcgttgttcttgatggtcaagggtggacgccgcaccattgtaaaatttattcaattaaattcacgtaaggtaggcccattctcccatcagagaaggtctgtatcagttctggacatggacatcaataaacaaataatgagataccagctgattgaaatagtcacttcttaagctggttagatattaatgcttcattattggctttagaaattatgagattttaaaaaccacatttttattagttctttaagaattttatgtgttattatctgaatacattcatcacttctcccaaatcctcccataacttctagttccatagtctctttccttgcagtctaatttgagttttctcccttctcttcttccttctcctcttcttcatgttcctattctttcctacatcaagtacagtttgcattgctgagcaagtcttgggactggagcctgtccttgtttggggccaacctacctgttgtcacatcattaaagaaaagtgagtctccctatcagagcatctaccctatgccaataggtcctcagctattcatgcaattttgtaccaaatcccctctgctttattctggaatttttttctcccttgagcttgtacgggttttgctgttgtgagatttctgtgagttcatgtgttcacttgcccggttgagtctagaaaccataggttacttgatattatcatgttatcttccagttctgctcttcacaatctttctgccctttctgcaaagatactgtgccttagggagtgtaggggagttcttgtttgtatttccatttaaggtatgatcactccttagtctcttttttctgcacttgatcagttgaaggtctttgccttaattatcacctactgcaaacaagaacatctcagattagtattgagatgttttattatctatggttatagcagtaatctttaggaatggttttaataacatatctatttaggaatattgggttctgttctaaacctatgaccagtctagttatacatacttgacacatagaaaagttttaaagtttaaacactctagctttaaaatgttagagataaaacagaactattttctgttcgtaagtcacaactctctttagaacaacgcaaatcaatccagcaaaactatattcatctaaaaaaagaaaaaaaaccataaatcagttttcatagcactagtcactggggagataaggagagaaatttagaagagacaaagactaccgtgtaggatccatgcaaggcagctcaagaagacagtggttttttacaatggcaagagtgaaatcagaggaaaattgaaggaatgatgagacagaccaaactcagcctggcatactgaggatagggtgcttaattcagtgaatatcaaggaatataaagaggttaaatacaaacaaagtgagtataggctgagataacagtctcaagtaaatgggagagcatgtttactgagaattgcaccaaagtcttctttgtagaaaggaacaaggggtagagaaatattcaaacaaaacagacactgatgcaaagcacaatagacagaaaataagttgctaggtgtgcagtctttggtaaaatatcccaactagtcaatactgagtattataagacttgacatttcacctctatgagactgaaagacacaaggcaattacactgccataaaattaattgtgaaccaaagacagttatttccaagtgacagacaccatcactcagtgaacaaccacttgcattctaagtcagatgtcaactttagaaacaattcaaaaaataaaaagtagacagtggattaaggcaaaaatataaagtcaaattctcccaatattttcatgaagatgttgaaaaactgtaactaattctcacttgaactagacacaaacagatgtgttttctcccaattcctactggtaagttatgtaggaggcttcttaggagtttatcattagttgttctgttcacatctctgttcagtccttgtcaaagttagtcaccatttgagagtctctaaaggaccactttcacatgacatctaagtacactgaagacagactaagagataaggtccaggtggcagctagtttccatttaatatttaaagtgctgcaatttccaaattttctgtttcataatgcccagctcctatgtttttcaaactgtccacaaaagggagattaggaatgtgtgagtgcttttacagaattaaagtattatttatttccattataaaactaaagcaaaaacaaaaggatctaggagacacagagaaaaaaagaataagataatagagtatacaattaaagaaaatttttacaataagacgatagctaaggagctgcagagatgcctcagattttaagagcatgtaatattttggcagaggatctgagttaaccattagactaaaataaaaattaatatgattaagaaaataattgcactcctccttctgtgcaactcgattccagttcagttcattgtttagctgttgttttctgcttctacttccatcagctgatggatgaaggctctaggatggcatataagttagtgatcaatctcattatcagggaagggtctttaaggtagcctcaactctgttgcttcgatgattagttggtgtcatcccggtagatctctggacatttccttagagcctgatttctctttaaacctataatgacaccctctattatgatatctcttattttgctctcctctattcttccccctacacaaccttccttctcctttatgtcctcctcactcctcttcttcccttctcattctcctagctccccctcccctcccctatgctcccaatttgctcaggagattttatccttttctgcttctctgtgggaccatgtatgttgcccttagagccctcattgttgcctaacgttgtctagtggtgtggattgtaggctggtaatcctttgctctatgtgtaaaattcatatatgagtgagtgcataccatgtttttctatttgtgactgggttacctcactaagaatggtttcttctagttccatccattttgcctgcaagttcaagtttccacttttttttttgtttgtttgtttttgccactgagtagtactccattgtgtaaatgtaccacattttctgtatccattctttggttgagaggcatctaggttgcttccagtttctggctattacatataatgctgctatgaacatagatgtgcagatgtctttgttgcatgaatgtgcttcttttgggtatatgcctaagagtcggattactggatattgtggtagactgattgccactttcctgaggagtcgccataatgaattccaaagagggtgtacaagtttgcactcccagcagcaggggaggagtgttcccctttctctacatcctctccagcataagttatcattgcgtttttgattttagccattctgacaggagtaagatggtatctcagacttgttttgatttgcatttccctgatggctaaggatgttgaacacattcttatgtgtccttcagccattttagattcctctgttgagaattctctatttaattctgtacctcactttttaattggattatttggtgttttggaaactcgcttcttgagttctttgtaaattttggatatcagccctctgttggatatataggattggtgaatatctattcccattctgtgggttgccgttttgtcttgctaactgtgtcttttgccttacagatgcttctcggtttgaaggaggagtgatgaacaaagtggacaagatcaggctggtgaaacccacagaaagagctgacctgaataagtgggagctcttggcccccagactgatcactggaaaaccagcatggaactgatccctagcccatgaatgttggtatcagtgaggaggccttggaaatctgtggggtctctcgtagtagatcagtacttatccctagcatacaaatgaactttgggaccccatttcacatacagggatactccctcagcctagacacatgggggaggtccaaaggatatgatagacactgaagacccccccatggaagacctcactctccctggggagcaaaaatggtatgggatcattagggtgttagtgggggtatgggaggagaggagggagagggaactgggattgacatgtaaaacaatcttgtttctaatttaaataaaaaatggagaaaaaaagaaaattattacagtcatagcacaagacactatgacataagttctcttactttgtaacagattttactaggacaatgagtcttcatactgtgtgcaattttgatatatcaaaattgagaattagtgtctttcttttaaaatttcaaatgaggatataaaacaccacatagacagtaataggcctgcgatggcttagtcattaaagtggcagccagacaagaatttggacatgaatttggagatgggactttgaagagtaagtgtggccttgggaagtaggtgtggtcttgttggagaaagtatgtcacatggggcatctttcatgtttctttccatccaaatttgctcaatgtgacactgaggccactctctgctgactttttaaaaaagattttcccaagactatgtcttcttacattatgccatgctccctgtcatgatgataatggactgagcccctgaaactgtgagcaagtcacctcaattaaatgttttccttgtaagagttgctgtgttcatggcatctcttcacagcaatagaaactctaacaaagacagatccccagcacccacataaaatctagaaacactgttgcatgtatctgtgaccctctagttgggtttgtgtgaggagacagacacttgaaggttattagctggatatgagctccaggttgagggagcaactctgtctcaaaaaataaggtacttagtggttaaagaagatatccaatatcaacatctcatcccatgcatacatgcatgtaaacttacacatatgaatacctgtgcatatagatggattgatgaaaatagatggatactacatggatggatgaactatttatagaatagataaaacttaagataaactagacaaataggcagaaattaatatatgaagaaagatgatagataaatgatagatgatagatgataggtagatagatataagataggtagatagacagatggattgtaggaaatactagacagcagctgcacacagtaagaatattttttctaggtttacagagaaataattaacagactcaaatcttatgaaggtaacagtcactccatacaaccaagaaaaatctctagaaattataatctctcatattcagaaataatattcatagcatataaagatattaaatacagatcttaagtaattagatgatgatgccttacacatttaatcattataattcttagtagtatttacgaagagtctatgcaatgtagaaattctatatttaaaattaacttgagcgattttcttttttgagtacttgaacatactgttattgtttctccatttggaaggcatatgctgatttttattctatgccttgccatcaaatatttctttagactttgacttgtgtgatgatagtatgacattttttctacattataaccagtcagctttctgaggtaaatatactaaaactttaaataattaatttttcattttcttaaagaaataatataatattgtatatgtacaaatgaaaattaaataggtattcccttgagtgatgtaattctccaggaaataaacataggatagaaagataatataagattgcatcatatattagaaactggtaaaattctgagagcaaaaacagtaagagtggagttgaaatatttactttggacttttttgttttataactatgcaatttctgttttatttaaaatacattcctttgggctgtagagatggcttagcagttaagagcactgactcttcttccagaggtcctgagttcaattcccagtaaccacatgttggctcacaaccaccttgaatgagatctggtgcccactgcttgaatgcaggccgaagaccgtatacatagtaaataaataaaatgttttttttttttaagaaagaaaatacattcctcactcatacaataatcctgaccacaggtttccctccctccaaaatatttgtaaacagaaataacactaagattaaatttttcaatacaagtcatggctcatgtttatttaaaactcatggatgataccaagaaaacaacacacttgagctcatattttggatgagagtaagagtactcatggtaggtatttactcagacttggcatggaaattgtttcataaatatgtattcatagtgtgcattagtaggcactttaccactaacctgcatcaccagtccaccacatcttaactagacacatttaatgttctctccttggccaaagtctcccaatcctcctgctagctcagcactatctcacattaaggaatgggtgacgataagaaagtcagaacaaatatagtcattatcagacattttcatgtcacacacattctgcggttcccttcatatgtttcacttagtttgcaagaccatggatccctatttggcttcttcatgcacacttaattttggtttacctttctccacttctcattccccttaccctccacttccttgaatggtctgccccagtaattcttttattgaacttgtgttacagagttcccctctttaaatattcctttccaccatgtttgcaatttcttaacccacgctcactgcaaaagacatgcaaaagatttgaacctagaattttgtatgaaagagaacatgtgataattgcctttctgggtctgtgttacccaactcaacatagcttttcaagatcatgttttcccctccaccagattcccctaatggaaataagtagttggagtcactgtgtgatttaaaaaagcaagaaataaagaggaagtgatacatactggagagagagccaggttcgaggaaggtggagggcatgagtgaaaatcagataatgaaaatgcatatctacatctacgaaagtatcaaagaattggaaaacaggatatgaaagaaggcaaaatccaagtcaaacagcatcttgctttcagacaaacgaatgaaatacatgtttgcaaatatcccttcagaggcttcttatgacatcacacattttcttctttgaaactttagtctcacttacttttggtaaatctacttctttcatattcctttatgaagcaataaatctaccatcctctggaattattaaattgtcctttaaataaaggaacaagaaacatgatcttgataaatgttctcatttagaggatccacaaattaattggccttctcattttcaaaccaatatgctaattatctctaattttcttatgttaataatgtgatttgatgcagaggacatccaagaaatgcatattatatatttattagtttggcatttttattttgcttagtcttgcctatcatcacaaatacaaattaatcacatttcagtagggcaagcaattcctagacaacaaacaccataaacaaaataaatcttctagataaattaatgtacaactaataaaacattccagaaacttatattcagtggatggcatcaagaaactgcaagtggaatgcatctatactcacagtttttaacctaataaagaaatgactgatgagtaatgccttgaaaagcttagaattttacacattctggcataacagatgcagcaggactaccaagtctatatgaatgctaacaggtatctgagttgaaacagttgctatgattcttgagaaaagaagttatccaaggttcttgtccgggtagtcattcatggcagtttagctgaatagtcttccaacatagtagaagaaaggcatattggaaatggttactctatctcctatcttcaaataagaacaaggatttttttaagtctaccattattttagctttagtatttttttttaagttttaagaaagtatcactgctctaaaaaaatcaaataggcttttattttcagaggcagtttaaatgttagtttatattccattttatttttatttaaaagcaataaaattagcatcaggtttactatacatgtattgttattttctgaattaaggtaatactatcttaattcatctcccttattccacatgtcccttcagaaacagttgtcttgtacctactcttagctattatctatattggtagaggagacccaggatgaagaattctctagcaggccagagcatgaaaatcaagatgctaatgggtttttgtcctttcccccttttttcttctctcttgctaaaagccattagattatactcttaaagctagcaaccaaggtccagtcccttatttggctactggctcattcctgagacaaacaccaaggtccaataatcaaaattcactatttggctaatatatccaagcaggaattcctaactcaccctagcacgactccccatttatccccttaaaacctcactcatgaaaaaaaaaaagcctgcttattgcttgttgttgttgctgctgctgcttgctatcttctttgcttgatgaagaggcagccaccctccccaaactgcttgccccttgctgtaataaatctccttagtgctgagtttggtatctgggtacatcctctactgactcctgggggctgctatccttgcacaggactacatttataaaggtaaatataccttcttctttaacatttacaggccttcacatgtttctatgtcattggggctgatgttttctacaaatatacacattacatgcaatgatagagggacttcagccccacctttcaaggattgtctaaagattactagaatcaagttcttccttaactggtccaggaaggtgtgagctatcaacccttatatatcacctctaaaatagggcagcaccagagcagaatgcaactcccccttctttatttgagagaattcctgaaaattcatttccattcccaaattctaatagaattagctattacctcagtttcccctgaattacagctcaacttcattatacactcaaccacaatcccttcaactcttttttaaactttataatttttattgtaaaatatcttgcaaataaataaaaacatcccacatgaagtttaagacccaaaatctatgtaactcaatgaacatctacaaagttagaataggcattcggaatggaagctggagcttccattaaattgaacacttccagaataaacaagtatcatttgaatggcacagatcagaagatattcctgcgagtggtcttgtcttgaacagaactagaccagtgtctgccactgttggacttgaccccagggaacagatctgaactgagattgtgaatcagaataccaggcaggggcaagaacttacaaagccttccttgtcatagctgctgaccctagtgagctgtatgtgcagctgttactgttaatatgttgatcagtttcatccttgaccccattataatgtcaatggtatgatttctgatgattgtgtagaactggtcccatctcaaatcaggataagacagaggagtggaatacaataggatacactgagaagagaaattttcttgcataatgttgtaattgtgctagtttattagtttgttattattcccttattgtgcctcatggggataattaagtttataaatttagctttatcataagtaagtttatataaaattacataaatacttccattacctgggttttacacatgcacagtgggtgtgtattacaatggataaagaaggaatattatataactgtatattagaaaataattacattagttatacagagtggtattggaaggtctaaatattgagcatttcattagcacataataaagaacaaactaagtattcagtgtggacccaaagtcatccagcccagctttttaaaaacaaacaaaaatctttttaaatatttattttgtgtgtatgaatggtgtgtctgtaagtattgtataatacttacagaggtcagaagaaaacatcagatgcccccaaactgcagttgcagatagttgctcagaactgcttgggtgctgggaaccaaatccaggtgttccactaaagcaccagtgctcttaacagctgagccatctcatcaagctcagattcttgttcataactattcaacgttcaatctcaagttaacatgaactttaaaaggatgaaaacagtgaatgacccttcctaataagacttacataaacaactaaaataagtgtcaccagggcaactgtggagattctcaagttgacagtttctcaaagtagtaaaacatgttccagaagccagggaaggaacagatttcagcagtcttcaaatagaggtgctgatacactttccaaaaactgaaattcttatttctaattgctattcctttagagctggaaggagaattaaaagaagcttgagcccactgctgtctcccagcaggtcattaccccctaaggtctataagggatatctggtctttccatatgggtagctgatcagttttctactgcattgttgatcttattaccaataaacccaaacagggaattttcaggtagctcaaaaatctcataaaactaagaagtacatcttcaaattacaaaaaatgggaaaattataaaaaatctatcaacttacttcctgttttcttcagctcttccatttttcatatatgtatgtatgtatgcatttgtacatatgtgtctggggggtagcaatttcagttaccaaaacaagcatactgtttctttgtatacatatatgctgtgagaaagattaatttataaacttgattattggttcatgagacacaatatatgcttaacagtaactaataaaagttagcacaatattaatgttctgtaataagaacctattctctcaggatacctgggcaatgaaagaaagtgaggctaatgacattgaaataagtttaatcacatgaggggagattgtagtaatgtagctgctacacactggagcaaaccacacatagctaagaaaatttattggtcatgaagtcctcttatcacagtttattctgcttcaaaatcacattttctttttgatttttcaagacagtggtttcgctatgcaacaaacctggctgtcctggaactctctctgtagaccaaattggcatctcatagagattccccctaactctgccaccaagtgttggggttaaagatgtgtgccatcaccacccagctaaaattacattttcaggtaagcttccagggcttgaagaggtggctcaatggacaagagtagatgctgccatggcagaagatgatggtctagtttataacacctacagctggcaaatcaaaaccacctgtaacttcagttctagtggattcaacatctctggactctgagaactgatgcactccctcgtactttctatacacagtgacatacaaataataaaaatacaataataagtgtaaaaaaataaattctctaaactcatatacaagatacacattatgtattcatatatgtataaaatacatatactctgtggtatctaatatatatatatatatatatatgtatgtatatagtgagtactgtttcatcctttatttataaatttttgtttgaatcagatactaggcatttatacaaattaaagctatgaaagcttttatttcccttccaatgtacatatattcattattttaagtacaatttatggaaattatgattcttaattttattatttatattgatttgttctatcaaggaaatgtaggaacataaaaaagtaaataaagtggaaatgattaactctcacgcaaataatggttatgatattgcatgattcatgcatgtctgtcttatgatgaaaagcaacagtgtgctgtgggctaacagacaaactgttaggactgtgaagagaaaggaaaaggaatcactttggtccttaggttaacagcctagaaatagggaagatgcctaaaatcaccttgtacttcagacagataggaaaacagaagaagggctaagagtacttgtgttgaagctggccctcacaacatgatcctaccattacaggagatgacaagatgggtaaatcgaggaagaaagaaagactggccatgcaaactctccacaccttgaataactattgatgtaggagggaaaactgcattcttcccaggaggtcatgaaacttagaactccgtagaagagtaaagactcatgtgatcagaaaaagacagagatatacagtaaagactgattcattggaacaaaacctttaaacattatacagtgtgtttaagaatatacatcagcttggaagagaaaaagaaaactataaagtccttaaaaagaaatagaatagctgggtgtggtgactcatacctctaatcccagcactccagagacagaggcaatcagatctctatgatttgaaggccaggctggtttacagcatgaattttccaaaaatacccagagaaaccctgttccccaaaaattaaaaataaaagaaagagagttatttaaaagaaactacataaagatggaaaatacacagagagtctgggttctctgttattgtgttgtgtttgaattgattgctgagccagaaacaaaagctgctaaaagacatttgattataaatactgctggattaaaccaaactatatattttaaaaatgccttgacttcaaaatttaagtgtaaggacatattactttgtaaaagaggttctgtttatgccttcacagaagataaaattctgtggattcttttcagactaacatggtttggtcagacaagatcccttgaagctgtgcccaggtgatccaacatccaaaacatctgagaggatgcagcctcacagatgactatggccaggatttggttgtggttctgggttttctcgggatccctttggggctgacagcatccccaaacagcatgaagctgcttggagagagctacacccacattcccaaatattgtctaaaatgtttgtttttatttaaacaggcttggttgtaaatgattaaggatcacagtcaatctctttctaaagaaaaaggggaatatgatatagtaatgctatttttcattggtatagattttggtttattgatacaaatttaaggtcaattttggtttatatatatttctactcttgtttaactattgtgtttatgtaactcttttaaaattttaatgcataactaaatacagattatagtcacctataacagttaaaacttatagtcatgttagttacagagatgtatttcaaatggataggcattcttcaaaacttttcaaagacctgcagaatatggcatttaaaaggctcctggcaacaccaattatgtcagagagggtaatgggcatgggagagactcattatggagtttgccttcaatgaggcagaaatggccatttggataagaaagtgctcatgcctggactgcttgacagcatgctggccacactggacaaaagggtggcaaaaaaagtgactgctgaactttccaagggacaggatggtccttcaaggttcttgattcatagaaaactttgccagacactttgggcctataggctgaagagggatgccccaaagttacagagggattgtgggtgactatccatgcagtgagatgtctctgtctagagtttatatcttatccttctgaggtcttggatggagttgaagacagatagttatggctatagtttacctcagttatgataaaagagtaagttacatacaaaactttactcacaaatatagggctagatgatagaatattttctttaaattttgccaaatgttagtggagtaaatattgttaatggtagttcttgcttggttaatgctttttagatataattttactatgttaaagttaaaaatcttttttatttagatggaaaagaggagatgatggggatgttcttctgtatgctgtgaatatttgtttctcttattggttggtgaataaagctgtttccactaatagacaggcagatgtagtcaggcaggaagtataatcgctgattatattcatcactcctattcaggagatttctagggagagaaatgcagagtgtgttgctggaaagactccatgtagctgctggggaagaaacaggttctggcttctctagtaagctaagaccatgtgaaaagacatagtttaattgaaatggtttaataattaagagacagctaggcaataagaagcctgagccatcagtcaaagagtttataattaatataagcctatgtgtgtttatgggggctgaagaatggcaggaccaggctggacagaaacatctatctacactacatttcatatgaatgtcatttaactgctcaatctttctccttattaggtacactacagcacatttgacattcatcttttggttttgacttatattcataagtgtggtaggggtttttttgtcaagaaaataatatgatatttctttctaaaataaataatccatctgtatcataacagttattttaatgttattagcatgactgtgatgctatatatcaccatgtaatttgactctcatttgtcccaaacgacattccatttcacattttatgtccttcttttagtagtaaatgaagtctttattaatttatttttctaatttttggcatactaggaaaaataattttctcacttcattaaatagttgttaatgtttattgtatgtctcttcaacacaatcataaagactactatttcatcattcctaataattttaagaatggtgaaaatctgtccactttactccacaattaaaacttcaaagacacataaagatgtattgagaaatatacatgtttacttatgtcagcagttcagagaacatacattaatccaattttcaaagtgaattttaagtttagtattttaggaacattcacagttaagtccaatttaaaaatcataactacatccactattttcctatccagaatttcagaaaatagtcagatttaacaaggccaaaatactgtggccttcaactttctaacctatagtcctccaacattcacttgtgcctgatgctttagttctatataaagtctgtctctatgtcacattgtgaaaactagttcgctagaatagtttcagttttacttatttattatctttttgcatttcttttcaacatggtcatttcacatagcacaaatgtctgtatacacctgtgcaatgggagcatgtgcatatattgtacatagatgcacacacagacatatacctgtaaatgtaactgattgaacaagctccggtatgacagtgttccctcacatcaaacccactgaaacgcatcaggcaatctccacatagtgaagaggtgaattctctataacatgaaaaaaaaaatacctagagacaaatattgtggttcaacctgaagatcagggaatcaaagcaaccaagctaccaggaagctctaaaaagctggggtgctcctattctcaatatggttgtagaatgaatgcctcatcccaagactttgctcctgtcttatatacctccctaatgccgggattaaaggtttgtggtctcaggtactgagatcatctttgtgtgaactgttgctctttaggactggaacagtattgaatagatctgggtggccttggtctcacagagacccatctatctcttgatcctgagttactggaataaaggtgtgtacccaacacatcctagcttctggttactggtattaaaagtgtgtgcctggctgggcgttggtggcacatgcctttaatcccatcacttgggaggcagaggcaggtggatctctgtgatttcgaggccagcctggtctccagagtgagtgccaggtttggctccaaagctacacagagaaaccttgtctagaaaaaccaaaaaaaaaaaaaaagggtgtcctggcttaggcaacatttagtaaataataaataatatatcaatacaattctcccaattcctgagataacaaaaacaacacacctgttgggacacataattttatttatggatatcactgatttcagcctgacagtaattttgtcataactggaatagctcttgcctgggtttagggtccattccaggtgcaatcatgaaagcttgaagaaatgaaaaaaaaagaaaaaaactgtgcagctttcaatctgccaaaagttcatttcataaatatcatttctttattctaaaatgcacatgtatacatttatccattggtagcttcactttgtgctaccacaagtatttcagatattttttcatggctgttgccattctcaagacccttctctcttaaataattgtttacagttcagaatagtacatctagattcccaacagatatacataagcacttttatttttttaccctttgctcatattcatcacatttactttactaacaattcgacaagtctcagaataacttattttccagtcatcacctatttggagatcctgtattcttcttgtcattattgtaactgttaaacattccttctctaatacccaccccattctttacacatctataaaatagaaaatatatttcaaaacacccagaacactgaagatgcaggaatacttagaaatggctaatgttggggcagatagacatgaacaaatatttcatacctttggagtaacccccatgggaatgtgtcaacatgtttcaataaattaaacaatctatgaaaagagctgtttcaaactgtaaatttaatgagttgttaatgtaattaaattgtttagatctctcaaattactttgtttactatgactttgtgtttcatcttccctgtcctcatcccagctaatctgtgcaatataaaattccttgcatttgtcacctgtcctccaaactaaatatgtcattaatttcttggtctatcctggaaacacgtgcagcttataaactatctgctcttttacatgttctttttgttatgtgtctcaaagtaagtttatccagaaccttaaatattctgtttcatgtttatataacttatatcagtcctcagcacagcaccatacttcaatattattacttgttcaacttcaacaattgacaatattagaatacaaccatcatggaacagttatttcctacataaaggtgtatcttctgtacccaaatcactggctagactgcaaagtacccttgattctccaacaaatcgacagggttgctgatacaagagaggcatagctaaatcactgtaatggctaccagaagaaattagaaagagtaaacattcaggaaggaaaccacagccaatgtaaactctttcttcaattttgtgttggcttttggaagatagcatcaaaatgagcacatgaaaactgtaaagaaaatttatggtggttcaaactcagttgaacataactcctctgtagaaggaaaagcatgcctgaaatatagaagttctggaaagaagtgcttgagcaaatttaaaaatcaaaatattctatatacttcagaggttacaacaagtgtataaaagccaacaggggtatgtagagaggaaaactattaagtccatactgaagttatgttgtaagacattcagaagagcctgtcaaatattcatttgggtatgcacaaaacagacacgcataattaatatcaacttatttgaaaaagtaactcagaacatgtataagaatattattcttgactggaattaaatgatatttcatgttacacttcaaaaatttctctcttcataatagatggacaacaagacaccccacctctagatgaaggggacacaacattaagaaaagaacctagtaagaattctatattaaataatggtaagattttatatatgttatagaaggaattttcctttccttctaagaggcagagctcttattagcagggctaataaacataattttccaactatttgaagtgtgattaattccaaatagcactgtacagatgatctgaaaggagaaatttctccagtgatttaactttctcttagacaagcaatctttaggaaaacaattatcttaattaactcacataatggtttctaaatgccagggcccaattctggatcttcctcgtagagcataggcaccagcatcgtgtgtcagggcaaaagcttctgcagcagacggggcacacagctatacgtatggtgattattaggagactctcagcaagatggcccaagagggttaacatctgttctttaggctgaactttatataatatgcataaatcatgatttctcaaaaacagcttttatgactcctcttaatgggagtatatagttgagcattccttcctttataagaaatgaaagcaactatggaaagtcttctgataaattttcataaatggtaaaaactggttgctttgttttgttggaaactagagttctcatttggagaaaaaattaggacttcagattgtgacgatgatacaataaacatctatatgcaagttagcagggaaacatttagtattgtcacctgaaacagaaataagaattatatttatgcctagtgtataaataaacatagggagcccattctcttagcctagaaatatgggggagggcctagtccctaccccacataatgtgacagactttgatgatctcccatagaaggtctcaccctttctatggagcagaagagggatggggtgaggatctatgggggtcatatgagaatgggaaggagagggtactgggtttgatatacaaaattagattgtttctaatttaaataaaaaaggaaaatacattttatatacccatatatataaaatatatgtttatgaaaattcaaaataaataacaaaaaacataatttctgattaactgagaataatgtgctcaagctctggagtgcatacttcaaggcaaaaaatagtttatttgtttaatgtggcatttacttggctatctttgagttcctggaaattcactataagttattaaagtggctttatgactaatatcatctctagcaccctggttcataggctgtcatttccatttaatgaaattgtggtgccttcatcattaaatttttcttatatatgttagtgcctattaaatgcagaaaccacaataggtggaaatgttatttgaattaaagaataaatagctaaggacaccagaaattttcatcacttttatattcccaataacatgcattcctatcttacaccatttttggagtaagtctttggattttattgttgtaaatactagtgtggtgaagacttttccaaatcccagcatataaactagcaaaagattcccaatcttgtaaggattaacaaggaagtttgactatagatgaggagcataagaatgaaatttttggcaatatggtagctgagtgttcaaaaggttgctgctcttgcagaagttaccaggacccacatctaactgataacaactggctctatctctagcccaaggagttctagcacctttcctggcctatctcatgtgcacacatggtgcacacagcaacaattaggcacacagacatacacatatgtaaagataaatataaaagacaagtcaatatttaaattctattgagtgtctgtacagtaatcctggggaaatactttttattttggtggtgaagacaaaagctttggtcctattgatcagatgtgaattcatgtatttagtgaaatgctgtttatgcaaaaatgggaatagaaacacaaatgtatgtcttttggcataataaggactttgcaatatttacaaagaaagtaatatcaggagagtgtgtgaaggttaaagattgataaccagagccataggtagtacacaggagtcaatgggtgtagttaaaatgaccagaagatcagtgatgaggaggggcaggtgaagtgagtggggtgactaaacacagctcctgtggcagatgaagtcagagtcaccaaatggagaacctggatagaaatttcaaatacagttctaatgcttttcccctgggcttcaaatagttagtgtccacatgtgcagctctcagtccatcatcatttccatttatcaaaatctaggaatcaggaagtaggtgaaagaaaagaaaagaaatggaaaattaacaaaagtaaggatacccttagtcaactgagcaaaatgattttgtttgagtttgtactgagatttgcattactgttatctcattcactctcacacctttaatcttaaaatcaatgtgattttctggcctgctccagtcttgattgtcccccttaagctttaagctccttgatggtaggatttagtttttaaatgagcctaaattcccttaaataagacaacggatcagccaagtattataaataatggcactataatgtgtttgaacttttgctaaggaaatggtgttgtgaaacttcattacaaagaaagaaaacaccatggggcaaacactgtggcctgcctttcaatcacaagtaatggctgcagggaaatatcagcttcctacaaaagtattaccagaattatgaaatataacttgatagatctcaaacttcaaataaaattctttcctgtgattgatgaccttggaactccagaggtaaactgtgcatctgtagtatgtttcatgtcagaaacacgtaacacatatgcgtgttttatgatttataggttgctacatagctggttaagatatattataaaggtcatgttgattaatctcccaagaaatcataatgcagtttcttatcgggtatttgaagtttctcgtagaaacagcaatgatgaaaggaagttatgtgggaagatggagggattaatttgtaatatggaaaaaagatcatagttttctaactgggatcacaacagagcttcactatgaactgaaatgtcaacaacaggactgtctaccgaaggtggaccagtgattggatgccagcttcccaatggaggggtgtgtgtggggggggagagtgagtgtattaggtacttttctcatggctgtgaccaagttccatagaagaagcaactggaaggaggaaaggttgatgttgacttaaggtggagggaatacacttcgtgtgtcagggcaaaagcttctgcagcagacggggcacacagctataccagagcataagttcccccatcagttaagcttctctggaagcatcatccaagatgctctcagatatggctacaaggcatcccttcatccaaccaggtggacagtcacgattagctttggctggctgctggcctctacagcccttatcacagagtctgctagaaagggaagtcatttgacctggcttcctcagagatattgcttgacattttaaaaaccatctgtttttatagaaaattacacttttcaatttagtttctgcatggataaataagcttgtcaattccgtgtcctcgctcctatcaataagtgatatactttcacttttaccatcaatcttaagctgtatataattgttttgtggaatagactgttggggaagtatgataatatttcaataccagtcccaccttataaagcaagtactcttttccattttaaagacatatgctatattgaaaaaaaatatatattgaggttgccctgatcccatgaagcaatacaaagaagagaaccccaaatgatgttaatattctagccatcctttcatcaccaaagatccagggcatctatgcctgtgggtcccagctggaaagttattccctggcctgagttctgctggacaatgatatttgagttataaatgaattgcccaataaaaatccttcctgagtaatcagaaatatatttgtttcctcagtttttgaaactttgaattttgtaagagttttcatttatggtgtcagatttatcatgcaggtaccttttgggtaataaggtaatgtcataattaaaattcatcagtttaatgtaaagattaaataacaggaaatgtcataatattatatgaaaattgatatattagtccagattctatagagaaacaaaactgatagaattatctatatatctcaaacagccatttattacaagtggtttacagtgtgcttgccaatggaaagtcaaggaataatgcactccatctatgagagtgcatatctaaactggtcatttctgtattggatcctaaaatagtagattctaatatagtgaagggacacctcagaaatatgataaagaaattgccacagagtgagtactagtagacaaagagcaaaagcttcctttttccaggtcttcttatgtaagctgccaccagaaagtgtgtcccatatatagggttagtcttcgagtctcaaatgattcaatccccaaaaatcctgcctgtccagctctttagattttagtttatttgagatgtagtcaatttgacaaccaagatcagccatcataactactattaaagcccttaggtaatggttgatgctgaaattttatgtcaaagttaatgatttattgaaaaccagagtgaagaaaagattcatcatgtattcctagtcacagtctcaatgtaaagagatggatttgtctttcagcagtttgtgtggatttcttatttaagcaattagcttggaaacatttttaaaagctataaataatttctgtcttcaacctgatctacattttactgtgatgtatgagatataattaaacacttgcctatcaatgagaataaaaaaagagatgctactgatacacgattaataaaattgtgaataaagctggaaaaattgggataacaactaatataacatgttactaagaaattcatgaaataaagaatatactaaatgcacacaaagagaaacattctgatcacctttaaaaacaaatattctgatctaggtggttttggcacatgccctaatcccagcactcaggaggcaaagatagcaagatctttgtgagctcaaggcctgtctggaccagagacatgttctaggtcagactccaaagctacaaagaaaccctgtctctgaaaaaaaaataaagattccaaggtatgaatagataaataaagaaatgcacatatgtgtatccaatatatatgcatatgaatacatatagaatatgtgtaacttatttaccaactggttgattcacactggattctgcgtaaggaaagaatagtcagccaggagaaagaatgagaggtatgctagaagtgagttagcataaacagaactacagagaactgaggcttgaattttacttgcaaatcagcctcaagaccttgagcttgctataagatatttaaggatgaaactaaggtcctgatatcaacttaatgtctttgaaaatacttcagagcagaaatgtaaagtacagtgattgttgttgacttcatataagaacagttttagaatggttagtcttgttgttcaggtttactacacagatagaaatgtttggaaacaaagaaaatgagtaaacactgatttccagctagtttattacagtttagaatgttcaaataaaatataatcctgttactgaaggtctttttctctaactggtcatttagcagcagtgatggagaataaggcatatcactaatgtttctgcaatatatatataaaaacaaacgaggtgaagaatgtgaaagttataagacaattaagtattggtaatgtgaaggataaaaaggttctttctcataattaggcttaaataggactcaaagttgttacattttggtatttcaaaaacacttttataaagtatttacctacttttgatgaatttaattaaacaaatgtgattaattgggagcttaaatagattttcttttatattgttattctatacacttggctaaatgctgtcagactctaggaatgattagttcaaacctgggtctgataatgaaagagaggaaagaaagatggagaatgtggtaggaagaaaaccacatctagtttctcctgttattttcagagtcttattcattctgtttcatgtctggatgttaggccagctttgcacagccatgtcttggagactcacattgactttaatatattttcaagtttcagtctgcataatgttgtcataaaccttaatgtgcagagcagttatatttcaaggagagttttatacaacagagtagctcttgtctctgtttcaatttatagcaacttcatgtcctaattcctgcacaagatatatcactgacccatgattactctccgctggctctttgccaatatgttggtattgaaaaataactacaatgtgtcaccgagacaggaagaaagtaagaccctttcataaaaagtaccctttaatgtgatccttctattacaggtgactatttgacagcagggattaatatagaaaaatcaccattgtgttgattaaattatatattattttcctgccaatcattaaactcatatcaaaaattttgtgagggattatttaaattttctttatcaaattgtcagtcttactatttggatggtgaaagctttgatcatagataaagtatgaagaataagctattcagcttatggtcaacacacacattttgtaatcatacctccagccactatttttctgtacattcctagccttctttgagtccctgatcattttgaattaaaggtaagattgtcatatataaatggtttcctaacatctcaaatggcttcattttaaatgaatctttaatgtcttcagtgtacctgcaattttcataccatctaacccctaggtagtgcttatgttttctgatcattctataaatattaatttttcataaagtctgtttggttcacacactgaattattaaagcatattgaagactcttaaaatcccatgattttgtatttttttgtttattcattgttgcttttggtgctcattttcttgatggataccaataaataaaataaaaactagcaagtccccaactcatccatccctccatccatttttgaatacttttatttgttctgaatgaaggaggggagaaggaaggaagagagtgaagggggaaggaacaatgagctagggagagagagaataaatatacacactttgacatataccacaatgtatttatttcattgctaataaaacagtaactgtaattgtaagttaaaattaaaagtttgtgtttgagtaagtaaatcatagaataaatactctcaaaatgtccttagttttatcagccatagtgtttgtattttgcaaatgtgacattttattatttttcaacacagataagatagcctcaaaaatttaagagtaatattttccatagagtatgtgtaagaaatttaagacagtaaaatactgtatttgtgtgttagtgttcaaaacaagtttgctcaagtgatctatcctaggctctaatatcaaggataaaatgttgtaatactgtggtatatagtgattaagttgggatcttcaacaaataatttttatgagtgttaagaacatgtgtaatgtgagcaagaaataaatatttggagaaaatcatacttgtgggcattcagaatgccatttttgaaataagatctaaatatgagtttgtgggatttaaacagaaacttgagattatgtgaattgaacaggtgagaaatctgaatttgccaccatgcactgaagtttcttgagatgactcaaggacctaggatgtagaaggtgacagtaatcacaagtgtaggaatatatgaaaaaatgctaaatattttgactataacatgcactagttatttggaaattgtctcactgagaaatttctaatgatataaatcacaggagaaaaaggttatgctaactagtttttgaaaacagggggaatctaaagagagggtgtttctgcctttgtcccacacctcctgagggaagcttagtgtagccactgtgggtccactgtcctcaacattatagtagagccaggttttcattcacaaaggcaggatgtgatgaagagacccaacaacaagatctagtgtgtaatccaacctctggcagaaagtcttcccattttcctccccactgatgcccacccatctgacatgctattccagtgataaccttcaactgtgcacaggtcactgtgcttgtataagggtacatgtattctctgtaccttgccatcagatgaagatgactgacttctgtcctaaggttcctaaggtaggacatgtgttctcagggctattaaagtaatgtatgggttcctatctttatgatcacaatctatatgttcttgtgaagtgaggatccagagaagatggccataaagcacttctgtaacacaaccctatgatagaaattggagagacttcaagtatctcagaactcagtcctgaagcagtgatttggactgaaatctgaagacttcaggaaacaaagaatgtgaggtgagcatttgagatcaaatttaaagtcttctctcaagactctactatcacaaaagatacattttcatttttcctacatacacatgtacagtcaattcatacattctgagttagagcattcactatctgagtagctttcctattggagaaaagaggagaggcccaaggtaaactgatctcttcataggagacactactgctgacaagggcaggactctgtgaaaagtgtgaggatacgatatacacatagaaaatgagaatgaactttacactgagatgatctaatttagagtgaaatgatgtcaaatgtagtttcaacatgaagggttttcagttttctggaaattcaggtttctgtatgaggggattagaggtaactagtctttcacatcttaaggtctggaatttgaaacaaagtggattttgttaccattctcttctgccacaggaagattagggcagttttcatagtttctaggatcctgattcatgtacagctcctcacaacaggtctcagtgttcttactttatatgctaattttacatttttctagggtcatgttatgcagccccaactggcctgtaactctctgtgtagagcaggctggcctcaaactcaggaatctgcctgcctctgtttccctagtgctctgatcaaagatgtgtattaaaatgaaatttcattgtgagatctttttatccttacattatatgatgatgtatgtctaactacactctatagagagttctttggggattgtcttttctagcttcctggcctcaggttttgttttgttttaaattctttaattactgctcatatttacatatccttcctccccattccttccccctcccatcctcccatgttctccaccaaccaccccaatccatcccccaactcctcccaagggatagtgagtacttccaccagggaccttaaaagtctgtcatcatttggggggacctcagttgtaagcttgttaaaaattactttagccaggtgtggtgacacttgtctataaccccagccttcaggaggatgaggaagaggggtaagcctaagcttcatagtgagatcatgtttcaaataaacaaaatcaaacaaaacaaacaggaacaacaaaacagtaagtgcatttttagtctggtgtaatgtattcttacccagtgaggatcctatacggtttttactttttttcctgcttttacctttttcactttgtgacttacttacattgcattgctttttttgatttttgttgttgttgttgtttttgttttgttttgttttgttttttactcactccaagagtttggaattaagtgcaaacttagtattatttcataagcaactccccagtagtttctcaattgccttcttttacaaaaattcaatttcctggttctgttttgattccatcttgatttcacatagttaatgatgtctctgagatagtatgtgtgaagaagcagttaatttaatgtcaaaataatgatgataatgctcaaaatgatttagtacaatgtcaaaccctgaggtgggtgttgtggcagttctcagtaaatagattttaaaatctattttgcttttgtagatgaagatattgtactgacccatcagattcctctgagcagctgcagaactgtatgttctattctcagtcaaatgaagataacaccatgcttttttttcttcccggggttatactaatttaaggtttccagagatatgctacaaggttcaggatacttacctgcttccttcttttacttaaggcctttgtcaacctgctgatttacatatgctcatatttctagaatgaacaccttgtttttgttcaatgatgatttgggaatgtcctcatcattttttattgacttgaattttttcttggtatcaaaacattatgcaagcaaaaagtaatcatttcctattatattgtcattaaagtttatttgtatgaaatattataaataattcctagatatttgtaagcagagaccctttgctctgaatgataccttggtagtgcagaaaagaattgatctacacttatggctgattcttagattcagtcattatcctgtcaagaaccttttgaaatgacattcttttaaaagtcagtgcattatgaattagaatgtctaatttcatttacattaccaatttcatgtaaacctgaactagttatcacaatatgacacagaggcaaactttacatagaattaaaacatcaggcgcaagtgatgtttggaggactatgtaggaaagaaaaaatatctcatatcaactatgatattccttcacatgttactgaagagaagtgtttcttttttaaaacaagaaaattattactaaaaaaagagttcatggaatcacctgataattaataaacagaaaaatgttaactactgagtttatgtttgtcttcttaactgggtgataatgagtctgttcactaggatagaggattcatgctatttctcttacagtttccattcttggtgggtaagatagattatccattataagacataaaaagtaaaaaatggtagcatgtatatttccatttatttatttatttatttatttatttattactctgtcattactacacaggcttacccttgtaaaagaatgctgatacagggagggttggttctgacagctatatgataaatagaatgacatggaatgcctcccagaaaacatttcatcctgttgaggaaaaataaggattccataggtggtaatagttataagagacataaaggatactgttatattctagaaactgagtgttttgaatgcatggcctttaaagacaatgaaaaaggagtgactggatcaggatgatattaccacctgatttgtatagtaaggtcattcaaacaacttgtggaacagggggtatattcttctgtggtgtggccttcattaagtaatctctcaccccaattcccattaaaataacacacacacacacacacacacacacactgagagagagagagagagagagagagagagagagagagaggacagagagagagaggacagagagagagaggacagagagagagagagtgagagagagagagagagatgcatggcatgaactaggaataggaattgagaaggcttccatcaggagaggaaggttagagggacaataaaggatgaaaatgactgagaatctttacaacttgaactgttaaaaactacaagaataataaagacattgcacgtgagggtcactaattgttggcatgaacacagggaaaacacataagaaaatcaagcaaggaaatacttaaataccatacagataaggaggtttgtcaaaactctgaagtcacataaaagagaagcagccaaccaccaaatgagtgagagaaaaattggaggccgagaagacatcagaattgccaggaatcattaaaaggaagaatcatcagacaagcaaatccatgttattttccactaaaaatactcagactaattcgttgtaatcctaaaatactgctctgtcgttggggttagacaatgggtaacatactgtctggccctggattactattcacctgacccataaagactcaaaaatgccctcacacatttttctgaatatacaactatcagcacacaaatgattttcatgaagagttgaaaaacgttataaattaaggaacttaaaatgaatagagtagattttaaaaatactaagtagatctatataaattagggtattttctcccatataacagggaaaagtgtacaatgcttcatttgaaatctgtcctaattaagtaaaacttaacagtaacatgattgaacatttcagtttttcattcttattattttaatataataaaaaacttacatttcataacagagagagagagagagagagagagagagagagagagagagagttaaatctgtttggttttaatttctagcagatgtaccctaatggatccttgtgacccctggtcccgtgaggtaggagggttctgaattctaagttagcctagactacatagcaggaccctctctctacaatgacactcatacacacaatcatacacacatcactgctaggctaagtcttttagacagaggatagagtattctgtgatccagatgaggatgagtcagtttaggacagttctgctgtgtaggaaaggtaaccatgtaaagaccataacagtcttcactaggccacatgccatgcattcatccccctctctcaccttgctttcataacgcatcctgttctccatccctgcacactccctttcctttctatcctcccttctgtctttttttttttgtgacacaaaaagtagtgtcaaatataagacaatgacttttttttaattggattatcatttgactgtgggaaaaatgagatttttttgtttttgtttttgtttttcattacgagtaagtctgtcaaactgcagtcatgggagtaatagactgcaagccctcatctatttcaccatactactattttctgattgagctaacggaaacttgagagtgatggcttgtcaggtgagcataatattcctggcgtatgtcacatcatttttcttctctagaaatactatggattagccaggcagtttcatttataaaatcagtgagaagaggaatggtaataattttcattcatataaggaaagaagacataaatatttaatgcaccactcagtaaaatcttcctaaaaagacaaatattgcgaatatgaagaagtcagattacagatgaaaataaattaatttcagctatctcaaaaccatcacatatgtgggtttctaaaatggtttctaggtttctcagtttctaatatttcccagaaaacaacgctctgattcattcccttttaatgtagctagttttttaatatagcagatattgaaacaacttggaataactattccttctcacggaatgtcattttggaagagttcactgtttattgctctagaggcagagggacttgggacaatgaagctgaaaaacaaggcaaaataaagacccatggaatcatctacttcattcagaacctcagacaatttgtattctgagggtaaaaatgagtcacatgagaaaaagttatttaatcacaagagcaagacacaagaggcaaaaacatgttttttctatagaggcatctaaacgaataacaatagctagctgcaatgaatgatctaacataactttgttcatttccactacaccagagaggggcatgaaagcataattcaagaacaattctgtaggccgggaattggtggcacacgcctttaatcccagcactcaggaggcagaggcaggcagagatcagcctggtctacaagagctagttccaggaaagcctccaaagacacagagaaaccctgcctcaaaagacaaaaataaataaataaataaataaaaaataaataaaaattaaagcaatgtaacaggggttccttaggcccatactgtttcctaaaatgtaactaaggccataaaacccttgtcttggtttcttgcagttttctcacaagcattcagaaatgacctcacaggactccattcttggacattgttctgacagttcacttaagacaatcaggtgtaatgatttggaagttatatgactgtgtatttaatcctgaatacaaaataacattactttatcctgagtcttcagttcaagcttaaatgcaaccttttattatacatcagaattgcagaaataacacacagatgtgaatcatagatgagatctgagtgtgtgtgtgtggaggccagaggtcaaggagattttttttagcatgtaacgtaaggtttctgtttttttgagacagttctctcattgtccttaaacacattgtttgcaccaggctaactggcaggaattccaaggattgtcctatttctacctctccagtatggaaattatcagtgtatactaccatgcttactttacttttttccttgattttgaaattaatataagttcaattccccttcctttttcacactaatcctgtataccctataccttcaatataccccttccttctctttcaaattcatggcctcttttttgttaattgttgttacatgcataaatgtgcatatataatttttctatactgtaaccttcccattttgtatagcattactcataggtattatctcggggctgaccatttggtattggattaacaatgagtcttctcttctctgaagaagattatttcttgcactctcagttagagggccaaggagtcataccagagccatgacaggtttccaatagcccctgccagggacctttccttagtttcaatttactacagatggctgggatgagcaaacttttttggggggggaaggggggaaccataactcagagcaaccaatcattaggttttccacagacttctgctagctcagcaaatgaccacaaccctctggtggctcagtgaatgatcacagtctcttgatagctaaagatggtgctccctaccctgccaatgggaagtccctaactactaaagctactcaccaatcagcccccagactaatctctcctcccttgaattctcctaatccagtttaaagggggacctgtgagcctcccaggctgtcaccctgtatcaccccaactttttggcaggtttttagtaataaaatgctcttgctgactgcatccattactggtggtcttctgtgggacttctcacagaccttaacatcggcactccttgtttgcctgtagttctttgtgttaagtgtaggctcttccctctcatccccacttattttcacgtatatatttttgttgtcattgttcagttaatatttggctgcttatgtaggagatactttatttgttgtaacttctaagattaggacactactttagagtaagttacctgatcctctggtttacaatcttctcacattctttcctacagtgttccctgtaggaaacttcaatgagccttcaatgtgagagtgttttacaattgtgtccactggaactagcctccgcttgtgcattttgatcagctgtgcatctctacaatgctcttagtctgttgcaaaatgaagtttctttgatatggaataagtacaacatttacatgtgggcatcagtaaaatattttagtgtggttaggcattatggtggaagtcgcagatactggttctccttcaagttccatgcattcacttgttgtgagtagtgggctgtgtttccagtaccaggcatgatttacctcttgtttagctggtcttagttctgactagagagcagttggctaccactgagttatataaggcatttataaatccttggggttattgtgtcagctggaacttgttatggtgcatatgtggtatagctgggtaaacctctttggaagcttgcatggcaatttcttttttatctttttttattaatttattttttacattctaatcccattccccctccctcctttcctcccaatccctttactcctgcctcctccagtctgctccacagataaggtaagtcctctcataggaattctactaagtttgtccactcatcttgttgaggcagggccagattcctgtatcatgaaagttagccctcagggagaaggcattcaggtcagttccaagtcagttgtctctgggccaggtctgaaatacatagtgtctttagcaataggtacttatatgccacatctctggggtaaacaagggcattaagcttagaatttttcatatgtcccatgccaggcaacccaaacatctccatgtttgtataagtactagaagtttatcctcaacttagagtactggcatcaagttatttcttttttatatattttaaattatttttattacttaaaattagaaagaagcctgcttcacatgacaatccctgctccctctccctcccatcctcctccaacccctaccaacccctcacccactctcccctcagggagggaaaggtcctccacatgggatccccagaatctgtcatatcatcctgggtggggcataggccctcccccatgtgtccaggctgagagagaatccaccaatgtggaatgggctcccaaagcctttcttaccccagggatatatactaatctactaccagaggccccatggagtgccaaggtgtcctcactgacatccatattcaggggtctagatcattcccattctggcctcacagacatcagtctggagtccatgtgcttccccttgttcaggtcagctgtttctgtgggtttcaccaccctggtcttgatctctttgatcatcatccctccctcactgaaactgagttccagagttcagttcattgtttagttgtaggagtctacatctgcttccatcagccactggatgaaggctctaggacagcatataaagttgtcatcagtctcattatagggataggacatttaggatattccctccaatattgcttatattgccagttggtgtcattcttgtatatctctggaaatctcactagtgccagatctctcttccaagctatagtgactccctctcttatggtatctctcatctgctctcctctatttttccctggactcaactttcctgttcccccatttcttcctctctcctcctcttctccccctctctcccagctccatctcccctacccccatgctttaatctaaaagaggattaaaacataaaagtaactatagttcttacttgataactcttttgttatatattttattatgttaatgttaaaacccttctttttatttagtcagaaaacagtggatgatgggggatacttctgtgtatatgtttgtcttattggttgataaataaaatgctgttggtcaatagggaagcaagttgggcaggactaggagtcgaggagtattctgggaaatgtagtaaagacaaatcttgtgattcaggcaggaagtgacatagcaggcagactcagaatataagcagggacaagcaggaaattcctcctcctctcttctctgtggagctaccatgtgatccactggtaagaaagagctcatacagctggcatcctccatattatatgttcttataaaatataaagattagtagttatggttgataattaagagtgagctagcagataagaaattctagcctttggtcagcagcattctacataatatgactcgctatgtgttacttgggactctaacgtggaggagggcagaacttgggcaggggcagagagatatatcgttacagattgtagactggtaatcatgtgctctatgtctaaaattcatatatgaatgagtacatatcatgtttgtcttttcgtgactgggttacctcactcaggatcatttcttctagtgcgatccattcgaatgctaatttcaagactccattgcttttttacagtgagtagtatccaattctgtaaatgcacctcattttgtctatccatttttcagttgaaaggcacagaggctgtttccaggttctggctattacaaacaacactgctatgaacatagttgaaaatatgtccttgatgtatgaatgtgcattctttgggaatatgcccaagagaggaattgcttgatcttgaggtagactacttccattttcctgagaaactgcaatactgatttccaaagtggtcttacaagtttgcattccaccatcaatggaagggagttcctctttctccacatcctctctagcatagattggcgtttttgattttggccattctgaccagtgtaagatggtaactcagagctgtttttagttgcatttccctgatgactaaggatgttcagcactttcttaagtgtctttcagccattttagattcctctactgagaattctctatttagttctgcaccctactttttaatttcattgtttggtgttttggtgacaagcttcttgtgttcattgtatattttggaaatcaccctctgtcagatgtgggtttggtaaagaacttttccaataatgtgggttgccattttatcttgctgactgtgtcctttgccttatagaagcttctcagtttaaggaggtccaatttattaattgtcaatctcaatgtctgtgctactggtgttatattcaggaagaggtctcctgtaccaatttgttcaagggaatttccgactttctcttctaagaggttcagtgtggctggatttatgttgaggtcattgatctatttggacttaacttttgtgcatgacaatagatatggttctgtctgtaatcttctacatgttggaatccagttatgccagcatcatttgttgaagatgcttttttccccagtgtataaatttagcttctttgtcataaaacaggtagccattcatgtgtggattactatcagggttttcaatttgcttccattcctctatctttctacttttgtgccaataccttgctgttttcagaactatggctttataatagagcttgaagtcatggatgctgatgcctccagaagttccttcattacacagggttgttttggctatcctgggttttttgtttttctatatgaagttgagtattgctctttcaaggtcagtgaagaattgtgttttgattttgataggcatcacattcaatctgtagattgcttttggtaagattgtcatttttactatgttgattctacctatccaagagtatgggatatctttccattttctagtatcttctttaatttctttctttaaagactctaagttcttactgtacaggacttacacttgtttggtgagtgttacccaaagatattttatgttgtttgtggatattgtaaagggtgatattcctctgatttctttctcattgctttattatctctacatagtaaggctactgattttggggggttgattttgcatcctgccactttgctgcaggtgttcttcaattgtaggagttccctgcttgagtttttcatgtcacttatgtagactatcataaatcaagaatagacaagcaatttaaatagacctataaaccctaaatgaaatagaagctgtcatcaaaagtctcccaagcaaaaaaaataaaataaaaaagcctatgaccagatggctttactgcagaattcaaccaggaattcaatcaagagctaatgccagtactcctcaagttgttccacaaaatagaagcagaaggttcattgccaaactcttttgcaaggccacaattacattgatacccaagccacacaaagacacatctaaaaagagaactacagaccaatacctctcatgaactttggtgcaaaaatcctcaactaaatactggtaggtcaaatccaagaacacatcagaaaaaatcatcgacaatgatcaagtagtgttcatcccagggataaaaggatggttcaacatatgaaaatccatcaatgtaatccaccatataaacaaactgaaaaagaaaaactacatggtcatctcactggatgctaaaaaagcctttgaaaaatcttcatgacaaagatcttggagagaacaggaaaacatgaacatacctaaacatgataaaagcaacatacagcaaaccatcagccaacatcaaaataaatggagagaaactcaaagtgattcctctaaagtcaggaacaagaaaatgatgtcaaatctctccatatcccttcaatatcatacttgacgttctagctagagcaataagacaagaaaaggagatgaagggcaaacaaattgaaaaggaagaattcaagctttcactatttgcagatcatatgatattcaagttgtttttttatgaaaaataaagaattgatctccatctcccttcaagattcactcctcaactctttctaaatgtttaaatacacctttatagtcattgaaataaataaaaatcaccatcttacaatctccaatgaaaatagaatatatggattctatataacttatctgaaagttaattattaactggtatattttatttagatctattcaataatatatattgtacatataccataaattaaatattagatctatccaattattcatatatatatatatgatatccatatattcatatatatataatttagccatatgtgttaaaaagagatgtttctttggattttattgtttttgtttttgttgttgcttttggtggggcttggggcagggtttctctgtggttttcgaagatgttctcgaactagttcttgaagaccaggctggtctaaaagctcacagagatttggcctacctcagccttctgagtgctaggattaaaggtgtgaaccaccacagaccagatagaaagagatgttaaatctatctaacatatattaaaccattataacactatttatcaaatatcatatatacttaagtaacataaatagatagagagagagctacaaaatagtccctttgttaatcatttgttaaacatagtgactggaatgactattgaacaaaattcaaatttgtcctcttaatttgatctggaaattaacaatactttgactttatttcaatttcatacaaaagaaacatgaggtagaataccaatagatctaagtatgaattgggttaccatatttattgtttcattgctctgtctattttgagacttataatagcatcaactcttttctttgtgtgatctctgatttctaggttaatatatgagttttagttagctctgatttcttaattccagcttcgtttaagagggtcttataacaaattcttcaatgattcctgtctttcagatgttggtctacattgttttgtatccattactgtttaatcaaatgcctgttgatataagtcactaattccaggtaccgtatctgatggtgttattgtatagagattaaataacaacttgggatcttttctttccacttcttataaacattggagaattctatcagaaagtagtcattaatttcctttctgtatcaaaacacacttttatagattattccacttccttctatgtccttcctctcaattccataataaaacaggcagtgtgcacaatgtttgtgtcacttcatttgaaaactcagctttgtaaaacccttattttaaaatattgtatacatcagaagtcttctaccatgcacatcagatatcaatttaagcattaaaagtgaggtgcacatagaaaccctttactgagagcaatgccaactttataatatggattataattattgaaaaactcagaataataactttctaagtcagtactcaatagttgtcccttaaatcttccccttatactgattgtctattttatgaaacttgagccattcaagatcaaatagtaaagttgtccatgtgtgggtgactggttcagaacatctgaggcagatgggtgaaacacaaggagaaggaagctctcagattaataatgagaatatagatgatgagtgacagggaaggtggccagcagaatgaacagcagggaatttctaatattgaaaaaaaagaaaaaaaaagaaaagaaatatttggagttttccaaatgtcaattactgaaaagaatttcaaatattcattatttcactcagaaattgaaatatttttaatatttaaataaatattagctttgcttcatttgaactactattggctactgcgtctgtacagataatgctgattggttaatgcactagagtaattacgaagtgtaaagtattttattctgcaactaccaaactattccagtaagagcctttataaacatatcaagacaattatggaaagtgttgagggaaataggtaataatcaggagaatgtaccaagtctggatgggtcagacacctgtttcacatacaagtcaagagccagatgaagtatgaaatgcacagaacatgccattttcttccctttctacttaaaatgaaactccatacatctctgaatgaatgtgctttctttaggcccatgagtttcaaaatgatcacttcacctacaaaatatgaacgttttgagcatggtgatgtatgcccacaatgctggcaatcaatagatttaggcaagatatcaccaaacccataccaatctagacaaaatattgagaaattgtctcaaaatgtcattcaaaatatagtaaaaatggggtgactgaattcaatacttcaattttgctaattaattaatgactttaatttaattgacaccatgtctgaggtttgtattagggttattctgagaaaatctaggaaaaaaagagaaggggaaaaaaagcatgcttgtgcatatgcacaaattccaaacactattctctccaacacctatcacaaaaacaaattaaacaaagccttattacttgcccagcagcaaagatatttggttcacatatttgagagttgtggagatggcatttaagcccacagatactggatacagagaagtgatttagaaaaattaccatacaattgaatttttctatggttatagaaagggataactgtggctccttttcattcagtggtcatttggtagttagtctggtattcagattacagagtcacctctgaaattacttaaatataaagaaatgggaaagtgctgtataagtggcttcatcaaacaaatccaacatgtgtgtagacaccagaggatgattttgcggtatcatttctttattttctacctaagacagagcctcttcccaattaagtgagctgagacagctggtcattgagcagcttgtctctgtatctcaattactgccatattcttgcacacatcctgctcttaaggaggttctggtcatcctgatttaggtttcaggattgcatgttaagatcttttacccacaagcctctctctaacccctcaatagttttctgagatcatagtaaagaaatattccagtgttaatagtccaggataaatgaataaattgtatttgatatcagattttaagatatagtaacttatgtgggaccatttattactatacatcctaataaatttaagaaattatttagcatatgaaaataaaataattaacatccaaaaacaaggaaagtaattcaaattaataaatacatttaacaagtctagtgaatgcaagttttttttaaaaaaatcatctacaagtctacatttctacaataaataattacaaaatatcacttacaaattattataagactcttaaaaacatcactgacaatagtaaattaaatacttagatgggaaatatgttgaaaaaatatatcagggattaaaatgaacaaatattattaagacttttcccaaaaagaagtgagatttgtcctctagtaaccctctttgaagctcttctcagctgaaaagttagagcaaacaaggcaaaatatgcctgtatgttctaggctgaaggccatggatatttctattttctgtactatgaaaaatttggatgttatccattgtgctgggagtgtgatacacacagctccatagaggcctaaacccaacagcttcagtcaaactcacagtccagaatctttaccatcctgccctattgtgatccatccattttgctttgttccacctatgtccagagaggcaaagaaactgcattcgcaatcacctgctctgattgaagattcatgggtggaaaaggaagaaatatggatttattggcttaagccactaaattccagtgtaagttcttaaggaaactagatgtaatcatggcttagaggagtagacatttcaacacatcagtttcctccacattgttctgtagacttacagaaatctcagatcaaggttacagacaaggaaacaaagaatacatgtgatggcagtccatactttcagtgtttaaagctggtcagaataaatgtatgggcttataattacagtgctggttactggcatcattggtatgtgagggtcattttgggaaaaccaaaacatatctccttcctgggcagaaatatttgtttggtaatttggatgctgtttgcaataatatatttgctgttagaagattaaactgaatgtgaacaaattgaatttatttatgtttgtttacttaatatttactaaatgtttgctcagtttaaaaaccacagagaagcattcaaaacaaaagaaaacattatttaacatgtccctggttcaattggactggggaggcaaatacctttaatcaaatcacttaggaggcaaaggcaggcagaactctgtaaatcccaggacagccaggactgcacagagaaacctgtgtcaaaaagaaaaaggaaaagaaaagaatttcaggcatacttctactgtggaatatgcagatatgcaattagttatatatttttcctgtcaacatacaagaagcaaatttgagtgaacaagaaaatgctgaggtactgtccaaaccaaaatggagctatgtaggcaaatgaacgaatgtagtgtgttgccagatgtggggttctggtatgccagaagcatggtaagtgatcactaagaaaagcaaaatggaccgtcagtgctataggtgcctaccaccatattgacaacctgtcagttctgtccctgggaataacaagatggagggaaagaacctactcccacaaattgttccatgacctctacacatgagttcctacactacatgaagacttaaacatacatttaaaaaccatggaatttatctactttatttttaaactactttattaaaataaaatgttactatcattatagtaattgcagcaaatccatcacattaatctaagctgttcataatagagacaattttctgtagtacaaattggaaatctcttggaaactaaaaaacaaacaaaaattcaacaaaccataacatttataaagttctttcaattctaggtttgacttagaaaaccctaaaatgcactcaaagtactttcttgaaaattaaatgttatagtcttctataattttcacaaatggaggaaattggcaatgctgtgtgtttttgagtaagtgtcagcctgctgattaatgctggtttgatttttttccccactgtccagagaagtcagaataattataagtttagaacaaaatcatcaattttgagataaagttaaatttcaaaacaattgttgctgtgaaggtaattacattcatccttactttgatggtgaaattcaccagcatatgaataatacacaggaatggacacatgaagttcaattcaaacagtcaaaataaaaccttccttccagagcagcggaggcaagaaccaggctgctgtttttagccacatcatgaactccaagactatagaaagacagaggttggatattaggtttgagattagataaaggatgctaagagcatgcctagctggggctttcattttcatggctagaaagcagggggtggggagctgtgggcaggacattgggaactagcacatgttgtgtgactggtcattcagaaagagctggggagtgagatgccggtaaaacaccccttgtgaagctaccctgagaagtccgaggaagagaaaccgtgattctaggggatatatcttcctgttattaccttcctcttactatcctaatgttgtcttcatttttaggtgacaactaacagtcgaccccctacatacacagccaacataaaaacgcaagcacagggagtctccacctccttcaacaatgaatctgctttaagttgcaaactcatacccctacccccagtcccaccatatgtgcttatgcataattcatacaacatagaataaaggcactgcaagtaagttatccttgtgttcatttcatgaactttatttgagtcattttcacttccttctaaaacatcttatggcaaaattaaatatggagattacagtacacagacattagtttgaactcatactattcttacagggaagaaatttaactcgcaaacaaggcagggcttgcaattcacttccttattgtcaatagaatatttctctgtaattgggtttttcaaaaggattttgaacaaatatctacatcacataaacgctcaaagaagaccgtatcttcaagagaagaggtatatgcatgatgtcacgttgtctggagagacaaactggagggtggttaatcttcaggacttgtgtttccccttaaaaacagatattattcaaacaagacagtgttttgttttaaaaactttgaattgtcaagaatactttttgtagcatttatttaatattcaaagaaatctctgccatattcaaaccgtaaattttgattatttgaccataaatattttgaaaattcctataaatcgtcatgtaaaattacttttaaatttaaaacaaaaatcattaatagttagaaattatatcattggtagtacaaatttgtacttttaaaaatacactttattaagattaaaaattttggattaccaaagcaattattaaatgcagaaggcaagcacaacttgccatctattactttagaaaaataaacagtgaaatattccaatgaaattcttccctaagaatgatttttacacagaagatactgagtgcaaatgttctagtgaggaaacatacataattgtagctctcaggctcatcatatagtgcaatgtttatgccactaagcctgcctttaatctagacttctgcattcttccatttgtgaccaaatgatattgctttgttcccacatacagttaaatgtttgcataaaatgtaaagagaactaaatatggtaattaagagtgagtagatgtagtaaacaaatctactaatcacatattcatgcatggattataaccaaacacacagccatgaaacaatagtaatgccatccatagcaacttctcatggatggcctcaagctgtttcaactgcttctgaagtgtctgaatttttgacatttatcattgaattgtaaagaccatcatactttttactattgagatcacacttacattccacttgttctcagcataataacaaggtattgtaaaaagtgatgaaatttggggattgatttttatcttttgagctgaattactcaaaaatttggccaaatcttgcagggtctttaaatgatatgcaatgtattctctacttatatattggaaattacaaggacatggttatctgttgttttagttatcttccttttaattgtcatgtgattgaagtaatagagtgcacttgtgagaccccaaaacatttgtggcctagccatatatatttaataactccattgactattatgccataatattttcatctataaaatgagtaaatactatactactataactaaagaaagtaacataatccaatggtgttagaatggaagaaatgaaattatcttattgaagacatccttatctaatgagaatccctctgacaatctacaaaaaaaactaaatactgtaataaaagttgaattggtaatatcacaatatcaatgaactgatcccaaatttgtttctataatctagtaacaaacaattaaaattattgatttttattaataaataataggtagtgtaaaacaatgatgaaatttacaaataaaaggactactatacctgggtgcccaaaacaacaaaaacaaaataatcatttgttaaagaagtcaaagatgatctaaacagtgaatctaaatatggttgtcattgtttaaaaagactatattgctccttcattccaaacattccataaatgatatgaattgaagtaaattacaaggtttacaatatgcagatttcaaacacaagattgtttgcagttgtttggaaggatatgaattggaagcaccacacattttccacatcttcacaaatctgaaatgaagtgtagaaattttcagatgaaatccagaaatattgaggataaatatgagaagcatacaatgaatataaacataaggcatgagcaaaaatattaaggaaaagagtgatgtatcttccaacccagcaggacttttgataaaagaaaagggaaagtactgttggactcacagtttttcaccttggatacagcaaacataaagctcggcatgggggacttgtgatctgtacagcatgctgacactggctagacaatcagctctcctcgaaaactctctgatgctgggatcaggagtcatcttaaaaggaagccttgcagtaaaacttggaaatgaaaaaataatcagccaaacatatgttgcaacacattgcccatagataagatcaaagagaaaaatataatattggagactgaagcaaggatgagatattggttacatttaaggtatagtaaacaaaggcacagaccaggtggttctggtgtcccatcagactgtcagatgcaagaattcagctttgactacacaatggatttcagatgaagagcacctgatgctactcaaggaaactagaaaataaaggataaaaaaaatgaaaagaactgtcttacccatgtggtgcactgcaaaagaccaaatccagccacccaaggaggtagaataaaatggacttggatgggagataccaaaagaattttcttactaaataatgtagacaatttcccaaatttagagaaagatgctgacatgcaattggaggcaggaagtctttcagaccccccactcagacatgaccagaaaataaatatttccttatcacattgaattataattgaaattcaaataattcagaggagtaggtatttaaagctacaatcatgaagcagtaacttaggggggaaaattctcaagtttataacagatctatccactgaaatgctaaatttgagaaacccaggtaatcatctctagagattatcttttgaaatggaccacaaaatgaaggcgtcccagcaacagccttaagtaagtaatgcctggccagcaatttaacatgatggatcacacttcaaggaatcctacgtggataataaatataaccagagaacatgggaagaccaatttacataagaaaaatggataaacaattggtggctttggagtaatgaagtatgttcaaattggtaggcaaacaaactcctaatgtagaagggagaaggagaagaaaaccttactcaaaatcatgggagaagtgaaagataattccaggaagcagcacatatctccaagtattaacaataaattcaactcaccctacatatccaaatcaaacaacagagtggagaactagaattaacaaaaaaagcaaagatccacagtctagagagatggcatcttataaaccacttgttgctcttgcaaagaacctgggttcagttcttagcacctacatggaagtttaacaacccctgtaactctagccccatatattcaatgcacttctggcatcaaagactcatgcatgtatatggtatacataaacgcatgcaagcacttttgaatacttttatttgaataataaaaatatcgaaaacaagatgcatctacttgctatcactaaaagacttgacaggatttgatatatcaacatgctttgtcttttgttcagtgtacatcatgaagtgagggaagaaagaaatgtaaaaaccaaagtataaagataacattgcagtgtgataaaggaacaggattctaaggctccccatacgtagcagaggaggtattggcagatgatgcccactgagaaagggatagtcatttttatttggagatgaggttcatgacagggtgcccaggacccagtggatgtcctaaatcgatgcatagctgggcagcagtaactgagcacaggtagatattgatgataaagaggaatgcatataatcaaaatgcattctacacatttatgcaattttctatgaataagtagaaatagtattattcaaaataattacatgagtcataaagtataattactcactataatgtttaagtttttaaacatcgatcagctaagtattcacaaatgtttggtttgcatcatccacattctagaagatatcatacgcaacttgcaaaaaaattatctcatctgaactgcatagcaaacacacacaacagttttagtgagaaatagagtataattggaatattgtagaaacttctgcgggaaaatggagaatgagctaagaaaagagtgatagatgaaacagttgacaacagaaaaccatattcagggagaaactgacaattcattttcaaagagcaagcaaattccaagaaatagcatggttatggacactcatcttgataaaacaattgacatcaagtgccctgttaagggtcttgcagtcttacttcttgaggcaattccaggaacttaagccagggaacagtcagcatggctattcaccatgaaaatgtgtttgcgaaattagaagttgactaagcgtttacaattcatttttataaccttaaatagcaagaaagagttttatcttatacaggttcttgaaatgatcttagagcattttctcacagtaaacatatttgttatgtattttgcagagagtaaatccatggctcaatctttaaaagattataacattaaatctaatattaacaaatgatttctctggttaacctcaaagtgtttcagaaatcctggacaatcccacagtttaaccttcaaagaacaaagcttcatcattggtggcatttttttattatccaaatttgcttttatgacaagtgtttcctaaaaacagtcatttcaaacaccaaattaacacaaatgtttacaatcttgcaaaaccatggatagctgtgtgctttgccaagagtcccacatgacagtggccactaagtcttggggagatggaggtaatgtttagagaaactggaggagtgcagatagaacaaatcccacaaggatagaaatactgcatctataaatcaacatagtggtcatgtttctccatggatatttcctgcacaatttgtttttcttccctatagcttcatttcaaaagtaacagagaaaagtaacttgacttctacacaaaactatgaagtaaagagaggccatgtatatctaaggccttccctggcagtgaacacatttttgaaggaagctttgctgagatttgatgtgatatttgtagagtttctgcttaaataccaactgaagttcaaaagtagctttgaaaaatcaatatctgttgaaagcattagtcataacttctcattttcgtggttttcttctggaaaatagtacctcattatttcatatttcacatgacaaatgtttcgaaggcattttccttaatcacttgtgaaaagagtgtaactgtatattttgtaatcctacatatatttaagaaaagaaattaaaaatatatattcagaataactgtcatttccctgtaatgatgctgaaaatgatttagtgtgattcatcacatcacaactcaagtctgtttaaagattaccaccgtacctacaccacaagtagccacccaaatagtatataatgtattacttcatttcattttcccctaaatattggtttcctcctccagtaccaatccatattccttttaattcttagagtcctcattagtaagccaaaccccattctagcagagtttagtgtatttttataaaactatgcaaacttgctgctaaattacaaagttactgaagttagaaatccagtagacatttgtatattaaactatctcagtcttttgggtccatgttgttggtttaggtttggcatcatgttcccataaaacagacatctaccaactttaggattctaatgttactcagactgcagattgcttagcaatatgtgcatataattacccagacacaaaagccagtaccttatgaggcccttcaggaattatctgtaattcaacttagttgttaaacagggttgcttctcctttacatggaggagtagctagttcaccataattatagacccaccatagacaaataccaaacgtgtgacaggaaacatagcctaagatttctgtgtaggcaggttgatacttaagtacaaactaaattcctagaactccatagtgtgcttaatacttttgtggagtatcagtgaaaatgagagaagcaaagaaatgccacatgaatgaagtgtttcaaggttctaccatttagactgcacagatttgttcctggtacacataatatgattagggtaaatttgacaaatttaaaaataattttttactgttggtaattagaacatttatgaaattttggttgcattttaggactatcaaatgatcttaatagcttatgctcttttaaaagtgcaatacttgcttttagtttttaatacaattttaaatttattttactagtttattgaaaatttcccctttcctctgctgctggaccaatgagtttagttatcattatttaaagacttatgggccaattataagtaggtttgtatttattatgtaacggaactatgatttaagagaaataaacatcataaatcttaagatagccagtgtggtataacagttttagatgtgactaaaatagaaaaaactaggttaaatccacttccagagtttgtagttattaccttgatccctcagggcactgatccactagggacctatattctacctttagtatgtggatttctcttttgtctgtaatcttgatgaagacccagatagatgtatgataattaagtcaatgtgttattatagaataaatccatgaggtcatattaatgtctgtggcccatgctgccagcaaggatcatgtttgggtctgtggtcctgatgctactgtgtgccatgttcatgtcattggcaggtgttatcactgaaagttagatagatgtcctttgtctatgctgcttcctgaagccatgacgatatcagtggtttgtgctgctctgacaaaccttattgatgtctctggcctgtgatgctaccgaagagcatgatggtgtctgtagtcaatgttgcatacagggtccttgtggatttgaatgaacctgtgtttgccacctgagaccatgttgatatttatgggcagtttgccagtggggaccatatttgtgtccatctgctttgtttccccagaggccatgtgtatatccttgtcctgtgccaatgccaacagctttgatggtgtctatggcccttctgcagtagagaaatgtattaagtgttgatgtccatggtctgtaccaccacctgagaccatgctggaatctatagcatgtgttaatgccacagaccatatggatgtctacggtcccagctttcactgaaaaccatgtggaagtctatgatctgtgctcccacagactgtaaagggcaatgaagctacttttgccatgttattgatgagtgcagactcacatttaggaaaaagtgacatgaaagacttctgtgacaatctatattcccttatcaccaaaagtaacagtctagacaggaagccatcaaagagaactgtcaaaaattgtgatgaggatactgaagtgtataactccacaactgggggcatcttgcagggtacaggtgggagaggactcagttttcttttagagactggctactggcattttgatgatgtttgagtcaatatatgggcaacagaaattggacttgtgttttgtttttttttcttctccttttgagggctatgttataagggtgagggtggacctttgagaactgagaagtgagcatgatcagggtgcatggtgcaaatttcccaagtaatcaataaaaatattaaattagaaaaaaatgaaagtaagtccaaccaaataaggggccttttctttccaaagggggtaaaagttatggatagaacagattaatttcacacaaatgagcactaacttgtagcatttcactgccacacaaaatacactacacatgtgcaaacacacatatatacactcacatacatattcacatacacatacatattcacacacctataggcttacaaacataccacacactaaacacacacacacacacacacacacacacacacacacacacacacactttacgatttttgttttaaacataccacatagtaaaatctatccttctaaagtttacaattcaacattaaataaacacatactgttgcacaggtgtacatgcactatacaggaatgcatacatagaatgagaacccctgaatgaagattgtgaatttaggttaactatgttgggggcaggttcttttggcttatttacattttgtatatccaataaatcagagtatttattcctacttttgaaatattactgatggttaaaatattaacaaaactttaatacaagaatatataaatacaccctagaaattgtagtaaagatgaaaccatcaatattttctataaaacatatggataatatatactaatatggcccattaaaaagtgttaacagttatgtatgaaaatactatcctagagatgaccataaaaaaatcactctatacaaaatatccaagtatatgtgaatatttttagtcttgaagctgtagcatttgtagacaagaaaattcatggaggtataaagaaaaatgtgataatgaaatttgcaggtaaatggattaatgagaacagtattatactaagtatggtaagcccaactcagaaagaaaaatgcaatacactctctgtcctatgcagatcttagttttgaatatttaaatatgtgtgctgacacaaatccaagctctcacctcaaatgggataagagataatatatgactatagccttggaacacagattcatgttatctctaattccctgtccataggtgccttggttagggtttctattgctaccatgaaacaccatgaccaaaaagcaagtgtgggaggaaagagtttatttttagactttcacttcaccattacttttcatcactgaagaaagtcaggacatggaagtcaaacagggaaagacctgatgaaaagaccctggaggggagcttttgtttggtttgtttaactcatcttcttatagaacccaggaccatgggctggggcctctgtcattaatcattaaatgaggaaatgccttacaactggatctcatgaaggtatttcctctactgaggctccttcttctgatgactgtagcttgtgtcaagttgacacacaaaaccaccaaatacatgaggtgaatcgaatttggtaaagtttttagtataacagatcaaagaaattaatgtaaaaatcaccctccaaatacttcagtgggaaacctctgccactgcactttactggtaatattcttggagtttcatttcataagaatgttagaccaggtacaaggtagacaagcaaggctgttaaatggggtacagatagctcaaaataagacaattaggctgtggagctgcaacaatgcaacttctccacagtcactgaagctctaatcagtgagtcagaaagtagagtataaggtgatttttttttacagtgtgtgtgtgtgtgtatgtatgagagagagagagagagagggagagagggagagagagagagagagagagagagagagagagagagagagagagagatgtgatgtatgtatgtgtgtgtaagctttgaaattaaaagagatcacgagaaggaagaatgagatattgaaaagcctgacactttctttggttgattaaaaaataaataaatgcagaatattactcagacaaataaaagatcagtaggttagtaacatttttgtcagttcctgcaatatgaggaggtgtctcttatcaacatattatatttagcttgatttttcctttggcttttgatatttaggtatttatatttgatttttatagtaaataatttcaactcatggaaaatgtcatctactaatctttccacagtaattttagagtacattaaagttgaaaagtatttgtgagacgtattgcttttccttacaatttaccttattttaaatatttgtttttccaatttttgaatgtcacatgatattgtacatatttctgaaatactgaggattgcttaatgcttatctagtttatataatgaccaaatcagagtaattcatatttgcatcttctcacacattttacacttctctctttagggaccttcacacccctccaggtatttctatatgtacgctaagtcatagcagattatgcttcctattcttcagaattgtaaacaccattttttgtatagaattgtattttggtagccattatccatcttcctcctcttctcctactcttttctgtactgtataaacactattttattattttataatatgagaacactttctgtgcatctacaaatctttagaaacagaaagtactctggtatgcttcatgatataggaaataccatttatattctttttcatttttctatgagacttgggtggatgtgcagctcagaggcaatgaacaaggatgaacttatgactgttattttccaagatgtatctactatcaaacggccttctgaattcatacccctctgcctgaagcttagcacaactttcagaccttatcagagacatttctttgtgcagtaaagactggttattagaaactaacaactgttccaaatgcagaaaagaagtaaatgtggagtgtttagcaacaaattagacattgacatcattacactcacaccagaggctcagggtccaatgcagaagaggagacagggagattgcaaaagtcagaagtcatggaggaatggaacaaaacagtgtattctgcactcatgaactctcagcagttgtggttgcctgcataagatctgcacaaggacaagccaataaatgttctattatggagtggaaggcattcacccctaacttagaagcaatggagagtagatgtcttctggagagggagtcagttttcttacaggatgtgactcctgagaggtgtaccatatgctggtacatggctccatacctatgagtatatgaacagcacaaattggagtatatgggtaaatgaaaaagaaagcacaaagttgaggggtagggtgataagggcagatattacagtgcttaaagggggagttagcagtgaatatgatcaaaacatatagtatgaaatcctcaaagaattaataaagcacagtttaaaacaaatcatcctgtaaaaattaataaatatctgacataaaagaaaacgggagtattggaatgatattgctcatgagacttcattgttaccagtacatattcttgtacttttcctctatcacttgttttttgttactctgtgttgttcctctgtcattcctccaaatcaatttagaattagtgaacataaaaccatccatcttctttgtaatacaaagagtgtaattatttgtctattgtacttgtttgaccagtgacaacttcatccttgctactatttccatgaatggttatctggccatctgtaacctatgaaaaacccagggactcttcacactgcttcttattggtttatacactaagggttttatgtatgcatcagaaaacagcattttttttaaattctatgtagttaatcaccttttctttgatgaactgctgattcttttcctattttgctctggtatttactttaacaccataatgccagctctcttttgaggtttaactttccatgggctgaatctgttgtctccatttccttcatgtttatggtagctattatgctaaggatatctactcctataggaaagtgaaagactttcatgaaagccatgttccatgaaaacagtcactattttcaaggaactctcatcagtctgaacttcaggggccagtagatcttaagaacaggaaatacagcttctgtgttctatgctgttatgagccccatgttaagcccacttaattactgcctaagaaactaagatgtgactgatgccctaaaacccacaggaaacaaatatttctagtgaagtacttgaccttaatgttaatgtggttcaaccagaaagaccagtgagtattaggaaatgtagcaagtgtttagggcacacaaatgcattactttttccaatagcattttataataacaccaaattattaaagaaatatcttattttctgatgttctgaattaaagtcaggaactctcacacccacatctgtgcactaccagcaaactaaaacccaaggtcaagtaaacaggcttctaatgtgtgtgttgctcaaagacgaaagacaaaaaaaaatccagaaataggtcagtgtccctcatcatggagacatgggtgtgggggcactccctgccagtatgctctagtctgttagcagtcccagagttgtctgtgatgattttcctctgactgcattctttatccctctgatggagaatatgctcttgagttcattcattcctcacgggaatgaatttttgtcagataaatgatcactgtcaccaatgaagccttctttccttacattaccaatgaaacgtaagctcactcttaccttaggctcatgactaaggatagttgtgtcaatattaaagactttaaaatatattttatttaataaattatgaaaggtgtctttaagttcatggcttggggacccttgaattatggtggtgaagaaattacaacagggccaggagtcccttggtaacactgcatcagtagtcaggatgcagagggaggatagccagtgcccagagtaatttcttcatctcatacagctgaggagaatatatcataaaatagagccacacaggtagatccttcaattcttccatttaccacataagcatgcccagaattttcctgcaaggtaattctaaatcctataaagtcagcaattgatggtaacaaataatcagtaggactagttgttatttatcaactatttctactctgaccaacattgtgctgggccctcagtattaaaagtgtaagcaatctgacattccttttccagataaactttcaactcaggagaagacagagaccacacatgaaacatacaaataactaaaattggctttggcttacctataaataatgagcgttagagatttggtttgaaaatcataacatctgctcaatggataaacatgcttttattgtaagagtcttacatggaaagtatcttatttgcccatgttttcttgaagaaagagttcatgttttctgcacaatgtgtgattttccattatattgatatggtttaatttaaaaaaaaagtattctctctaacacagtttaatacctagtcacattttaaaaataatggctttaataagttagcactattttcattgaaggtgattcccttaatttacttttcctttaaaaagattatggagatcttctccctttccccttctcccggcgaccatgtatgtctgtctctcttagggtcctccttgtttcctagcttttctggtggtgtggattgtaggctggtaatcctttgctctatgtctaaaattcatatatgagtaagtacataccatatctgtccttttgagattgatgactaccttatatttcatcctagagccttcatccagtagctgatggaagcagaagcagtcacccacagctaaacactgatccagactcctataaactagttgcagagatggaggaatgatgagcaaaggggtcaagatcaggatggagaaacccacagaaacagctgacctgaacaagggggagctcatggaccccagactgatacctgggaaaccagcataggaccgacccagacccccagatcatgggtatcagttaggaggcctgggcaatctatgggccctctggcagtggatcagtatttatccctagtatacaaatgaactttgggatcccattccacatatagggatagtctctcagcgtagacacatgggggaggaccagggccctgctccaaatatgacagaatttaaagatcccccatggaagtccacaccctccctgtagagcagagaggggatgggatagagggttggtgaggcttgggggaggaggcgagtgagattgacctgggattaaaatgtaaaacaaacttgtttctaatttaaataaaaaaaatctgaaaaaaattatggagaaatcactccgacttctctgaatacatctttttatgtttgactcagatggatactattgtttattgggaattgagtatctacttggtaaaggacaatcacagagattctccctaccaatgtaaatttaatttgctgttcctactgtttatgccaacccttccatagactctcagttctcaaaaaagcattaaatgataacaccaaggatgtggtgaagatagagcttcttccacattggttagatcgcaggaaatgggttctggacaccctgtggaggctcctgagtgttgcacattaaggtctcatctaagcacagcatcaggtcccatcatcacaatcattttcaagaggagagatatcaaatgtcgcaagtagcatttagctgcagaagcagagggatattagggaagatcatcaacattaacacatgtcaggaatgtaacgggattcacaggagtcatgaaccagagataattgcccccaaattacatttcttatgtgcatgaggcagtaacaatgggaaaacaactagaaattcagatagcatgactaatcttgcacctgtccaccatagaaataaacagactgaaagatctcagaagtcacagagaaaaaagaaagctgacaaaaaaattaaactggtatttttgtaaagaaaaaaaaagaacatgtgtatatttccttactgtgatctgaagttgaatgttaatatatgtcttcatccatatatattctccagcacagacatatgtagatagataatatctgacaacactaaggaaaacaagagacacatataattaaatgcattcctaattatcaatcaaacaaaatataatattgtaaactgttttaaaggatttcaatcaggacaacagtggcatacacctttagtcccagcacttgagagacaggcaggtggatctctgagttccaggccattctggtctatagagcaagttccatgatagccaaggctacacatagaggaacctgttttgaaaaacaaatgaacaaagaataaataatttaatatgaagcttaaagatgttgagaataaattgaattgactgttgtaattacttcacaggcataactcccattctgaaataaacaaatagaatggccatgttatttagcgactaccctataatttattgtttacttatgaatgtactgtgacacttgtggtttcaaaatgcaaaattcctaattgagagaaattttatcttatttagtgaatactgtgattatgttttaaaagaacctagtgagagcatatggaccccagtcataaagctggggaaccagcattggactgaaccaaaccctctgaatgcaggtaccagctaagaggcctgggcaggctatgggacctctaacattggaaccagtatttatccctagtgcaaaaatggacaccaggagcccattccctatagagggaaaatatttcaacccagacacaagaaggagggcctatgccttcccccaaatgatgtgacttactttaatgatcccccatgaaagtcctcaccatcctgggtgagtgagttgggggtgggctgtgggggttggtagcaggcatgggaggatgggtgggagagggaatgggggattgatatgtgaaatgattgtttctaaattaaaaaagaatttagtatgttctgaatttataaacttcaatatccctttggagaaacacacatatgtatgcaggcataagtatacacacatacacacacatacacacacacacacacacacacacacactaaaacaagtatttcatatgacacattgagtgaatggtttcaggcttacaattttgtttaaataattgatattttgtgggttgctttttatttctaacttaagaaatttaattctccaacattattaatgaataggtgttttttagtgttttaagaaacagaatgtaggatggtttgttaggtaataaaaagatgtactatgatttggaataatttttgcatataaatataaaagtgatgacaaggaacacaaaagattggatatgatagtagctcaataaatgaagtgctcatgaggaccagagtttgatcccaggtcccatgtgaataaccaattatggcaaagtgcttgttatccctgaattggggaaggagagagaataacccctcaggcttactgcctatcctggaatactgggtgagcttctatcttataggaatgtttgtcaaagtaaacaattaagcaaatatacataaagttgacatagattaacttgtgtgaaatacaaatacatattgaaatgtggcattctagttatttccttgaaatagttttgcagagactaattgaagccacaatcttgtcaagtagaactacattttcaatatgaaacatcatggaaaacaggttcttgccatataatttacattttaagaatttacttcacaatcacaggacaaattaataaattcattgtattgtcaaaaaaattccaaaatatttacaaccagtgtctacacattgcagtttagagaaactaagaatggataaagtttgttacgataaatatttctgccaaaagccgccgagccccactgccacatgtactctttacgcaagctgcgtaaatgaatacacagaaagacttgtattagttcttgttcaaagctgcttggccaatgactaggattcctcatctgttagctcagtcttaattatcataaatcgatatattttataagacttatcttattggatgctttattggcgtccctccttcccagtggctcacatcctgcctctggaggaggcaaaggggaaaagggacccttcctgtgtcttcttcacttaaatatgagtatccttgctatgtcacttcctgcctggatcaccacttctctactgcatttcccagaatcctctttgactcctagtcctgtctaacttgcgatctcattggccaaacagtattttatttaacaatcaataagataaacataaacagaagtacttcccccatcaaaagttgtcttatggcactataacaagattacctaaactgagattattgtgtctacactgtttgctccgagccattcatgcttaaccactatgctgcagaggttttttcaaagtatgcttgaaattaccaagcagaatgacgtacatgcatacacatagaagctgttattctggattttcagaaacctctatctaatgaatgcagtatcaaatatttatgaagttcttgaactgatgaattgtctgtggtgaagcactcagataggatcagggatgcgagattaaccattctttcagggattttcttgtgtaaggcattcagttacctttggcctcacttagcacaaggaaagaggttgcaaaatgacagggagttattgtagaaacacccttagaatgctgattatgataaaatagctttatgtacaggataacataatgaaggttcattccttcccttggtttcaggatagggactcaagatcttaccaccttgctgtgggaacttggttggcatttatcttgctgccatgcatgtgcatatgaaaaattttagctctgtgcaccatggtaagtgtttttcctaaagtaactttctaagacacagaacacagaatagggtactttcttaaacttctaaagctgactctatgccatgtttaagctaatctgtgaataaagaccagcaagacttctgctataatctgatctcagagaaggcagcaagttcacccagctatatattgaagatcctaaacccaccagcagctctggtttgagttggatttgcattttttcaggaaattaacatgaggcaagcccttgtctttgatctcaatacctctaatgtgccatttaccacaggacattcagcagtgtttacaatgacctacaaagtttgtctaaatttcaccccaatgtataccttgagactaatttctcctgatgcacacaccaaagtaaaattatattgagtcacctaaattagaatttttttattcactctatttctccacatcatttcttccacttgaggagtccctcctttcgtaaagtatgagaaggaaacatcctcaccatttaaattggggttgaggtgttccttgactgcttgatgtacccactgagaaggatgaggcaggtctttcacactcctgtcttattacttgtgatctacaccagattccatatagcacatacttgtatgcattttaatttcaacaattctgtaagatgctattcattttgtggggcatataaaaggtgacatcaaaatatgcatcatcataagaagttcagacagttcagtttgttggtcaaaactaattaattaaacaaaaatcaaaattgatccttaaggtaacaattaggctttgcttaacagatctctttagaattctcaatggtggaatctcaaatggttgaaagacacataagaaagtgtgaaacatccttagccatcaaggaaatgcaaatcaaaacaactctgagataccatcttactcctgtcagaatggctaaaataataaacaccaatgacagttaatgctggaaaggatgtgcagaaaggggaacactcctccattgctggtgggaatgccaactcatgaaaccattttggaaatcagtatggcagttcctcaagaaaatgggaatcagtctaccaaaagatccagcaattccactcttaggcatatacccaaaaaatgcacatttatacaacaaggacatcagttcaaccttgttcatagcagcattatttgtaatagccagaacctggaagcaacctagatgccccccaactgaagaatggatggagaaattgtggtacatttacacattggagtactactcagtggggaaaaaaaaaaaaacaataaatcttgaaactctaaggcaaatggatggaacttgaagaaaccatcctgattgaggtaacccagtcaccaaaagacaaaaatagtatgtactcactcatatatggattttagacatacagcaaaggagtaccagcttacaatacacatcgccagagaagctaggaaacaagatggacccttaacgtgacatggatggtcccccagttgagactaaagggacaagatcagctaagctaattgggaccatgggggaggggagagggagctagaagaaagagagggggagaagagaagtggagaggaggacatgaaagaggaagatttagtcaggggaaggattgaggagaacaagaaaaaagatacaacaatagaggaagccattataagtttaaagagaattctggcactagggaaatgtccagagatctatgagtttgacaccaactaacaatctaagcattggttgagaggctaccttaagtgcccttctccgatgagattgatgacaaccttatacaccatcctaaagccttccttcattagctgatggaagcagaggcagacacccacagctaaacactgagctgaactctttaatccagttgcagagagggaggagtgatgagaaaaattggtcagaaccagactgaaaaaaaaaccacagggacagctgacctgaacaaggggttgctcatggaccccagactgatccagaggccctgaacatggatgtcagtgaggaggcctcagcaatttatggggcctctggtagtaaacaagtatttatccatagtatacaaatggactttgggcacccattccacatagagggacactctctcaacctagacacatggggagggcctaggcccttcttcaaatgatgtgacagaatttgaagattcccccatggaaggcctctacctccttggggaacagaaaggggttgggatagggggtagggagagggaactgggattgacatgtaaaagaaggttgtttctaataaaaataattctctttaatataaattacttatagactgcaaggtttttctttttctcattgttcctaggtacaaaataatgacaaagtagacaaagcaaccacccaattgaaacaaaatacattagcaagtgcattgtagaatctagaaaatccttttaaatgtagtatacttggaaaagtatttttggattgatataaatataatagcagaatattgaataacaaccttcattatttagattctttttaggaaattctcttaagagttaccttaagtaatcttatagcccatatttcttactaattttaatagtttatattgctttatcatgccttcatattgttttaatacttattttctcacacttatattagacttaattttaaatgtccattatcaagttgaattgttcatgggaatattccattgactactatgactatgatgtgtactaatacaaacatcataacaccctcatttaacagtttgatttatatgaccacaggatactgctaataccagagttttcccaatgagaatagtagagttattacagatttttgcaatgtagacaaaagagtctgtaacagaggtgtatgctctggaacagttttataagtcttcatttaaactctgataaggcattatatcttcaacggagaaagaaaagaagtgcaacaaagaacttcagagagagatcagacattctgtcttggtcacttggtcacggggaatttaatgtgatagggagacatttaagtagagatgtctagcagacagaaaaagataagagaccagacagaaataaagaggccagaaacaagatatacctcactatcagcacagacagagagctgtggggaaatgagacatctgtgattatagtgagttcaaaaagctgtgaaaagtccaaggaacataaatgaccattggcatccatgaaacaggcatttgtggtcctaatatctatttatgcaaagccttcacctgcattatgcaagggtggtaatgtaggaagagagatgatcattgttatttggcagaactcagtagtctggccgattgattgaattgctgtgtgtttaataggatggaaacatctcctaaaacaccccagaccactaatcaagagacataatagaaatgaataaattggaataaaggttctactgcaattttctttattgatgcattctacttccccagcaaaaataaggcttcttcaggttgtctgtccattggagtctgcttctctaagcatgtacaatgtaagcaattggcaggactctatatttctgagaacatcctgtgtcaagtcatctaaacttctcaactataatagttacacaaaaactgatatgacaattaaatgctctagaaaaagaaattattaccattcacatcaattcattagtaagtaccaatatcatttgcatttggtagatgagaaatggggagaacagttaaagccaataataaatcccagaaatggcatttgaacctaaattgcatgttttcgtgtgtctgtgtctgctactgaatagcagttttctgaaagggagaataagtactggtaaatagtgcagtgtttaatttgcaatgaggattcatcttttataaaagtaaatactaaataggctttgtataataattatatagaataggcataaaagtacatagaacaaaggcttatctattagaactacgtgcatctgcaggaagcatctgccttgaaaatcaacatttatgtatgcatacagtgtttgtatatagttaacatttcagttaagatggcccacatatggtgatttgataagacatttataatgtaaatgaaatttttatcacctagtgacattttggccatctcaaaattgtgtgattcattacagatttaaacatacttatttcatttccagtttgttgtgagcctttttctgggaaaatgtgagaaatgtatgttttctctagatagggtactaaatctagaagaaataagtgcttctagccaagtgtagtttagtgaacctgtggtgattttatcatggttttaacaggagaatgggggagaagtttactcatagggccatgataactgacaggtatttgcactactcacagttccaccacaccaaagatgagaggtgcattgctggagcttcctacatgacctacatgcagctgtgctggtgagtgggtctcctctccctagtaattattactactgctataatctggttggcaggtggaaagagcttatgattattacatgttttaagtacttcctgaagcttacaagatgcttccctcctaaaccttgtttcattttcttcctgtgtctgaatgagaaactctccagaatagaatattttcttcagagaaaattgctgcaaaaatatttcagtgaagatagcaaaataatgtacattttttgtgcagctcacctctccattgagtttgggtcaatacatcctgagatgtgcgcaaacctgcccagctgcacattctgagcagatgtctgtgtacattgttatgaaacaaacaatgcttatcaatgttatcatctatacaatgtataggtgggaaagttacagaccatcatggacatatcaaggcaaattatagagtcctttctctttcaacaagatgaagaaacacacacacacacacacacacacacacacacacacacatttaaatttgtgtacgatttccaggaataattttaacaaggcatgcatttatatcaatcttaactgagggtcagagtaaccttgcagcagtatcttttttggtagaacaaggtagttatttcagatacaacatgacaattattttttatttatcagttattttagtttatgttttatgtgtacaaacattaattactgcttaaaacatctggaccctggtcagggtcatggaaaaaatcccaaatatgttgacaaagcaaagatgttgagggggttaggatgctgaggagtgtaaagcaaacacaaaatggaatcaggacaacatggggttacccttgtcatttcaatgatacagttgatggtgaagaatgttataagagctgtgcatgatcaaaagtctaggacactgaatactcacagtcactaatgattgacatgtacttgtaggtggagtccattgtcttgctccaatgggtacgtattaaaaatgcagactatcttgggaatatacaaaatggaatgaagctttatcaaagtgatttatagaaaacagtgagattgagaaaatattggcacttaaagaaaataaaacctaaaaaaataaaaaaagaaaataaaacctgagtgtatgcaggatttgtatactgtgatggaagaaactgaacaaaggctaaggtaattgctaagataattattatttctctaggcaatcacagactgaccaatggagaccaacatgttgtatgaatatccccatggcccaaacagggaaatgatcatagactgtttatgtggtgtctatatactgagtggtcaaagccctttgttagccatctttgatttgtcctttgtaaactttgtttgaccttacttgcctgttagctattacctctggctgctgttgttatcactgaccttgcaggtgtctcaatggtgtgtactaggcagtgtgttctttgtgcttatatttacattatcagggataattttatcatagcaacacaattatgaagccaaatattaaattactaacatggtaatttcccccaatttattgtatagttttcatgcaattccattaaaaacccatgagtgtctgtgtatatttacaggattatatatgtgtgtatgaatacatataaaccaatgctaaaattttgtatggcattacagagttctccctttacttcatgatatagccccatccttttgaactctcaaaggggtgagaatgcaggagacctgcatgagactgacatcattaatctaccaccatggaaagtggaagaagccaacacagactctagatttaaagtggtaaaggaagctactgggaagagtcaccttcattgttccctttctgtaagtaatctcaagaaagtcactatttcacaaatgagacttctgtggaagtgttgttttggtctgtttggttgtcccatctgtggtacataggcatttctctttctccaggaaaaaactcataaatcttttaaaatacagaagtccaagtgcttgtcttttacagtcaaacatggttaaagttgttcttctcaagatcaataacttgcaaaagctttatcagtgaagggttagggttaggggttaggttttgtgcttatgggttagagtttaggattagggtttgatttagcattccatttagtattagagttagggtttaggcttagagcttagctttaaggctacatctagtatttagatttagggttatgattagagttggttatggttagtttttgaattatttgagaattagggttagggtcataattatgatttgagttatagttaagtcagcagcttactgttgcagtttgaagcttaaaacaagagtggagttgtcccaacatgcaggatgccaacctggggcaagagagtcagggatagggaatggggacaagagttgcagaaacaacgacaacgagacagaattctgatcaagtggcaaactttacttttctcagactaggttatatagtcaggatattgggaggagcagaatggcttttttgtgtaccaggtgttagtataggcaggatattaggaagccacaaagaggatgtttggtaaagagttcatgagtaagaggtccaggaagggttgcctaggtgactgatcctgtgggtggaggactgggtcaagttgtttcttttcttgagctgaagttctaaatagctgctatgtaaaagttaactatgtggcctgccaagcatggcctaggatctcatgccaagccctgagatttggctcccagcatggagttaatataaaaactactcacaagtatactcctatctggaaactcttgcaaatgtaagttgataaaatattttttaatgaatgaaataatagaaaacagttgaatgcttttttaaaagtgaaggaaaacatgacatgatcaagaatatgagaaatacaagcatcaagtatgaattgcactaaaaataagcaaatgaggccaggtgttggtggcacaagcctttaatcccagcacttgggaggcagagacatgcaggtctctgtgagtttgaggccagcaaactctcgtctacagagtgagttccaggacaggttccaaagctacagagaaaccctgtctcaaaaaattaaataagcaaatattaaaaataatttggattaaagcacagtgtacaatatatagaaaaatacttttgcccttagaatggagaaagcctttttatcacagaatccattaaactaaaaccaaaaacttatagctggctaggaaacatctttcattgtcctcatatttcaggagaatacataacaggagaaaagcatgctaactaaaaatttggttgaaagagttttgaagaatataatatgcaaagacccattttataatattttgaagaaataaaaaaaataaagtgggacagtggagtaagcacaggaaatacagtggccaataatccctcaagaaattctgaattttaattctatgacataacagtaaattaaaatggaaatgtgagaagactacactaaatagactaaatggcattcacattttccagattccagttgttgaatattatttgggagaatgagaattgatatgctgttggaagttttatgaataaggatgaattataaaataataaaaataataataataataataataataataataataataataataataagcaatcaataacttggaagctacctccaattgacaaccactcccaaatgaaaaattagttttctccaagggagtctcactggggaaacagaacactctggagggaaggtgtcattcctacaagtagatggacaaaaccaataaactcagtgttatttttggaggttcttagtctcatactattttgtcaggtttctattgttattgtttgtttgttttgaactttacatgtcccatacaaatgtatcattatttccatagttcattcttttggttttttgaggcgcccaccatacagcacgcaaaaaaatacagaggcatattcttagttatgagtgacccacctgatctctgcttgtttctagccagcttttctcatctttaattaattcatttcccttttccctctgggcttctatcattcgtaactctgtatacttactttaactcttactctatggctggctgggtaactgggtgattagcccccaatatcctcttctcttgctccattcctcctcctcctcctcccttgtttctcctgctatttatactctctgccttccagccccacctatccttgcacctgcccattcagctctttattagactgtcagttatttcatataggcaatgaattacagcttcaaaaagttaaacaaatgcagcataaacaaaaatcacacatcttaaaataatattcaaccttagtttccacttttatgattttatgggatttttgtgtgtgcaaatatgtgtgtctccatgtctgtgtatttgacacttttctaggtttttttcttgtttttgtgctatgtatgtttgtttttatcttatcctgttattcttattatttttatatgcctgtttgtattctaatgagagagaaaaggaaagggtagatttgcatgggtggagaagtgaggcagacctgggtggagttggagaaaggaaaatcataatcagaatacatagcatgaaaaatatctattttgaacaaaattaagtgccactatcactataagtgttaaatattatattaatataaatgtcataaaatactagtttactctaatacttatcagaataattgagttacatattaatggcatatgcatattgtaaaatctgcattattgacattgtgcttgattaataagttcagaggtaaatggcaaagaaattggtctagcaatacaatattattgatgtttaaatctaccaactgaaagtctcttttggagcccataaaaatggcatcacttcaacttggcttgagatcagggagttcaaaactatccttactcttccaaggttaaagtcataagacctaaagatctaaggcatggcaactgtaggatgcttggtcttagaggtggatgtcttatctaaataagagactttgtcggaggtatggttattcttaacactcaaggccagataacgtgagatttggcctatggtgttaatatttggagaattaaagaagaaagtctgtttcttctctgtatcatgataaaaaaagtcctttgccatttctcccattttagtttgggtatataagaaagttaagaacaaacttgatacattcaatattcactgggtttcccttctgagtctattctgtgtctctgtcttttccttagtatcattacctgcattttcttaatccctactccctgtatcacatatgaactgggaaagttggctagatctgactgaagcctcacaaagtcgggtgtctagtactaacagaaagaagggttactataagtcatagcaatatagtagtcagtgtggcaagagaataaaggcactgttcaaaatccagttctcttgcaattgcatctatgatttcctatgagattcatattaaattttctttaaatgaaaattattatctgcagggtaatccagttggcaagatctatggtgtcattttattttgccaactcctctttatcatcgtagaaataaacatcggcttcataacatctaagatgttgtacttgggtcacacactcaaaattttctaggctaattaataaaatgtacagtgtggcaggatatagctgtaatatttataaatttagtattttatgaattacaatgaaaattctagtcttcaggttttggttccaagataacacaaaacagaagaaacaatgctagtgacaaaaaatataaaaaagctggggccatctgcaagcaattctgtgctttgaactatatccagtaagtccccatgataaaagccactaaaaaccctgtagaggctgatgctctcagggacatatccaaagcaagtgtttttgatgcttatgtgtttgacaaattctgtcaagctgcattactgcatgagctgtacaatttatagcatggaagtaaggaattgatattgttggctgagtgatggaaacccccaccatgacttaaaacagtggttctcagcctgtgggtcatgaactcttgggggtctcatatcagatatccatcttatcagatatttacattatgattcataacagtagctaaattacagttctgaaaaaacaataaataatatcatggttgtggttcacgacaacatgagtcatgttttactcatgttttacaacatgtattactgggtcatggcattacgaaggttcaaagccactcacttggatgctggtactacactacaacctacacaaaagcaacataaatatttgacaacatgaggaaagaagaaataaaaacatgttggaaggataaaatggatgttatgcttaaaaagaaaaagaatgaaattctataaatagagcgaattaagaacaaaattatatttccaataatgtcagaaagaatatatttctgactaatgtaataaaaagtgtgtagacatacatattgaaaattatagaatattattggaaaaatcaataaagatgtgcatatatagttagtaattttcacatataggctgacataatatcgtgggcaggggaaaatactcctcaaataaatctacatcattgatgaaatccttatcaaagtttcaaagtattgtggtaaaaagaaaacgctgacactaaatgtataaatgcaaaaaataccagtcaaaactaccttaaataaaaaacagtagctacatttatccattttaagttgttttacacattacagttatctatataaattttaacttgtataggggacaatagaattgagtaaatacaatcttgtccaaaagtaactgagacacttaaacaatatgttcctggcaagactgatgatgcctatcaatgggtcaataccaatggtcttgggacaacttgacctgtttttacaaaaggataatatcagatttctgttctgtattgtttacacaattacttaaaatgcatcaaggaactacatagaatttattgccataaaacttgtctcataagaatgtgaaccttctaatacagcataaaaaatcattataatgggaggccgggtgttggtggctcatgcttttaatccctgcacttgggaggcagaggcagaggcaggcggatctctgtgagttcaaggccagcctggtctccagagcaagtgccaggataggctccaaagctatacagagaaaccctgtctcgaaaaaccaaaaaaaaaaatcattataatggaataaaaagttcttaaattgataaaaatcaacaccacttgtttgtcaaaagatgctataagagagtagaaaactccctacacaatgagaaaaaagtctgaaaataaaatatcagctacacagcatgtagccatcaaaaaaggatctgtgggtaaaagtgtttgccaccaaattgttgacctaatgtggatctccagatccacattgctgaagaagaaaatagagtgcttcaagctgtcttctgaccttcacatgtgctctcaatacatttatacatgaataacacttgcagaataaatgcatgcagtaaagttaaaaaaatagataggtatctaatcctttcaatatgtggagaactgtagaaagtctactaaaaattagtattaatgcactttttttttatacaggtttctctttgtagctttgtagaccaggctgacctccaactcaagaaatctgcctgcctctgcctcccaagtgctgggattaaaggcatgtgccaccaacacctgacttactaacacactcttaaaagagatataagttgaataaacatttatctgaaggaaatatactcatatttaacacatccaagcaaagttgctcagtgtgattagccattagatacaagcaaagctgtcttaatttgttggtgaaaatggaaaatgctttatcaactttaaagacaacattgtggcatttttgtagaagagtcaatcagggattatcaaatgacctagcaagttcactcacacatatatgatcaacataactgataatatatgtacagctacatttcattagtgtatatattattaataagaatgcaaaatcaggagaccatcaaatgcttattaagaagcttcatgacaatgtattatttaatcatggaaaatgtctacagctgacaaagattacacactagataatgctactgataaatgtcatccacagatggaacttcaaaagagagaaaacacatcagtgtttaaaattggtaggtctcaatatccatgggggaaagtgatcgactgctgttaaagacaaaaattgtgttagggctgatgggaatttctgaaagcaggcaattgtgatatgtaaagagcatttttattttctaagaaacagttaaatgttatattcaaaatgaggaatttttatgttacagctattgtattatgtgagttgtatataataaaaattatttagctgaaacaatagctaagtgactctaaagtatatctaccataggtactcaatgttataaaaaacatacgagcccattttttttgtgaggaacatcatatcatgtagcctggaatggtcttaaaatcactatgccctagaacaattgttctcacccttcctaatgctgtgaccctttatattacagtttctttgtgctgtggtgagccccaaccataaagatgttttcattgctacttcatgactgtaattttgctattattatgaatcatactgtaaatatctcctgctggtcttaggtgaccctgtgaaatggtcatgagctacaggttgaaaaccactgtcctaagaatgactatggactttgatcctctttcctcctttatctcccaagtcctggaactacaaatttatgttgccattcctagtcatatttctaattttacattctagtttgtgaaactgaacagtttttccctcatataaagttgtttccatcaaccatcacttttattctaaatttgtcagtaatgtctgcccttgtttgtttatgaaaatgtagcctaaggccaagctgttggctgcctattaaatgcttagtttctgtgaagcatagcctcgactctttctgcatgtactgtattcacttgatagcacccctcctgttaagagtttacaagtaaaaatgagaggcaatggtaccccaagctcgacaaaaaaaggtatcaaaaccaaccctcattacagtaaggagtaagcacaaatcatagccatatacattgatagtcttactgaccatcattctatgaaagataagttcaattatgaaaaattaaaactaagcctttgaaactgaggttcaggttgcttcttttatcaaagctcaacaatgacttttagtttcataatgatatacaaagctctagaaatccaaggtcaacttttcctcatctactcatttattcttgaacaggtatgattctctttccatcccctaaacatctaagattagagttatcttggagcagtgtttcgtacttcctaacaagcaacttcataatcctattgtgttaataactctaccaagatagtatatgtgtttaatccctgcactctggaggcagaggcaggtggatctctgtgagttcaaggcaagcctgatctacagtgctagttagagaacagccaaggatgttacatggtaaactctatctcagaaaaaaatcaacaagagatagagagacagatgaagagagagattattttctgataagttttacttctagctatgatatataagggggcagatttcatcaagataagtcaactagaaacatttgaaatatttaacgagaaacgtttcacacacacaaaaatttcacatcagcaaatatgtagtttttttttttaaaaaagagcatgttgtaggaaattttctgatattttcataaatatcttgaacgtggaagccataaagaaaatgatgacttttgtaagtaaaatcaaggactcctcttaaacaaaaaaattaacagctcaaaggtattgttttacaaggtgaaaaattatgaggcatcttttataaagacactttccaaaatgtgatgagaatcagaaatataaatgagagcaagttttaaaatttttgaagggtccattagcaaaatggggaacaaggaggcaaataatccagagggtaagtgtagaacgctaataaatctttactaatcagaaaatgtcaattgtagtaataagctgttaccttatatctactatattctctgtgagcaagaggagttttcaatggccatcatttccaggtataagacagaatcctgacattggtggaattttaaagaaggatttgactaatatgagacgtgacatttattataataaatgaaagttctaggtaggcaccagctatacatctccatgtagtaatatgcttttaccatcagtttttggagagcaatccatagacttggcaactcccaaggttattagagggttcccatgagctcccttaggccaatgatttcattagatataacccattcatggcactgaaagctttatttggtgatgagagatgtctagttggaggtttgtctcctccattatttagtgattatatttaagtcacctccacaaaggtgcatattttaggaatctcctactgtataattattccaaacacccactcaaatatttcttagttttagttgttcctccccatattcccttctccaatatgccatctatccatagttatctattatatttccctttcttaggttgatccaatcctcccttcaattattttctttatgtctatcctctatggttctgtgaattatatcctacttattgaatacttaacagctggcattcacatatgagtgaaaccatacctttcctgtctttttaggtctgggttatctcattcagagtgattatttatacctctatacatttacatctacattttacttcagttttaaaaagtttggcaatattttgtttttcaaatgcaccacaagttctttatctgttcatccaatgatggattggacatctaggttattatgaataaaacatatgtgaacatgtttgagccaagtgtctctgcagtagtgtgtagaggcctttggttatatggtcaagagtagtataatgatacattgaggtaaatccattcacagcttcctgaggaagagtcacaatgattttcatagtggctttgcaagttttcacaaccactattaataaataagagtttcacttactctacatactcactagcatgagctgtcatttgtttaatggatcttagaattcttaactgttgtaagatgaaatttcaaagtggttttgatatgaattcccctggtgactaaagatttcaaacatttccttaagtgcttcttggccacatgtgttttcttatttgggaattctgtgatgggggatgtccttctgtatgttctgaatatgtttcctttactagtttatgaataaaactgttttggccaatgggcaggcaggatgtagccaggtaggaagtatagcaggactaccagactaggagaatgctgggaacaggaacagagagagagtcatgagagagatgagaggatgctatatagttgccaaggcagagggagacgatcactggaaagccaagactatgtggagatacatagattaatagacatgggttaatatttaaggacaaactacccaataagaatcgtgagccatcagctaaacattttataattaatattagcctctgggtgtttatttgggactaagcagctgtgagaccaggcaggacagaaatttctatctacaattctgtatctaaatctgccccatgttttaattgagatatttgttatctttttgtccgttacaactgattagtgttcattgtaaagaagaaactcttcatgctattgaatgagaaaggtaaataccaatccatatacgaaaccttaaatctacaatgatgacctatatacaagttatgctagtgcaattgtggcacaaaacttgttgaactacacaaccaatatctgatcagatttaaggcacactccatgagatggaatccatccctgaaacagcttgggtggccatgaacctgttagcagataggccagggacctaggggaatatgatatattactgttctgccaaaggaatatagtaatcaatggctcattaaaatagtctgttatactcatagatcaaggccttgctaagccgtcatcagagaagattccttatgcactggatgggaggaaatacagaaacccacaggtggacaatatgcagagagtagcagagtacttggactactcacttcttaatgtgatgtctctgttacatcagtgttttggagtcagggaaccctgtgacagctgaggctgaaatattgcaagagccaaagggcatgaaggacaccaaggaaacaaggccttataaatatatcaggatcattgtacatacaaattcacagaaattgtgccaacatgcacagggctatcaaaggcaggtgccagatagtgtccaagcactgggaatggaattggacagaagctcatattctattacaaaaactctctcccctaactgataatgaccccaaaatgaaaaattagttttctcaaatgaagtatcactgggtataccaaccacacttaaaccctaggcctgatgccatgtggtacatgcccaacagaaaatgaagagctcaatgaagctttttctaattctttctttccttctttccattctcttctttttttctcataatgctttctctaagcatttttttcttttcttactttataaccctagagtcctttctcttacatattacaattcacaattgtgtgtttttaggggatttctgtgtacatcaatatgtatgttacatctgtatgagtatcttatgttttttgctaggctatttgtttttctattcattaattttgtcctaaagaggcttgtttcttttttactttatcatattatttttcttctttgtttagattttcagatgtattcttattttctaatgggataaaaaaacaagaacatgtatttgtgaaggtaaacagatggaaaggatttgagaaactttgtcagaggagggatcacaaatagaatatactgtttgaaaaaaatctattttcaatgaaatgaaaaagaaagtaggattgtattttctgacacaaattgatgtaaataaatatctactcttacatcacatagagaattaataaaaggccaaaaaagaactctacaaaagtcctacattgtgaaccaacatgtttattttcatacttccaggattatggatgagggttacttgaaggtacagagaaattattctaagacagctgcatcaccaaaacagtcactccagcttgactaacagctcatgagaaactggaactctggagcttggtgcacagtttgcaggcagcaagaaagttcaccttgtctcctctggctgatgaactggcctggatctcctcctcagttcttactgcttacagaatcttaagaagggaggggtctgtgcatcttaccagttttaaggaactttctgaattttctgagttgttgacttcttgaatgtggaacattcctctctctctctctagatctctctctctctagctctctctctctctctctctctctctctctctctttcctatatatatccacctgtctttgactcctgagttctgggattaaaggtatgtgtggccactgcactgcaaacgctattttattggaaacaaaaatttatttgttacagaagagtaaaatattttcagctggaatatgtagaatgaaaaacaaaagacccagagagagatattgagactcaacctgaagatcagggaagtaaatctgtcaagcaacctgaaagttcttacctctaaaagggccagagtatttctattctcaaaatgactggagaatgactgtctgatactgagactttgctcctttcttatatgccttcctaatactgggattaaaggtgtgtggtcacgggtgctgagatcatctttgtgtgagctggttttctttaggactggatcaatctttcatagatctgggttgccttggactcacagagatctgtctacctcttaacctgagtcctaggattaaaggtttgtaccaccacctctaagcttctggctgctgggatcaaaggtgtgtgtcttgattctgtagcttgtggctaactgctttctgaatcctcaggcaaaatttactgaatcacaaataatgtatcacaataggaatatttattagattgtagagataagccttcattctatgtcatccataaaagaaatgtttatttctcattgaatcttcaaacatccatatgtgacattatctaaaaagctatagccagttaaaagattagtgtgaggtagattctttaattccttaagcctgtcagctgtacaatgatgtgttgattgtaaaattaaccttcaccagtgataggtgtcaaggtcacaataaagaaagaatagacacttgccatcaagaggatgctgctgctaagcctgtgctactggagtggttcctttgtttagctttttaatgaagatagaaatttcagagttcagaactcttgctttttaacaggactctgcatattatgcatcctgaaacccaaataacaactaaaataataataaaaaagaacctacaacaacaaaataactcctagaaacaatgatatgggttttgacctcaattccataagtgctttccccttatttctgaaagcatcccatgactacaagggcaggcacatgtagtgcagctgaattccccagcaggtgctttgtggtgagcaacagccaggctgcaaagtcagaggagcagttaaggacttaaatcagaaatgaaaatggcatggcaccatgtctagtctgtggggaaataagagagtagcagatagattagaggaatcacaaagagtcaaaactatgtggcaatcagaaatccagggaagcactcacacaaaacaagaaggaaaacaaaccctcacaggctgtggaaaactcactgtataacagtgcccaattctcatggacatttgtgtatagaattccttcattggttgtgatggcgtaccactgaaaataaatggacataggttatagtgtatttttaatgttttaagtgcaggtgacctctttctcaatttgggggaaggcaaataggagcagacagcgtgctccagcacacaccaatagtgatgacacagctttcacatgatgatattatatagatatgggcattaactttagctatgtagttagaccagtactgttggaaaaactctcatggtaacatatcatagccatggggacaatctatctatctacctacctacctatctgaagtatatgattggctgtgattgaatatttccttatttgatgttattgtgtagatttttcctcagttcatgacatagctatcaatctcataaccatacaatgtgatgatgtcatttaacaccaaagaaataagcaaagcaatgaagtggagcaggcagtttggagaatgacagagcctgctcttcttgacaactccttattgtttatacaacactgggctataatattaactttatacctccagtcttcctgagttctatgagctacacaatgaatagcatttcaaaataatggtaaaataattacaagtatatttgtaacttgataattacatttggtgatatttgaaatgttttctgatcttgacaaaacagtttaataagaactgagaaaaatatctattttcaaacacattcttaataaattatatttaagtgaagctaacgttcataaatgaagaataaaattgggaattgtcataatttgaggatgtatttttaaatattagttttacttttgtcacttttgtgctaaaaactccctatgataaacatattcacatgcatagtagactcaaaagagataatagatatggtcattaaattttattttaatttatgaatgaaatataaattcaattgtaattaaaattttaagttttactaaaacgattttcttcagaatgtaataatcaaaatatcaatggtgcttaatgctcaacctttcccacatgagggatggactacgtcataagagcctgtataaccccagataatcacaactttctagggtgaaacagagcttgtgtatttctaaaactctggttacaaatgagacccttccccttctaatatggaaggaaagttaatatccagagttttctcaggtgtcttttacggccaaaagttcacttcttattatgaaatgtgagaaatgttgatatttaattgaacaataaagttttcacttaggtgttgtaatgagctggccatttgccctgtctctgccctcactctgaagtgttcattttcaactcttttcacactgtgcataatgtgatacaattgcaattataatatttttagcagggactattgaaataagctatgagggagaaagatgtacttctgagtatgaggtgtagcaagccataactgtaagatatctggatgaggaacttaaacctcaagtatgtttatacttaactgtatcagctttgtcacagctttactgtagcttgctattttatcttagtttagtttactgcatacaagcattttgcaaataaaaaggaaagtgtgtagtaattattccatgtgatattatgatgaagatttagacaccgaataacctcccgtgtaatgaatgtatcatttagaacaaggaatatgtgttcagtatcatacagtagtagacacccagggaattgagtggttttccctttaagcctgctgttaaggggaataatagaaaaaatgctggagcttgagtaatcaaatagttgtttatttacagaaagtggattttttcagcaatggcacaaatacacttaaatataaggtagcaaaagtatgaaaactgcagttgaaaataaaatgtgagcacaaatatccaaaaactacacttaagaacattgaggaagtggagggaagctggaagtatggtcaccctggaacatagaatgaagggatcaaaaaatcatcctctatactgagggcaatcatggtaacaataactccaatcacctgcagtttcatgcatttgacagatacaagaccagctctgcaggcagtcaatctggatggggagaaagctggtccttttgcttgtgaagttactaacatttttcagaacaccaattttgctaaagcttgcaaataaggtttagaaggaacttctttaaactgattctgtgagaccaggaccaggaccaggccaagaccagaaattttagcaaaacaccagagaaccatatgcatcatataccatggttaggtagatttctccaaggaagactaaggacatgtgaaccaatgcatgaaacacaggaacacaataatgaggagcatgaccatttgtgcaggtgaaggggatgtctgatagcatgcaatacccctacatcactaaatctctccacatattagctacagaagcaatgtcttaacactatgtggctgtacagcaaggactaaggacagagaatgttcagtttcatagaaattaagaacaaattctggaaatccatagaacatcatactgagaagtgatatcatgctgcacacttaaaattcattgagtatattcctcattatgtgtgctttataatataatcaaacatacaactgtaataattattagatagtcttacaaataattttgttatctactaaatctctcttgtagaggtttagagacataaaagataacacacattagatgtccattaatttccagtttggaaaataatggcaattgttataaatccctgggatgaaacctacttgatcatggtggatgatttttctgatgtgttcatggtttcaattcgtcaatattttattgaatatttttgcatcaatgttcataagggatattggtctgtagttcccttttttagttgtatctttgtgtggcttgggtatcaaagtgattgttgccttgtaaaaagagtttggcaatgtcccttctgcctctaatgtgcggaatagtttgaagaggactggaattagctcttgtttgaatttctgttagaattctgcagtgaagacatctggccctgggcttttttggtttggaggtttttgatgactgcttctatttcattagtggttataggtcaatttaaactgcttatctcttcttggtttaattttggtaactgatacctatccagaaaactctccattttctatagattttcgaattttgtggaatacagcttttcaaagtaggacttgaagattctctggatttcctcagtgtccattgttatatcacccttttcatttctgattttgttaattagcatgttctctctgtgtctttggttagtttggatacaggtttgtctatcttgttgattttctcaaaaaaccaactctttgtttcattgattctttgtaatgttttcctactttctactttattgattttagccctgagtttgattatttcctgtcatctactcctccttggtgagtttgcttctttttgctgtaaagctttcagttgttctgtcaattctctagtgtgaattttctaaagtttcttcatgtgggcacttagtgctatgagcttgaaagacccccaagggagaccctcactcaaatcttgggaatagcgcgcacccagtgaggcactgagactggacttgctgcaatcacatgaggaagtttattgaaaaaggaatttaatgagatctcaagccagcatgctggggtcgaggtttagttatggactgctccaatgctcccaggtctgcatccatagccgctctaagctcattatagtagtacggttgttggacaagggcagctaatgagctggccatttgccctgtctctgccctcactctgaagtgttcattttcaactcttttcacactgtgcatagcaagaccgctaaggtcagggtaacaggttccctcttgtaacgagtacagtgatcaaattcatctataaatgaactatcatcatgataaatgactctaggcaccagctggaccaaaatacaaaagtccctagtactgttaaaaagtgaagtttgcaagcagggggtaaggccggtgccacaggcccaccaagtatctgggggggggtactagatattgattttggccatctgtcagggtgtcaatagttatgttacagaggggctggtgtctagtaggcactttgcctatgcatagtccagtgcctgataccgctgacagggtcagcttccgttgactcccccaggggaagtgaatggtcagaagtaacgttatagctccgcatttgagctattccttcataataagggggattagaagcaaagcacagccagcaagattgggtagcagtggggtttgtgcggtttaaaacgacgaacgcactagcgagcagatttacaggcgatcctcagttctcatagggtggaggagggacgtaattggattagggctggaaggggcctttggtgatggggtgagactaggaagtctctcaggcctgggtggggggttaccaagtgccggattaggtcctacgggtcatgcgggtggattttctatctttatcctgatagcaaaaaggaacccagggtctcccgttccagtatagtctctccaaccccagcagttgccttttacccattggcgatcttgttttccccgtgctgtgaaactaatattcagagggttacattagctgcctttgcatggcccctgagggccacccgaggctccaggagcacatccagtcttattagccgggtatttagatgtgtctctctctcctttttctggctcttgcggcgtacgacccttttttactataatcagatcccaggaagaggagggattccagtaggcttctcctgtggtctcacatccnnnnnnnnnnnnnnnnnnnnnnnnnnnnnnnnnnnnnnnnnnnnnnnnnnnnnnnnnnnnnnnnnnnnnnnnnnnnnnnnnnnnnnnnnnnnnnnnnnnnnnnnnnnnnnnnnnnnnnnnnnnnnnnnnnnnnnnnnnnnnnnnnnnnnnnnnnnnnnnnnnnnnnnnnnnnnnnnnnnnnnnnnnnnnnnnnnnnnnnnnnnnnnnnnnnnnnnnnnnnnnnnngcagctaacttacagatatcaggtgcaagatcaggccaccaagtccaaggggggtgcactgcggtttttgaccacacgatgtcgccttcttcattaagcacttcccatttcccatgcggggaacatgcgggttattccccaaggttggggctacggcgaaggcgcaacttaagaggattatcactggcggccactgtccaattattttctcggttgttttcattttgactgggtgccttttttatgtgggaagcatggatccaggcaacaatcccatctacctttactgccgtgggtgtagtcaacagcactagatagggtcctttccaccgaggctcaagtgtgccagcgcgatgtcatctgaccaagactgagtctccgacctggaatcgctggggcacctcggtggtccctggagtgtaggcttctttgatctaatcccagatctgtgttttgacaacttcttaggcctttaagtgggtaaacagagcagaggaggagggagagtgagtgcaaggatccaatatccgcctgactcagtcaaggggggctgtcccccatgtaggattttgtaaggggtaaggccgaaacgtccaggtgtgaatcggacactaaggagcgcaaaggggagaagggtcacccagtctttgccgccggtctcaatagccaatttagtaagtgtctcttttagggttctattcattctttctacctgtcctgagctctggggtctgtaagcgcaatgtannnnnnnnnnnnnnnnnnnnnnnnnnnnnnnnnnnnnnnnnnnnnnnnnnnnnnnnnnnnnnnnnnnnnccgttgtctgaaccaattaccttggggatcccaaacctgtgcaggatttcttccagttatcttcctggttaccatttgagcagtttcagacttcgtgggaaaggcttccacccatcctgaaaaagtgtctataaaaactacaaggtacttattaccatattttcctggcttaatttcagtgaagtctacctcccaataaattcccggccgatctctcctcattctttttccaggttctttgaacggtcgggcagcattggtcaaggtgcaggcttgacatgactctattacctcttttattattgtatttaatcctagaacataatgtttagaacctttgattaattgcttaagtttttcgtttccaagatgagtcagctggtgaattcatctcacatagacttgtccttctttagagggtagaatgattcttccatctttggtttttgccagtccaccgaaactgaacatctgagcttttcctgcacaggtcatatctttgattaaatcataatctttatagggatagacgaagctgggatggatgacgctggcttgtggggttctggcggggttccagtttcttctgccagcactaccgctccctgggcaacttactttgctgttagatcagccatctggttcccctttgtgactgggtcagcccccttctggtgtcccaggcagtggacgatggctaatttttgtggaagatgtatggcttctaggagggccaggatttcttctttgtttttnnnnnnnnnnnnnnnnnnnnnnnnnnngaggtaagcccctctgtctgtaaatggctccatgaatgtgagccgtggcgaaggcataacggctgttggtgtaaatgttgagagccttaccttctgccagacgcagagcttgagtcaatgccaggagctcagctttttgagccgaggtttcttctgggagactgctagcccaaattacctgctttccattcaccactgctgctcccgcccttcttttaccttctaccacaaaactgctgctgtctgtataccagttaggcacacccggccaaggttgtgcggtcaggtccttcctggtcccggtctcttcagccaggacgtcagtgcaccggtgcactggggtagagtccttcgcttcggggagggggtatcaagagccggattagggcctacgggtcgtgcgggcggactctctatctttatcctgatagcaaaaacgaacccagggtctcccgttccagtatagactctccacccccagcggttgccttagtcaggcggctgccacacaatactttctaaagcatgaggggcgattacagtcatatgctgacccagggtaagcttatcggcgtcttttacaagtaaggctactgcagcaatggctttcaagcaagagggccacccgctggcaacnnnnnnnnnnnnnnnnnnnnnnnnnnnnnnnnnnnnnnnnnnnnnnnnnnnnnnnnnnnnnnnnnnnnnnnnnnnnnnnnnnnnnnnnnnnnnnnnnnnnnnnnnnnnnnnnnnnnnnnnnnnnnnnnnnnnnnnnnnnnnnnnnnnnnnnnnnnnnnnnnnnnnngggtcaacgcgggagctgtgagcagggcagtctttattttatcgaaggccctttggtgttcctccgtccaggtgaatgggactttttctttagtgagtgggtacagaggggctgccagcatggcgaaccccggtatccagagtctacagaaacccacagttcccaaaaactcgtgtatttgtctcggagtggtggggggcgggatctgcatcacagtctttttccgtgcttcagtgagccaccgcttcccttctcggagagtgtatcctaggtaggtcacttccgagcggcataactgggctttcttggtggacacccggtaccccaattcacccaattactttaggagctttctggtcccgtcgaggcacagttcctgggtcaaggctgcgagcagtaaatcatctacgtactgcaagagagaaatctgggagtttcgtgccctgaagggtgcaaggtcatggtggagcgcttcatcgaaaagagtctgtgaatttttgaacccctgtggcaacnnnnnnnnnnnnnnnnnnnnnnnnnnnnnnnnnnnnnnnnnnnnnnnnnnnnnnnnnnnnnnnnnnnnnnnnnnnnnnnnnnnnnnnnnnnnnnnnnnnnnnnnnnnnnnnnnnnnnnnnnnnnnnnnnnnnnnnnnnnnnnnnnnnnnnnnnnnnnnnnnnnnnnnnnnnnnnnnnnnnnnnnnnnnnnnnnnnnnnnnnnnnnnnnnnnnnnnnnnnnnnnnnnnnnnnnnnnggacaggtcgataatcattggttccaggcttacgtaccagcaggaggggggtattccaaggggacctgcagggaatcagtataccttgttgtaacagtctctggatatgtggttgaatgccttctttagccccttgagtcatagttcccctccacagagagagttactctaggctcggggagggggaccgagccccgactcccctaatcttcctcgagggccaacatcttggggcccttttgtttcttttgggagaaatctctagcccagtgtcctttttctttacagtatgcacattggtctttttcaagttgcagtctctgtcctcctgggggttttcttgccctgttgcccaggtaacctgactgtcctctttctgaccgttctctgcctactactgtggccaaaatcttagtaaaattcctctcctggcggcgatcccgccgattctccctctcttctgcctccattttttttctttcttgtttttcttcctcagtctctctcttgtgatacactttctctgcctcttttactaaatcctgcaatgtataatcctggagcccctctaatctttgcaactttttcttgatatcagaggctgagtgtcctataaaagccatggctacagccacctgctgtccatccgaggagggatcaaatggagtatatctcctatatgcctccatcagtcattgtaagaagacagagggtgactctactggaccctgtaagatttctcttacctttgccaaattggtgggtcgctgagaggcccccttgagacctgccactagagcctggtggtagaccgtgagacgccccctatctcctgcagagttgtaatcccagtcacgggggagcaagggaaaagcggcatctataagattagggagattggtgggggtcccatctggtcctggaacattctttctggcctctagaaggatcctctctctttcttcagtcgtaaagaggacctgcaagagttgttgacagtcgtcccaagtgggctgatgagaatatatcagggacttgaggagtcccgtcaagcctgaggggttctctgaaaaggaggggtggttagttttccagttgtacatatccgctgatgaaaacagccaatactgcagtggaactaattcccctggagctgggtcgggtccataagctcataatggtagcacaacggtggaatcaggtcccgcaccagatccctctgggctgcggccccggcggcttcgagtcctggccactggccctattttggaggccagccgggagtccgttgggacctgtggggctgcatgagaaacaggttgaggatatgggggaggagggtggtcaaggagggagacatcataaatttcaggatagatccgcgaaggagctgttggatcaggcgctggcgaatctgaaggaggcactttccttgcagccaccgcaacagttgcagtccctattcccgatgtccaaggcttcatccagggtggcgggttttggactaggtcctgccacatgataatgtatggaacctgatcagggtatccccctgtggcctgaaaaataattcgcttgacagcggaaataacagatggattaaaagttccccccgaaggacatcctacaccgaaacttggccattcggaagaacaaaaagtccgccaaggtacttttctgaccttgacagaaagattatgagcccgagtcttaatgactgtccaatggtccagggtcagtgttagtggggtcgtcacagtctgtcccatgtctacctctgttacacacacgataaaaacaatcaccatgacagaaagacaaggaagcaaagcgagctgtcgacctctagtccaccagtaattctgaaaggaatcaggcggccgggaaatggccctttgacacagatcatcaaggagaaaacttacctcccgaccttctccgtggaggtccaccaggcatccctggtccttctcctgtcctcccgggacgtctcccagggtgaccaaacgctggacacctggacacatctatccccgtccactccgctcctcctcctggcgagcggcctctaaagagcgtttgcgaaaacgaaactgcgatcgcaccagatttttgaacaggccacaaacaaagagtcacaacagaacaaaaattcttacctccaagtgggtctaggacccctgggtggtcacgcaaatcctggacgagccccgaaatgaaagacccccgaagggagaccctcactcaaatcttgggaatagcgcacacccagtgaggaaccgagaccagacttgctgcaatcacatgaggaagtttattgaaaaaggaatttaatgagatctcaagccagcatgctggggtcgaggctcagagtagttcgaccccgacccaaacttgtgacaagcttataaaggcaaaaaccataaaggaggggagggggactagggaggaaatagaggaagcccaaagttacacattcagtcataaaggcaaaaaccacaaaggaggggggaggactagggaggaaataggggaagcccaaggttacacatttactcatcagttaaactatgtggacacacctggggtgtttgaacttttcacagaggtcgttgggacatcctgtggttattccaggagtggtttttttctttcttttttttatgagaattccgggagtggccacctgcaggggagggagcccccaaggtgacaagcccatgttcttatagccagctagtaatttttactcttcaagcgttcctcttagcaatactttcagagtgtcctataagtttggggatattgtgtctacattctcattaaatttctttttttatttgttcctcaatgcaggaatggtgcaactatgtgttattcaacttccacgaatatgtaggttttctgcaatttgtattgctgttgaattctagctttaaagtatggtaatctgataagatacaaggggttatttcaattcttttgtaactgtggaggtttgctttgctgccaactatgtgataaattttagagaaggtgaatgtggtgctgagaagaaagtatattcttttgtgtttggatgcaatgttctttagatatctgttaaacccagttgggttataacatctgtcagatcctttgtttcttttgttaaggtttctgtctgctggtcctgtctagtggtgaaatggggtgttgaattcccctactgtaagtgtctgtggttttatgtgtggtttgtactttagcaatgtttcttttacaaatgtgggtgccttcatatttgtggcatagatgttcaggattgagacttcatcttgatggacttttcctgtgatgagtatgaaatggccttttcatctcatttgattacttttagtttgaagtctaatttgttagatattaggattgctataccagcttgtttcttggtcccatttgattggaaaatctcttcccaaccttttactctgaggtaatacctgtttttgaatttgaggtgtatttcttgtaaatagcagaaggatagattctgactttgtatccattctgttagcctctatctttttatgggtaagttaagaccattgacatttagggatattaatatccattgattattggttcttgtttgttttggatttattgttggtagtgtcattgtgtgtgaattttgccctcctgtttcttttcgtgtttggtaaaattggattatctattgcctatgtttttgtgagtgtagttgtgtttgttaggttggaggtttctttccagaaccttctgtagtgctgaatttgtggatatgtattgtttaaatctgtttttgtcatggaatatcttgttttctccatctatagtgattgaaaattttgctgagtgcagtagtctgcgttgacatccatgctcccttagtgcttgtaggatatctatccaagaccttctggctttcagagtttccattgagaagttgggtgtgattctcataggtctgcctttatatgttacttggcctttttccattgctggtcttaatattttctctttattctgtagatttggtgttttgattattatgtgtcggagggaattctttttgtgatccagtctgtttggtgttctgtaagcttcttgtacagtatattcctcattatgtgtgctttataatataatcaaacatacaactgtaataattattagatagtcttacaaataattttgttatctactaaatctctcttgtagaggtttagagacataaaaattacgtcttttcacggtgtcccatatttcctggatattttgtgttagggatttgttggacttgagattttccttggttgatgaatgcatatcctctagcaagtcatcaacaactgagattctctcttctatctcttgaattctattggttatactcacatctttatttcctggtcatttatccaggctttccatttccagcatcacctcattctgtgttttctttattgtgtctatttcagcttccatgccttgaaatgtttcgagtgtttcctttgcttgtttggttgttttctcttgggtttctttagattctttaagagatttgtttatttcttaaatttttttggtttgtcttttcttccatttcgtgtaaattttccttgcttttccttcaatttctttaagtgattatcttgtttcttctttaaaggtctctatcatcttcccgagataatttttgagctcaatcacttcttcatttttttgtgtcgagcttttcggttcttgtgttccattccgatgtcttcaggactgtggacatagccagccatacagtcctgggtctgattctgagtggagatttgtggactagggaagtttaattacccaatgatggtaaagatgagacagcaaacactatatcatcttatgagggttcccagctgttgctgagaagccacagcttattgagaactccatttaaatagtcatccaagggcagagacagcatcaggaagcatctattatgatgtatatagctaccatcaagtgattctattgactcaagcattacctaaataactcttggtcttgtaggcagagtcctcagcccagtcatggacctactcaaatctcaagccatacagatgcaaattaggaggtatattaccctgaggccatagtaaacaatagtagccatactggcaattaacaatacaatggtgagctggagctttctggtgctccattttactgaagctggaggctgagacacaaaatattccataacagaattatttgttctcccacagtcttgttggtgtggagtccctagattctggtggtttcatattggtctttctgttcttgagtgagttcttattctgtcttcttcccatatcttctgtctggtgcaggtggggtctctctatctcctcttgtgacctggtggtgtgtgtgggctaggacttcactgtccacagctctggattttcttgcctctcctgctactcacctcactctgaaggggttaggcctctcggtatgggataggtcggtggagtgggaatcaaaagagttgtttttatataagaaaaacctcctttaatagtttgtccttggaaagctttttttgttgttgttattcattccttggtgttctttaatatgataccaatttcccctttattagtatcataaagaatggcatggaaatgttttcagatctgacagacttggtcacatcttcatactaatcttaaatagatagatttataagaataatgacttgtgagttagaattttctttccatcaaaagtttgaaactcttgctacattttattctatattgtagcataaaatttaaggtacatttaatttacactgaaagaggatttgtttattgtgaaatttctactcttatagaagataaagcaatatgttacttacaaaagtcaatgatgctaatgtatgcacctaataacaaaatcaaatgctataagcatcatgatgtctaatttcacacattaattttgatgtgtctgctaaaattttgacaagacagtctactaagggcacaattctgcaaatggctatattttgaactgtttcttttggtaactctatattatattcaatttattaattgattttccatgttttatgtttgggtgctataaatttaagtgagtattttgccattattaattagctttgatagtcatgagtttaatgagttaggttctaaaatattacatccctttttaacaatatctacatattaactttacatattaagagatggttggaagatgaaaaagaagaaagacagactatgaaggagtttttaaataagccccccaaacctaatgtgtctgcagattctgtatgaccactgttttctgaatagagctttctttctgttagagtgtccttcatgctgtcttgggatgagtatttcctttgtgtttctactacagtcagtagttgctcagtacatgctgtcacatgtgacagtccctaaagtctaatgcaattcatattctctaggggaaaatcaaataagccttcaagtttcatgatgtctcaggaaacttgtgcctcacatttagaaattagtttcactgtctcttttaatagtagtcacatcatacattctcctgttgaagaaagttggggtgtgtattgacattttccactctaatgatcactataattcttttgttggtagttgaccagtttccaatcacttatgtgttttatttctcatccatgaacctaccagacttaatttcatcactcctccatttattcaaggttctataacacttgtgaagtacagaatcctcatgccttagaaccatttagtcccactttgatcaaagtctttagtcagcatatactgtgtctgaaaggttcaggcattatgctggcctgcccctgttacctggtggaacaggcagtaccctggtcagcccaaggttccatgggaactaagtctgcacgaaggtgcagaggacccctttaaaagacagatccctgcccatttatgctctctcttcctctctagtcttctctctgctcttctctcacctacattctctctgtctctatggcgactggccacggcagtcagccattacccctgctcctctttgaagggaccagttgcccctttcggcagccatgacagtaatacgtgctcgccatgaccttgccttggtcactaagaggtcagatgcctgcctcattgcaaggaaccaatcagaagttaactgctggcgctatcctttacagctttgagtgtgcttgacggacaagtgcacagcaatgacacccagagcatagcaaccaccctggtagggcctatgggccataacagccaattgctcaacaaacagggggcaagccctccaagcctggaggcacaccaatccctagcctgtgcgtagccctagacactccacttaagctgccctacaagatctctatgcagctggttcaaagtgtttttgctagccatccgccatggtgggtgggcgaaagacccaagctaacatggggttagctcattaaacaacaataaagcctcatgcagtttgcaggaagttttcaaatctgcctggtgattggggtgactgaggacctgggcagggaccccggaggcctgagttttccaggggtctaacatcttctctcttagtctccctactctgccgggcccatataataaactagccaacatgtctcatcttaaagctttctcttttcccctttttaaataaaaacataacattggctcctgacttggtttaggctctctctgtaagctctcccgaagcttgctgatgggataggctttctctataacttctcctgccatgggcacaggaaatttcggggatcctaaaatctgaactcataatccacttccatctcggctttttctgcctgcagcagactgagatgccagaactctgtacacttcaactctccacatttccaactaaggatctctggaactcactcatctgcttgttcactgcaatcgggtaagatacccataacttttcccatggggcagaaccagcactgcatttttgagatcactctgggtacatttttttggtttcggactgctgagcctctctcaggctttctgctgggtgatctcagacagagcaatcagtgccatttttggccttgcccacgggatatacattttatgggattttttggttattgccagggagtaggtaaatgagaggagttctgcctcccagtgggaactttctttcacctggaaatgtccttcatttttctgtttgttctctctctgactgtgtttcttcttagttggcaatgtctgcttgaaacactctgagagtttttgcttgtttgtttgtttgtttgctgttttttatttttccacaccaatgaggtttgactcatggagaaaaacttcttctggcaattaggaatgtgcttacaggggtcgccatctcggccatgtgcactaacctgggggcagccatcttggtcatgtgccatcctaaccacctgacctagcttaggcctgcccactcagttcagtcacttgcataggcaaacactgcgaccagacatcttgctttttatttcttctttcacttgttggatgcatttcctgagggtcaggcataggatcccgctccaggagcagtgctttttgctttttcaattcagaccactgtgtccttttttgcttttggggacagctgtgtccccttcaggaccaggccccatggcaactcccacaggcagatgtgcatcaggaggggagctttttgccagttttccacttgactcacccatgggaaatgcatagaggaacctttctggttgcagccaacaagcagataaacagacaaaacattggcttatggttgtcaccatctttgtcatgtaacctacctgtaggcatgcccactccagtggcctatgccagcaaacctgtctgctcgattttttatttctgccagatcttttttgctttttgttttattttatttttttctgtgatttcttttttcactggctctgttgtccatggcttgtttactaaatattgtgcctttccagggcgctctgtttaagtctactctgtccctttaaatctcctgtctttttgctacaatgtatggatcagagattacattctagttccccctttactgttatccagtcctgcttgtctctgtacctgtaatttaactttatacttatctagctctatatgcaacttaaattaaactatgctaagtctcatatttctaaattgctatgtatctttaaatgatggtaaacatttagagtcataaaggtctaatttaactgtacttaaaatataagcaaagtctatacaacttaaatttaactcatgtatctttaaatgatgatgaaagtttaaaatcataaaggtctatttcaaactaacaaaatatttataccactcaatctatcctgtaaaccatttacaaaggtacagcttttattacaaaaaggcatttttctctaactaaaggcaaacttttaactgctgagatactgaacagacagccctcaaatgctcagagatctagagaatatggcatttaaaatgttttgttaaaaagctttttataacagagagataggccagctgctggccccaccccatttcctccaagaagactgctgggcactgaagaaacttcatctcgagtcagtgacaacactagtcactgaacaaccctgccctttacctcaactgctgcaaagtactctagacctttgacaagttgacagtggaatcgattttccccgagttgcttgggccaacagtaggcgaggcttcctatagtctgtaatccacaggtcacatgctaaaagcaagaaggcaggtgtcctacagcccgctgttatggatggaggaccttggggatggctgtccatgcagcctgctggcaagtctctgttattctttaatcattaattcaggtaaaatcttatccttctcaagaactctgatgcttttgacgactgtagtcttgccagcttaaagcaaaaacagattccaggaacagttattttggggtttatctatgtgaagataggaaagtctaagatgtatgaaggtctgagaatgtagttacgaaggtatgaggctgaaaaggtctaagcaagttatgaaggtctgagaatggaaggtctctgatggtaatgtaaagtgcatgaattaaagttataaaggtctgagcataaaaagtcttaagtgatgataaagtgagttgagacattaaaaagaatgaaatatgttcctgatttctctatttctcatgctactgctcatagtaaagttcaacaataccactgtacagtcataactacaaggtcaagattaagatgcttttcattgtcctaaaaaaaatctgtctatttttaaaatggtaatgcttttagccaagttgcttctatagtgaatatgctgctaatgtgtctaatacttatgtttccacaagctctaaggattcttgtaagtttcagggacctgaattgtatccaaacaaacaggtctaggagccatcaggaagttttgtacagcctggactgcaatgaaacaaccagctaccccaggatgtggcagcaccccaaccttcttgggtcccnnnnnnnnnnnnnnnnnnnnnnnnnnnnnnnnnnnnnnnnnnnnnnnnnnnnnnnnnnnnnnnnnnnnnnnnnnnnnnnnnnnnnnnnnnnnnnnnnnnnnnnnnnnnnnnnnnnnnnnnnnnnnnnnnnnnagaggtgggaatgaaaggttcaggcattatgcttgcctgcccctgttacctggtggaacagacagtaccctggtcagcccaaggttccatgggaactaagtctgcacgcaggtgcagaggacccctttgaaagacagatccatgcccatttaccctctctcttactctctactcttctctctgcttttctcttctcccacctacactctctttgtctctatggtgactggccatggtggtcagccattacccctgttcctcttctctcttagtctccctactctgccaggcccatataataaactagtcaacatgtctcatattaatactttctcttttcctttttttaaaaataaaaacctaacagtgtctatctgtaattttctggaaaatgtcatattattacatgaaagaaatttctgtctgtaaggcgacacttgtatgagattagcaaacaatatcatctacaaatacaggtgctacacacacacacacacacacacacacacacacacacagagagagagagagagagagagacagacagacagacagacagacagacagacagatacagagatgcactcacacacaggggagcaggagaagggcacacaactttccagcactcactgagttgaaatttttaattctgttatccagttcctgctcagactacaaatgtaagataattattaaattggccaaaaattctgatatacatagtaagaattttgtcattaaattaacctattaaccttacattatcttatttgtgttcatgataatcagtgtggttggtgaccacatttaccggacatttgttttccacatattatctgattaaatctttgaatcaaaatatcaaattgacttccaaatttttatacaatgatgttaaatactagtaagtaagattaataatattcattgatttgccaataataagatatgccaacacattattattaaaatataattttaataaggggaaatccccaaacttgaaaaattttgggtacaaaacacttgagatactgttgtaaaaaacttaagatgtgaaatgtcagtataatctggtaaatattttaggaagataattcctaaaaatttaaactatttttgctacatatgtagttatattgggatagagatgttaaaaattaaaaaaccatgatagaaataaaggaagaacttttaaataagtgaccaaatccaactacactacactcatgtatattttttaatacatgcacctcaattttaaagaatggtaaatggtcagtttagtattacagagaacatttttaagaacataggagcctttacaatgaacactgatgtttggagtgtagctgtgtggatgtagaattaacttacaagcccacattctaggaaggaaaaattttccttttcagtttctagtgaattccaagtttatttctagcaacttgtttaacatctctcagtgcagactataaattattcatctgttacactggactggactaaaggagtagaggaaataactcctggaatcagtcaatactcttgcattcagtacaatgaaaattaatctaaatggtcattttgtgaaaggctatatcctgagacatttagcagctacccctgaatgaaggttttgaggaattatttggatactgagcatcactattatgtttaaatattttatttatgcatatacgtattttgtcttaatgagtgtatgtaccaaatgtgtgcctcttccccactgaggctagaagagggccttagataatctggaatgagatatttgtatcatccactgcccacaaattaaagatctacttttaagaatccattttccatttcaatgctttatcatgaggcctgctgattaagaggaagaagggttttctatgtattttaattataaaatagatttttctaaacatagaaaaatactaaaaataaaaccaataataaatattacctgtctagggatggaagagatggctcagtgggtgagacaagtggctgttcttacagaggattctggcctctgttcccacacctacagggtggctcaaggttctgtaactaatgttccaaggggtctaatgccctcttctggccctcttgaacactacaacaaggtggcagaaaaataaaaataaatatttcagtaaaaacacttatacacatagttacttgtctgtttctttcacctcttcttctggaaataattttttaaactcggttttgtcaaatttagaaaatgggtttctgaaagtttaagattgaatacaagctctaatattggttttaaatgtattaatattgtctgtttcttccatctaagattataccaggcttgagtcaaatgatacttttccaaatgcttcccaaatcaaatgctcttaaggcttgctaagaatttgaccagaatgaaatattaaaataatagatgaaattgttgggttgactctggtctctgtgtgcgcacactaatacttccagaagcctctagttttcagtaccattttctccagtctcagaactgtatactttctggcacagtgcattatttacttttaaattacatcctcagattactttggtgccttctagtattgccaaaactatatattacacttgttctttactgtaagttgtagagtgcccttgccatagcaacttatcaatacagcatgagatttgagtattgatttatgatgaaagtttactaagaacataaaagtttgaagtgggtggactgagtgacagcaggatagtcattattcttgaatacaacctgggtagggatggtgtaaaccacgaacttttcacaacaatattaataaacaattataggcccatcagtgatatttggtacagatatttgagatacactgtattaagcaattaaatgtctattctacctagtgatcctttgttaaataaataagcaaacatgactgatcatgagttaatattcaagagcctagttcatgagcattgggaataatctctttgtaagtgtacaattttacataaacattagtttgtttttaattacaaatgtatgcttgtcattatatgttctcatataatttgttatctcacactcttggtgcgagaggcctaactagatttttaaaattattttactgtttgaaattaaacttcagctgtaccaaattagaggtataataaaagaattaaataattgaatgagaaacaaaatacttgctatcatggatatactcagacagtcttttcatttgtaaatacttgttctgtataaatttacaactagtataccaagataagtggaatgaataattctaaatgaccatctttggatcattagttaacaacagttaatttctaattttctagatatgtctcagtgatctagctgaaggaatgatcagatagatagacggacagatagatgatagataattttagttaagtatgatcactacgttaagctctcttttaagagtaacttattttaaattaaactataaaattaaaattatttatgtataactatcaccatgaattgtccaaaatatatgtacatgttatactaatttatttaatgaaattcttcttaaatagctatgataaaataatataaagtacttagatgtactgatgtatcatgggatgaaaaatttaaagtaaaccttgaccataaatagaattactaatgaattcacttgagttctagcaaaaaataaaggatataaaaatttggcaacttaaaagatggctcatctattaagagcacatactgccttttcagaggacctgatttcaattctcagtaccactttgggaactcacaattgcctgtcacattcacagtccctcacacagacaaatgcatgcacatttaattaaattataagccaaagtatttcaaatatgatgatcatcaagtgcaaaaggaatgtaaactagtaaagaatattaacaaaggaaatcttattcgtttcttcttacatataatatgttaggaacaggttctaatttgcttttatctagacatggaaaaaataattagacatagtaatccttcttggaaaacttctaatgaaatgaaatcttattatagaaaatttctgacacacttaaattacatgtcaataagagtatgtatggaaatagttaagattacagggcaaggacaaatccacatttaagaagatattgttcatacacatattcaaaacattaaatacaacctttttaaaataaatatttcttctgcgtttgcaattatttttatttaaattaaaaacaatctcattttataaaccaatcttatcctcccatggaactccactccacggggagggtgaggccacccatgggggatcatcaaaatttgtcacatcatttgagggagggcctagatgcctccctatgtatctaggctgaaagagtatccctcaatatggaatgtgctcaaaaatttcatgcactagggataaatactggttccattggcagaggccctatagacttccctggcctcccaattgataaccacattcaaggggcatggctgggtactatgatggttcacaggctgtcagactaccatgtaatatcacttactcaggtcagcagttgttgtggctttacccagcatggtcttctcccctttgctcataactcatctgtctctacaactgggtaccaggagtttggctcagtgattagctatggatctctgcttctgcttccatcagctattgggtgaaggctctagggtggcatttcaggtagtcataaatttcattataggagaacggcatttaaggtagactctccactgttgctgagactcttagtggggggacatccttgtagatctctggatatttcactagtgacagatttctctttaaatctataatggctccctcaattaaggtatttctttttttgctctcattctctattcttccctctactcaatattcccgatccctcatgttctcttccaccctcttctttatcctgcctgcctctctgctcctcctgtgcccccaatttgctgaggagatcttgtccatttccctttctgtgggtgtctatatagttctctcttaggttcctacttgcttcctatcatctctggagatgtggattataggcagaatattgacatcctctccagcattaactgtagatggtattttttgtttttagccattctgacaggtgaaagatggtatctcagagatgttttgattcacatttccctgatgacttaaggatgttgagcactttcttctgtgtctttcagccattttagattcctctgttgagaattctctatttagttctgcaccccactttataatttccttgtttgccattttggtggctagcttcttgagttcattgcacattttagatattagacctctgtcagatgtggggttgatgatgatcttttctgattctgtggactaccatttggtcttgttgaatgtttcctttgccttatagaagcttctcagcttcaggaagtcccatttattaatttttaaccttaatgtctgtgctgttagtggtatgttcaataattggtcacctataccaatttgttcaagggaacatccaccttcatgtctaagaggttcagtgtgtctgaatttatgtttaggtctttgatccatttggacttaaattttggtaagattgccatctttattttgttgattctacctatctaagtgcatgggagatctttccattttctggtatcttctttaatttctttctttaaagactcaaagttcttgtcatacaggtctttcacttgtttggttagcgatacccccaagatattttgtgttatttgtggctattgtgaagggtggtatatctctgatttctgatttctttctttcttttttatttggagacaggttttctctgtgtagctttggagcatatcttggcaattgctctggagaccaggctggccttgaactcacagaaatctgcttgtctctgcctcccaagtgctgggatttaaggggtatgtcaccaacacccggttttctctgatttctttctcagcccatttattgccatttattgtctatacaaaggaaggacttttttttttttttacttaattttgtatcgtgccactttgctaatggtgtttagctttaggatttccctggtagaattttttgggtcaccatgtaaaccatcctatcatctgcaaatagtgaaagtttgatttcttcctttccaatttgtgttctcttgatctccttttgttgtcttattgttctggctagaacttcaagtacaattttgaagagatattgacagagtggacagccatgtcttgttcctgatttagaggaataacattgatttcttatctccatttagtttggtgctggctgttggctactacatattgcctttattagggttatgtgttcgattttttcaatggttttttaacatgtaatgagatgatcatgtgtttttttctttttcagtttgtatatatggtggattacattgatacatttttgcatgctgaagcatccctgcatccctgggatgaagcctacttaattgtgatgaatgatttttctattgaaattttttattcaatttgccactattttattatttttcactgatgtacatgagggagattattctcaatttctctttcttagttgtatcttgtgtggtttgggtaccagggtaattgtaacagcctaataaaaagagtttgttgatgacccttctgcttctattgtgtggaacaatttgaggagtattggtcttatctcttttctgaatttctggtagaattctgcacttataccatgtggcacagggcttctttttgttggaagatttttgaggactgcttctatttcattagggtttatatttctctttaaattggttatctgttcttgatttaatttttgtaagccatatctatcaagaaaattgtccatttcatttaaattttccagttttgtggagtactggttttcaaagtatgacctgaaatttctctggatttccttagtgtccattgatatgtcccctttttcatttctgattttgttaatttgcatgttttctctctgccttttggttagtttggataaaggtttgtctatgttttcgatttctctaagaaccaactatgtgttttattgattctttgttttgttttgtttgtttctaatttattgatttcagcctttaatttgattatttcctggcatctattcctgcttgctgactttgcttctttttgttcagaactatcaggtatgcagttaagtctctaatgtaggtggtattctccagtttctttatgtgggcacttagtgctatgagctttccttttagcactgttttcattgtgtcccataagtttggatatgttttgtcttcattttcattgaattctaggaaatctttagtttctttctttcttccttccttgacctaggagtgacgcaattgagcattgttcagtttccatgagtttgaagactttcttcaatttttgctgtggttgaattccaacttttaaccaggctgatttgataagacacaggtggttattcaatttttttctgtacctgttagagtttgctttgttgctgagtatatggccaattttaaagaaggttccatgaggtgctgagaagaaggtatatttatttgtgtttggatggaatgttgtatagatgtcttttaaaaccaaatgggttatcacctctttatttatttgttaagtttctgtctcctagtcttatccagtagtgagaatggggtgttgaagaatcccactataagtttttagagttttatttgttatttaagttttagtaatatttcttttacgaatatggatgcctttgtatttggggcatagatgttcagaattgggagttcatcttgttatacttttcctgtgataaatatgaaatgtcattcctcatctattttgattaattttagtttgtagtctaatttgttagatattaggataggtacaccagcttgtttcttagatttatttgattggaaaatcttttcccaaccctttactctgagataacatctgtctttgactttgagatgtgtttttgtatgcaggagaaggatggtttctgtcatggtatccaatatgttagcctgtgtctttttataggagagttaagaacattgatattgagggatattaatgaccattgattgttgattcttgtttgttttttatttgtttttggtggtggtattgtgaatggatttccaacccttttttttctgttgccttttggtaaactgggattatctattgcctatgtttttgtgagtataattaacttccttggtttggagttttccttccagaactttctggagggatggattgggggttatgtgttatttaaatctgattttgtgatgtaatatcttgttttctcaatctatagtgattaaaagctttgctgggtatagtaggcttggctgacatctgtggtttctttgtgtttgtagaaaatctatccacaaacttttggatttcagagtttccattgagaagccaggtgtaattctgataggtttgcctttatatgttacttggcctttttcctttggcactcttaatattctttctttatctgtatgttcagggttttgataaatatgtggtcaggggactttttggtggtccagtctatttggtgttctgtaagcttcatgtagtttcataggaatgtctttctttaggtagggacagttttcttctacatggtgccatactcacctctcatggtgggtgcaggcaggtctaacactccaatggaagaagagacttgatggtttggtctgtccccggttctctgggggatttcttgggcaggatgggactaccgtgttcagttctagagggaggagaattcaagaagagggaaaggttggcaggagaaattctgtactcacctctcctagtaggtaaaggctgatcaagtcaataatggtggtagacgccaaatggtttggtctgcccccaggtctctgggtgattcattgggcaggattcgactactatgtgcagacctcattgaggagacatcaaggagagtgagaacacaggcaggagaaggccccacactaacctctccaggttggtgaaggtgggtccaaggctccaatcactaaattattaagtgactaattttttggtttttaattaaaaaaatcttattttacagactaatcacagttagctatttttaactacattaggatagattggagaagtaaagaaaacagaactgctcttcttgcataaccagatatgtggagagaagctagttttggataataaggaatattcatcacaatttttgtagtaatctgttaagatttataatttacttatctttcttttcaacatcaaattatttctttttgatacagtttggttttgttatctgtatttagataaagaactgttacaataaaactttccgccaaaagccacctgagccccaccaccacgtgtgagctttacgccagccaccagccctagttagtcccaaatgaatacacagaatcttgtattaggtacaaagctgtttggccaatgactaggattctttatctgttagctcagtcttaattatcatacatctatatattttataagacttatcttatcgaaatgcttattggcatccctccttgccggtggctcacatcctgctactggaggaggcaaacgggggaaaaaagggccacttcctatttcctcgcttagatatgagtctcgttgctatgtcacttcctgcctggatcaccacttatctactacatttcccagaatcctttttgactaatagtcctgtctaacttgctgtctcactcaccaaacaatcaatttttatttaacaattttatttaacaatcaataagataaacatacacagtacattccccatcaaagaacatgctatgaaaagttttcaaatccttacttatttcaatcatgttagtacatcaaatatttgaattttttccaactttttttatttgaattagaaacaggattgttttacatgacaaacccagttcccttttctcacccatcctcccgtaccaccaccctcaactaaaaccctatataccacatatcctttctgctccccctggatggcgaggccttccatagggtgtcatcagtgtctattgtatcctttgagatatggatgtctttgtatgttctatgtgttccaatacaagtctgtgtatatatgcatacacacacattttaatctctaagtatcatggttgattagctccaagacatgaaggtgtaaatatattttataaataagcctcatattagcaagtaatttagtcataatctcccaatattgctttgcatacattatctggtagaatgtaaatacattacaagtcactcttaaagagtctattcatgttttatatggatgtgttacttccaaatagtttcaatatttcaaataattaattgagctatagagaataaactggattgtgtacaaaagcaaaataacaactgagtttgactttaattataggtagactcaaaactcaaataaaagaataaaatttatcttataattcataaatttcatgatgtttgtaaaattacattattattttaatatatttataatgtaactcttgactaaaaatgtgatgcagtataatttatttggtcatgtatacatggtacttactgtaaagcaagtgtctttacataagatatatgcctcacatttgctcagtaactccagctttgagctaacaatcatactttgcataaatatgtttctatggaaggctgaaaggtatgctactagctttaaaaagtggtgttatgggtaagtccattttatttgttatttaaaaatatcatgtaaaatttcaatacccattaatgtggcaaagcagtttaacaattctctttggtatcaccaaaattcatgtttaaaatgcaagaatggatggcttcttttcctcttgtatctgagtaaaacactcagatttacagaatctacttgggtctctatggaaactgtcctgccttccaagtcaatagcatttttgttgtgtgacttttacacaatcctctttatgaaacaattcaaggacaaaaatcatgtgatatatctcaagtagtactttaaaattcttcaagtgtatgaattttgtaataaatatatacagagataaactgtttttgcaatgaatgtggttcaaaagtcaaagtaaaattaaatctatttagaatatataaaatatgatgcattgatacttaaaacttcatttgcatttaaattgatattgttaatgtataaattagattaccttgtatattgtaaagagttaaaaaatcagaacaaatcatttaagagaatgtaacattgaagtagaagtcactttactgtaaaaaatatattttatattttatggaaaagtaggataatttatactgatgtgttttcattgtttactgaaaataaaagtgatattgaaatatgttgacactttgatattgtgtcatattaacacattgctttcttggaattaactggaatcttattttcctacacattcttatttaattcttctctcttgtttttgtgttaaagttgccaaaagtgcttttgcataatttaccttgaaattaaaagttcacttaataattagtgtttactaaattaaatatcactatttcatttggatgtgttctttgaattacctacaactaatctgcttaaataatttttaatatgtttcaaaaatatataaagaaaggttttaaagcatttaggccttgaaaatagacaaataccctgatacactcagtagtcctctggctgcaaacaaaaaaggaacatggctgaaaggattcctgaaaactatattttcaataacatctaatgaatggacacacattcacttaagaatgaaaatattattaatgagaccatgaatttggggttattagtataattaaacagattcctattcactaaaatagcacataatgtgagaagttagaatttcagaaatttgtcaataagacagaatgtagagttcaacattcctcatatgtggaataaccttgtgaaagctgtaagtttttattttgtttctgtgaagtcctcagataacatggaatttaaaaagggaagaagataagtcagatgggcaatctctaggaatattaaatgcagtcaaataatttacagtcattggtatgctaatttaagaatacaataagctgaaaaaggattatgaaaaggcttcatacctacttatcatgcatacatccccagaaaaataaaaatacagatatttattcaactttgtgttactatattatttatgatttattaaagcttaattgaggattcaaaaagcaaagccagcctcaaactctagaggtaaggcagtggtggtatacacctttaatcccaggatccaggattaagatgtaaaaggccactttgactacacaatccagtcctaaaagaaacatctcacacaaaggctatcttagtacctgggatcacagtcctttaatcgaagcattgggaagttatagaagacaggagcagggtctcagagctggcattcactctgagagttagtctctgtcacattgaagacaaaatagcagtctgagtgaatatgaggagcagttcaaggataggccctttagtctgaacatagaggtaagaactagtgaccagctcttttgttattctgatcttcagcttgaagcttgaaccctaatataagtctctggattttttatttatcatgtttcacaatttgaatacttcttcaagagtattgaagctgatatgatgggggctgtccttctgtatatatgtttctctcattggctgatgaataaaacactgtttggccaatagaggcaggaagataggcaggactagaagatgaggagaatcctgggaatggtaggcagaaagagaccaaggaaaggtttcacattgccaaaaggagtaacaggtccaggcattttctggtaagataagaccacttggaaataattagattgatagaaatggattgataattaggagagagctagacagtaagaagccctagccattggcaaacagtttataattaatatggcatctctgtgtgttcatttgtggcaaggcagctgcaggagcaggcaggacaagaaattctccagttacactgcgattgttttaaatggtaaaacatttaatgtgtcttttccaacttgtagaaaaaagtcaaagatacctgttcttaccacttactctcagtagttggatattcttgacattataaatggccaatggggggacataaagcacatatggttcatgaagaagaaataaatgtaacccagtttccaaatgacatgattactaacacatgtaatttaaaggatttaaattaactctctgagaggtagtaaaatactatggtaaagttacaaacctcagacaagtgtgcaaaactaaatcatgtatctatgcactagcagaagatgcagaaaaaataataaataaggaaaaatttaaagtgtaatgccacttagaatttttcagaaggtaaatatgcaagaacaaatgtaagtaaaaagataaaacatttataagcagattatagggtcacagtgaaagataaaagatttctacaaaaggagagacataaggtgtgaatgtcagacaatttcaatatgtcagtgatcacaatttgatgaataggtttattgcagggcttataaaatttcaagtaagaatttttgtagtcttacacaaaattattgcaaaagttttatagaaggattaaataagtaatattatgaagcactctccaaaaccataccaaagtttagcccaatgaatctataatattcaagatatcctatcaaacttgaatccacaaagctttgtggtattcaagaagaggtgaaggcctgcacaaatggaattgcaggaggaacccaggactggactcacacagttcatccatcacattttacagaaagatatagaagagtttagtgtataagagacaacattctgggcaaacgaacctacagcaagtaatcggtcatagatacaaagatgaactttgatctgctctacacttcatacaaattttaactaaaaataatcaaagcaaaaaatgtataatgtgaaattttaaattttcacactagtgaggaaggaaaaagtgtttagaatctcaggcatacaaagttttctaagacttgcaactgaaataataatctataagaaaagtattgcaccaaaattcaaacttttactagcaaaataatacaaatccatgacaagaaaagttactgacccatagaaaatgattttaagccatgtattcattaatgactactacatagattataagtactctatcaaaatagtgaaaaatctagacaattttattaaaacataaatagagtataggaaaaacatttcactaaagatttgatatagaggcaaataaatacaagaagccacataaaatttttctaactgaaaataaaacatacatataactatttatattgtattaaataaaccttaatattatttaatatactggatttaattaatatattaaattaaatacttttaaattactaataatgcatgctataattatatgcataaatttaaagtggaaccaaaattagtatgaataatatattatgcataattaaatactgtattaaatatattaacatattcatacataatgaacacatttgtatgtatatacatgtatgtaaatagaccattatgaaatacacatataatgtcggtcattggtagtgcatgcctttaatccaagcactggggaggcagtggcagacagatctctgtgagttcgagaccagcctggtctacagagtgagttccaggacaacctccaaaaccacacagtcagtaagacaaaatgacagcccatagactgggaaaagatattcaccaaccctacatctgacagagcaaccccacatctgacagagggctgatctccaaaatttacaaagaactcaggaagctagtctccaaaacaccaaacaatccaattaaaaagtggggtacagaactaaatagacaattctcaatagaggaatctaaaatggctgaaagacacataagaaagtgttcaccatccttagccattagggaaatgcaaatcaaaacaactctgagacaccatcttactcctgtcagaatggccaaaatcaaaaacaccattcatgctggagaggatgtggagaaaggggaacacttctccagtactggtgggagtgccaacttgtacagccactttggaagtcagtatggcgactgtcaagaaaatgggaatgagtctaccacaagatccagcaattccactcttaggcatatacccaaaagaagcacattcatacaacaaggacatctgttcaattatatttatagcagcactatatgtaatagccagaaactggaaaaagcctagatgtccttcaaccaaagaatggatagataaaatgtggtaatctacacaatggagtactactcagcagaaaaaaaaaatggaattttgaaatttgcaggaaaatggatgggattagaagaaaccattctgagcgaggtaacccaatcacaaaaagacaaacatggtatggactcactcatatatgaatttttgacatagtataaagaattaccagcctacaatccacactgccaaagaagttaataaacaaggagaaccctaagagagacatacatggtcccctggagaagtggaaagggtcaagatgtcgtgagcaaattgggagcatgggaacggggcggggggagctaggagactgagaaggggagaagaggagggatgcagaggacatgtgggagcagaaatattgagtcaggggaagaatagatgataacaagaatggagataccataatagaaggacacatttttggtttacagagaaatcagacatgaggaaaatgtctggtgatctacaaagatgacaccagctaacaatcttaagcaaaagaggagaggctaccttaaatgccctccactgataatgagattgatggctaacttatatgccatcctatagcctttatccagcagctggtggaagtagaagcagactcccacaactaatcactgagctgaactagagcccagatgtagagaaagacgagtgaagaacaggctggtgaaacccacagaaacagctgacctgaacatcggggaactcttgctccctagattgataactgggataccagcatgggactgatccagaccccaggaacatgggtttcagtgaggaaacctcagaaatctatgggacctcatgtagaagttcagtacttatccctggtataagtgtggactttggagcccattccatatagaggaatactccttgagccaagacacacaggggtgggcctacgccctatcccaaaggatacaatagactctgatgacaccctatggaaggcctcaccattcagggggagcagaaaggatatgtgatagatagggttttagttggcagggaaggagaggtagggcaggacgggagggagaagggaactgggattgtcatgtgaaacaatcctgtttctaattcaaataaaaaaaggttgaaaaaaaagaaaaataaaaatacatatattatacataaatattttaagtgtcatcaacagtacttagaagaatatgccaaaagcaatttatgtatctatcactagtgggaatacagaatttaatacacattcagggaaaacaatattccaattgtcagaagaactatacagccactacttggcctagcaattgcatttctcagtacatactgcagagaaattaagaaatgtttacgtacacaatatatgaatgttatgatagcattttaaataatgattataagtataagacatcccagctgttatttagtgtgtaaatgcttttaaaaagacatccatatgttctgtaaaataatctgtagcatcaaaaagaaataagtgttctagattacattctaattcctaaacaaatacagtaaatggaacatggtgaaattcacatactgatggcttatacttatataatgttaaaatgaagtatcaaaattaaagaagatgttatgaaatcagagagacaaattccaaatacatactcatatgcacacatgcagacacagactacaatgctgtgattctttgaagaaaaatatctaacggaaaaaaattgcaattatcataacatttattaaacatatcaatgtgtatcactctaaaaattttataaaagttgaaaatgcatgcaaaattttgaatttgatatatacttggggaaattgaaatatatttaaatataggattataggttactatgagataaatgaattgaacttcacttatgagcaaatatttcgaaaaacatttaaagccatactaatttagctcattgaaagtaatgagttcttgagggtttcattgtcttcagcaatatacttgcttcattgttcagttccaactcatgatcactcagggagcattggttaaacacagtgaagaacaaaagaaaaccaaagccatgaataaggaaactggacttgtaagaagaggtgaagttaacaggcatggggaaaggaatagtaaggatgggtgcaggagtaatcagaatacattatatacatgtaacaaattgccagaaaacaaactcaatggatgtttattttattcaaagagaaagtaaatcacttattagctataggatgttggctaattcatagaacctttcttctgttttgttgtctctgagtgagaaaaatagccactcctataacaatggaaattgtgggaaatgtgtctatgaataatgcgtgtggaagggagtgagaaaagtcagaacatgggctatgtaaatcttaattactatgatgataaattaggttcctttcctcttgggcatttgactctcattaaggatgtgtatagtgactttgtaggtctcttttataagaggtaatctataatgccaacattgtttctgggtaaacttgcccaataaaattgacaaaatcagattcaggtttttggatgagtgcatggtatctgtagaagatctttcaaaatttgttccacttttaaggatattatacagtaatgcaattttaacttcctgactttgtatgttctaaaattaggagttgcatacgcaactaaatttgaactaattttccactccccctcattacactatttcagcatgaatggccccttatgctttcccctgtttcctgatacagcaccaagggaacatgcagtcaccaagggctcatcctcattctaaacaatcattgtttccttgggctaagaaattctattaatcagatgaagtgtctgacaccaaatcacatgatatggtgttgctttgctaccacctctcaaattctgatcactcagatcactcttcatcaagtttagctaaccatatgaataagtgctgcacacgtttgctttgttttcaattttttcagctcattactttatttgacaaatatctactgaggtactctaatgggtcaagtgaatctccaatgtactataaaaataaacccaaatatcctgaagataattttatttactcattaataaatgagaataatctgcacaaaatggatattaccaaccagaaatgttaaacagcaaatacgctcagagaaggatgtaaaatatgaataagtaggagccatggaatctatgtgagaatacacaatgctatgcattggtgttgattccaaaatttatctgaaatattttgtgagaaatccactactgaaaccacaacacaataattataggatgcaaatatgaaatcaaatacatttataagtattgggagatacagtatttaagaaatatcagctacctaaaaaacagagtcttgtatttccaggtttcaataagtttatcataagatacataagatacaataagtttatcataagattcaaaacactttgaagtacaggatgtttaaacacttaaaacattggagagatcactaaaacatttaaacacaattacacacttaaaaactagcaatttcctatataaattattacaagttataatattttgaataaaaaaagcaaaagtacatgaacctagtctgcagaaaaacttctggtaaattagtctgattatcaaagaattgattccctataattaaaatgcttgcaagtatatattatatagaactatacaaatatgtaactttcactcaaacaatattcaccattattgtttgaaaataaatataatacattgaattcaatgtcataaaattgcctttaaaggaaaagtaattcaaactatggttcgttttgagtttgtcttagttatggtttctagtgctgtgacaaaaactataaccaaacaaccaaacaaacaaactgggtaggaaagggtttctttggtttatacattcccataggtgttcatctctaaaggaagtcaggatagaaacttaagcagggcaggaacctggaggaaggtgcagatacagaaaccatggatagatgctgcttaatggctagcttccactgtcttgttcagcctgctgctttcttatagatcccagaacccctaacccaaggatgacaccacccaccctgggctgggccttcccccattggtcacttcctcaataaataatatttaaagaaggaaggaaggaaggaaggaaggaataattggattctatcagtctttagagattggatcactaattaagaaaatgccttactgctttatctcacagaggcatttcctctgataactaaagcatatatcaacttgacacacaaaaccagccagagttgctccggatatggagagatatttaacattcaaatgaataatatgaaaattccagctgaaatgaacaatgatcaatcaaacatcccttcaaaatttaaaaataaatacttttaaatatgtgcctcatgtggaaatgaagggaaatgtttatcaaaattttaatgcctctttggccttcaatctctctctgtgtacaactaactcatcttttaaactaagacaagacattttgtggtagagtttgcaggacttatatcactgccatatgtcatctccactgctagctaactgatgctgaaaaaaaaccatttatatatgttgtatgtgtttatcataaatgtggtatccaatatatcacaactcactagtgctgccattgtggcatgtgttggtgctgactaattagaattgggccacagtcttggagaaagatgatttctccacgactgacaatgtacatctcccacatggtggaaggtatacactggcttctacaggctgttctctgccctcacgtgatgtgttggcatattccacactcatatacccacactcacacacacccatacatagtattaaataaggaaggattgaaaaataaactctaacagtctttacagataatataaactttataataaggatatacttacagtaatttcaggtttttgtcactcttattatgcagaagggcaaaataatttcataaatattgcctttgctgaaattcaaagtaaattcttaaaagaaagcttaagcatatgtagtttgatgtttctcatttccaaataaccactggaaagcttaacattaattacaattgtttggcctcttgctcaggcatattactgaatagctatcacaattaaattaacccatttttaatctgtgtagcaccacatggtcttggcttaccagtaatgttctgccatttaactccttctgcagcaacgtggcatttccctgactctgccttatttctttctctgtctctgtttggatttcagacctagctatattttgccatattagaggacaaaacaattttattcaccaaccaataaaagcaacacatatttgaagtatacaaaaagatatactacatcatctcccttttttctaattaaaaggaaggttttgactttcacatagtaaaatcatgcataacaaaacaattatcaagcaaaaattatagttacaatatttagtatatttgtacttggcaaaattaaataaaatatcctatctctatgactcaaaagttttatatctaatgtatcttttatcataattaaggaaaactatgactgtaagtatctgtcttcaactcgaggaaagtcaccagaaggacataatataacctaagtaaactggaagtacattataagtaactttcaaaactcttgaaatgacagagacatctggctgcccagacagtcacccaaagttctgtaacattagggcatccatcttcagcctataggcctagagtgtctggcacatttcttactaaagcaagaactttgaaggactttctcacctattctggcaaaatttgtcagtcactttattctatttactgtaggatttctggaaaactttcatgaaacagaaaccctgcaggactgtcacatcttgtttaggaaaatggcaaatggatggaactcgaagaaaccatcctgaatgaggtaacgcagtcccaaaagatgaacatggtgtagtcactgatttatggattttagacatagagcaaaggattaccagcctacaatccacactgccagagaaactagtaaacaaggaggaccttaaaagagacaaactttgtctcctggacaaggggaaagggtcaggatcccctgagcaaattgagagctgataagctgggaaatatgatggaccccaagagagacatacatggtaccccagagaaggggaaaggaacaagatctcctgggctaattgggagcattccgggagggaagagggatttaggagaaagagaagaggagaagaagggagaggaagacatgagggagcaggaagattgagtcaggggaataatcaaggagagcgagaaaagagagataccataatagagggagccattataggtttgaagagaaatctggcactagggaaatgtccagagatctacaaggatgaccctaactaacaatctaagcaatagtggagaggctaccttaaatgtccttctctgttaatgagattgatgacaactttacatgccatcctagagccttcatccactagctgatggaagcagctaaacactgagcaacctcctggaatccagttgcagagagggaggattgatgagcaaaggggtccagaccaggctggagagacccacagaaataactgatctgaacaaggggaactcatggaccacagactgatagctgggaaaccagcgtagaactgatccagacccccttaaaaagaatatcagatgggggtgtgggcaatcaatggggcctctggtagtggatcagtatttatcaatagtacaagggagcccactccacatagggggatactctctcagcctagagacacagaggacggtctaggccctgctccaaaagatatgacaaattttgaagataacaatggaaggcctcacccttctggggagcagaaaagggatgtgaaacttggggtcttgtttctaatttaaatttaaaaaagaaaaaaaagagataaatatgttgcttttgcttagcagcccccacaataaatgcatctctgcagttagctcattaacagtcaaaaattttgaatacaataatatacatatttcagacattatatgtattttctattttacatgggccactataaaatttaagtctattcatcatttaagaacctcaggttattatccttaaattatttttttaatctattagtctgtctattgtatcctccctcttccaagaccatgcacacttttcaaacacattgtgacttgtttagaggtctttttgcctgcatctgtccttattgtgtgtctgtaaacccctactgacaagaagagttttaaaatggtaaacaagcttggataggcctaaagtggctggcttcaacctgttcattggtttccctagagtctaccttcatggcagaggcactggcaggagccgcgtgtattacctccaactctggggaggttttaggtccatactgttagctgcccatgaactacatgtttggaagcagggcctcttaaaaaaggcaagtaggcctggtggtggtggtgcatgtctttaatcttagcactggggaggcagatataggtggatctctgtgagtaggagaccagcctgttctacaagagctagtttcaggacagcttccaaagccaaatagaaaccctgtccccccccaaaaaaaaacaccaaaaaaaaaaccaaacaaacaaacaaacaaaaaaaagccaagcagtttttgctgctaatgctgagtaaggaagctgtctcttaaaggagtgcccctctgttttcctctagcaaacagcctgtctgagaaaatggtgctaccaagaagccatacttggccatgtccttttgtgtttagaaccctttgtaagcttttgtcaggttgtatgtggatattcgtaccacaagtttggatgccccatgtacttggaggctcctcagccagccctccagtgcacaaataatcacttagggtttaacattaattaaaattttgtttgtttgtccaattgctcaggcacatactgactagctttcacatttaaattaacccatttttattaatctgtgtatcactacatagccttgacttactggtaaagttctggcatctaactacttctgcagctacctggcatttccctgactctgacttctttctttcactatctttttttggatttgttgcctagctatatctttcctgccataggccaaaacagttttattcatccaccaataaaagcatcacatattcacagcaaatagaaggagatcccacatcaagcataggtgtgattgtgtgtgtgctagactgtacctgtatttattttattagaattgcagaagaaatagtttcagaaaaatagcttggcaatcataatcttttcaattttataaacataaatctcaaagtaaaactttgtctggatcagatgaattaaaattcaatacattgtggaaaataatgatactctacttaagaaaatcatttacagagactagagaaggagaaatataagtgaaggaactaaaaaagaacatcactttcaccctgcacaaaacttaagtcaaaatggatcaaagacctcaacataaacccagccacactgggttatgacagtttatgctggagaggatgtggagaatgaggaacactcctccactgctggtgggagtgccaacttgtacagccactttggaagtcagtatggtgactcctcaagaaaatcggaatcagtaccacaagatccagcaattccactcctaggcatatacccaaaagaagcacattcatacaacaaagacatctgttcaacgatgttcatagcagcactatttgtaatagccagaaactggaagcagcctagatgccccacaactgaagaatggatggacaaaatgtggcacatttacacaatggagtactactcagcagaaaaaaaaacaatggaatcttgaaatttgctggaaaatggatggaactggaagaaaccattctgaacgaggtaacccaatcagaaaaacacacacatgatatgtactcactcatatgtggattttaggatcccctgagcaaattgagagcatgggaagaggagggagggagttatgagaatgagaagggaagaagaggaggatgcagaggtcatgagggagcagaaaggttgagtcaggtgtagattagaagaaaggatatgtgataagtagggtttttagttgcaggggtaaggaaggaagggaggaataaggtaactgggattgtcatgtaattcaatcttgtttgcaattccaataaaaagaagccattaaaaaaaagagcatcacatagagatagccaatttgatttctatgaaattgaaaataaaacagaaatggcaatgtatcaaaccactgtttggctcaagtgtgtgaatttgggaatgcagtgcatgttttctggagatgctggtgcctatagctaagaccactcccatttgttgggaaatagtcatagggaagagaaaaagaaatagagaagacatgagaatcttccatttgggtctctgaactggggatgcatgctgctttgtatgggcacctcagtgactacttagagctttgccaaagtgtaaatacttttgctgtttgtaagtagtgatgtccttcagtaaagaagtgaatcttatgtaaaccattagaaacatttgtttcttaatgattcctcttacatgtgaaaactggaatccataatcattacaattcttgtttaattcctcagctatttttatccattatgatacatttccaaactcatgtttgtaataaaatataaaatttttcaaatgaaaacgtaaagcatgtcagttaatagcatgctacatatggtcttacatagtttcaaactttataaatacaaaatattcatgtttgtttaatttgttaaaggtttgaaacattttacactttagagtatatttgaaaactatgatgttggcactagaaaccataagttgtaaggttgctcctggtcacttcaaaccttcagtgcagaaatgcaacttgaactttataacactcccctgtagagttttaaactatggtccttttctttttctcccattcagttcacacatactcacacaggtactcagacaagtaagtttagcttaggaattacattaaacaaacacacagcacacattcattaaatatggtaagaattaatccctttgattagtttagtataggctaatatttaggtgaaaacttaaaaaaaatctttttatgtcattatttgtaatatcaaatatgtgtgaggtcgcataggatatatgtgaaaacatgttttgtagctcttttactgatttacccatacccctgttactcaagtggaaccttgtagcccctcacccccttggtctctttttaacattcttatcccacatgtcttaatactcttcctcatctcctcatattagtttttatggtgatgtgaataagaatgacccccataagcttttttatttgaattcttagtcaacagagagtgacactatttgagaagatatctggccttgttggcataggtatgtgactgttaatggaggtatgtcactggggtagcttttgaagattcaaaggccaggcccactttgctctgtatggagaactctcagctccttctccagtaccatgtctgcctgctgccatgctctcctccataatgacaacagacttagtctctgactctgtaaccaggtttctgagtaaaatcaaatttctttgaacacatttggaaaacttaataggaaatgtgataaatctgtattctgcattcttgacctttctattctattattattaataacaaaataatatgtgtgagaacagggtgctctccaagccatcaatgacagcacaggcattatcagttagttctgcttttcatttctttagattattcatgccacattctaattgtggcttgaagtgttttacttttatttaaattgccatcagaaatttctaggcaaaaaaaaaaaacactgattaaagtgaattcagaataaaaacaaatcaaatgctgaaatttccatgaaggttttcatttgatgttggaacgaagtgccagttcaaagaattttgtggttgatgattattatcatttgcagccagtgtagaaagaaaggaaaaatcttgagcacaagagagaaggaaaggaactccttgccctagaatctggttgatatctttgccagccacaaaaatgtcagctgctgaagtccagttttgcttcccagacaagaacctgtggttttctgtacccatttgagctacagcttgagagcaagaaaaaagagttcatagtttagtgctaagccaatcctttctttactctcctttggggaaggagcccatgctcttacttaggccacctttactcttccttttgaagcacatactcccaataaagtctatattctttccttctgggcacgtctttttctcctaacttccagactaaatcttcccattgagattgtcctacagcttaccggattacttcccatggcttgctcagtctgctttcttttaaagcccaggaccaccaacccagggatagcaccactcactgtgggctaggccctcttgcattgatcatgttgagaaaatgccttatagctgtatctcattaatgtgtgtcctcaactgagattccttcctagctgaggactctagcttgtgtcaagttaacacacaatactatccaatgcaaaaggttaaccctctaacgcactagttaacacctgccctccatggctcctaattccagagggcaaattctttgaaatctgaggataacacaaagaaaggaaaacttgtcttttaaagcttgctcttccatcttcatttcattcagctgtgctttatttgaatgagtgtccctatcataaaatggtggaaatgtgttgttgctggaatacccagtattcatgttaactgtgctcatgtctctctctgccttctgttacagatgctgtgagttatggatctcagtcctacctgtactgttgtctcctttaccaacacttctgataacagatatgggagagtaaactagagactacgcaacagagtgtcttcttttcccttagccaaatgatgtccgtgtgtgtgtgtgtgtgtgtgtgtgtgtgtgtgtgtgtgtgtgtgtgtgtgtgtgtgtgagtgtgtgtatgtagtaagcaaccaaggactaaaactgtacattgtaaactactaggctatagagtcctgattaatgtactttggcttcaaaatagcatctttaaagtgatggatatctgaacaagctactcctggtcatttcttttggtgtttccttcctttcatatgaacatttcatcataacctcctttaaagtcctgatatgttgacataatctatttactcataaactgagtttggtgggacaagcctatgatcccagtccttcaaagatgaaggtatcttagccagggctatgttggttttgtctcagacaaatattttttctaatccctattttttaagcttagggtaccatttcagtctaaggatttcctgaagcaatttgcatttcatatgggagataagtgacatagtgaattcactctgctgaatgcaccatagtcaccactaaggagtaatcattagatatgagaaatggtagcctacagttttacagtaaataaattgaagtggctttatattatgctttgaaaatattcatcttggcatggtagcatggcacacatatttaatccaagtactagagcctgaaacaggaggatcatgagttcaaggactccctaaaaagcaaaacaagagcaaagcactactaattattttttcttaaaattttgcttcattcacttagtgatcattcataaatcatccccatccagtgaaaattctgagagatacttttctcaacttttgcccagtgaaaatctagaggatgaattctagattgtgcttttgagtcaataagaccccataaatatagttaagctgaatattgggcaccaagagctttctcagtttttgtttttgaacatacttctcctttacttagaaaagcattagttttaatgaaaaatgaaatacctagtaatcttaaaatacgatgtttttttttttttacattttcatgaaggtcacagtatgctttgttaatatttattttgctgtactatttgtgatctatgagtgtgagccacaatttgtatcccctccctaattcctctcatttctgagctggcaagtaactgaacacagtcccaatcccattaacccagcagagttctcttcagttttttctcatgttgtctgtagttttctcatgttgctgttttggtttttcattatccatctctttgtattaaaacaatagcagctcaaaaagaagtagtagtgacatcaagacaactttcttccagtgtttccttcagaactatgagctagagctatgtgactctcaccttgcattgcttacatacaatgacattttactataaagtcatgatccaatcataaggcaaggaaacaaatactgttaaaatttgcaaaatcagtcttatgaagcaacccaactatgtctttataaccaaagtattcaaggcaaaactgctttgtacatcagttttcatgtactctatatcaacaaagaaataataggttctgaaaattatataggtatcatacaggtttgatttatttccaccaagagaagaaaagtcttcataaacttctgagagtttctcctgcctgttagtgaaaccccatttaacctctgatttacaaactatctagcatggtaaagtgatctctaaaggtttaaatagcatattgaattgtcatatgaagtgataggatatgctgttcattcagcttcctggtcatatttggcagcttctaccttgttcaaaaaatacagtctctccatacctcttcacaaatactgtcattctgaagtgagccaatctacttaaattactttctaacagcatgtgacatatgccacaaaaccaatatgtattcactgtttcattgtcatcacccctacctctgaattatcataaatggagtaaattgtttagaaggctggcataggatagaaactgcataaagaaagtgttttactaaagcacaatgcacatggcccttaagcaactcacaaccacatgaattgggattgaaatagtagaagaaattacacacagtgccctccgaacatctcttctgcagtgtgccgtcacaggcaggagtgtcttaatcttacctaatgtttatctcaggttcctgagactcatgtttgctgtgtctcacaaaaatatcattgcatagttgttttttttcatagcattgaatgaaagtgcctctccacacacccagtactgactgactttgtcatgtattggttgttgattttaatgtggtatactgcaccaggctttttcttttgggttaacaccagcttccaaatcatttctatcctatgccatgaagacttttagcttaaattgactggtttctctttatgtaccatttgcttcagagcttattaccattcttacttctgtatgtcttacattccctgcttctctatatctgcctggctggcttctgcttggcttcttgccccaagcatgtcccttattctctcctctcattcttcttctagaggtgagatttctcctatttattctctctccctaccagtgccacctgtcctttctctgtctagctactggatgttcagctccttattagaccaatcaggtatcttaggcaggcaaagtgaaacaactgcaacacatcatttcataattaaacaaaagaaacattcaaaaagtaacacaactttacagagataaagtaatattctgaagcataaataaaaataacaatccttgcctggctaaaataatactctacagcactgtatttttgcatttttgtagttaatcctcaacaggtgatttgttggcatgaatccttctttcaaatgatttctaagaacactgctctgcctgtaaatattccactgggttaatacattctttcttcaaggaagttttttgaaagcctaaatatgtgatcatatattgttttatttgtttatttgtttgtttgttcattttattcttctctcatatgatacatccagacaacagtgtcccatttctccactctccagtccccaccttccctctttcctagattcactgctcctccatttctttttagaaaagagcagacttcccagagatatcaactgaatatgacataacaagttacaataacacgaagcaaaaacctttatgcaaaggcttgatgaggctaccccagtagaagggaaaggatcccaagaagaggcaaaagagtcagcgatagccccagagaccactgttaggagttccacaaaaatccccaagctaaacagctatgtaagtggagttttcctgtcccaactctctcccaaataactggcaccctcttcccaaataactaactcagagacataacataaattataaatgcttagctgatacatctggattgttactactgcttacattaaaattaacacatgcttcttatctgtactttgacaagtggtttgtggtttcttacctcattttctccacattctgtttccttggtggctggctggcatctcctttgactgcccttctttctcccatcattctcctagtttggttgtcctgactataattcctacctggatactagccaatcagcttttaattaaaccaattcaagtgacaaatctttgcagtgtacatagggattattctacaatgcagctacagaatctttgcagaggacctagcctagacccatacaggctccatcactgtcacttcagtctgtgtgagcccctatgggcccagcttagattattctgtgatttgttctcccggtgccttttgggccctggtccctacagtctctcccctactgttttgtggtgttccctgagctctgcctaatgtttccttctgggtctctgcatttgctcccatcagctgctggaggaagcctttctgatgactgttggactaggcacttatctatgaatataacagataatgtgctcatatttttaatgtcctgtttgttctggaagctgttctgccttttccatcatcaaccataaatacctttgcttattgatgaagagtttctgaccttacactctgacacacaatgtattgatctatatcttttacctgggttaattgttatgtattgttgtttaggtaggagtcagttcttttcctctaccacatgggctcctggggttgaaactgggttttcaagcttcgtggtaattccctctacccactgaaccaacttactagcccatgcactggaatatatatattagatgaatttttagaaacatgttgttttagtttgctttctgtttctgtgataaacatcctgaccaaaagcatctacagcgaggaaagggtttattttgcttaaaattgtcaatcacagctgtgagtagagtttttctgtgtccaatcagccactcccaaataagcagactgagtcttactattgattacaaatgctcagtattctttattttactcatttattattattatcactattattattatttgttttgtgagaaacagtttctctgtataacagctctggctgtcctgaaaattactttgtacatcaggctgtcctctaattcacagagactcacttgcctgtacctacagagtgtggggattaaagacataggtcataacctccaagctcatctttctttcttaaacatcccagaataactgctcacagaagataataccctgaatggtctagtccttaatacatcaattggcagtcatgaaaacaccacatagaaatgcctgaaagccatcgaagtgacaattgttcaaataatttctcccttccaaggtgactctagttttgtgtcaacttgccaaaaactaacctggacacataatttatctcattacaaatatctgtaattagtgacttttcctgggttctagaatattcttttgataatcacattaatattatttcataccatcttttagtgtgattcttgtgggctgtacagattttgggagattatcattagaatgttttaaaatttggcacatgttcagaacaatacatataaaaccacatacacacatataatatacataatacatatacatacatacatacatacatacatacacacacacaaacacacacacaacatacctttagcgtagcagaaaataggtgcttacaatctgaacctatcaaggaaattaacacaaaaaatactataggtttttctcttgttccaatatatcatcttaatttacaaaatcatagattaattataataagcctagcagatttgaacctaggagtcaagaagagaactaattaatttcaagacggttttgcattttgtggtcagttacatgttctgaaggtctatgcttcacctataaatgtttctgaacaaaattcaattcattctcaatgactgcagttcctatatattgaagttggaaaccaagcacaatactcattttgtctacaaggctctgatttagtgggattccactcttcagagtcttcaagtgtgctaactgtgaacttgaagtgctaactctctgaggaggcacagataatgattcatgggactaggctcaaatataggttaaatatttttttttggagaagtcacttacacaagaagcagatgcctgacacaagttcccacacaggctgctccctgtgacctgaccagacacaagagagagccacctgcctcactacctgagcaaatgggtatggtcagcactacaggtgcaggaggggtggatatctcactacaactttcagataccaatagatttaaaacattgttttcaacagcactccaaaccaatattggcaaccattatataatatatatgtaataatattataataatatataatatatttaatataatacaatatatatgtacatatacaatatggcaaccattatattcatcatattggtcaactcagttttgcccacatgctgcccacatgctattgctcctcttcaatgttgtgtcagtaatttctgattacaaacttaaaatgttcagttaaaatttgtatttgagattgtttagactttttcaaagtactctaaccatctggtttccttcttccaaagacctctggggaacctttctttgtttaacacacagcttccaaacattagcaagaaatgtaaagagagtataaagggaacataaaggaaagaaggcatttgataaagctgaatactgtgtctaatttatttccacagctattgaagtagaatggaggaatgaaaattaccctttatagtgcagaagtattgtatacataggaggatccattttccacaaaaggaggagtgttctttgcaaaatagccaaacaggaaatatattccctcccccatgaatcactgcttctagagcaacgtcttgtcagggacagtgtttctgctgtgtaagctcaagcaaggaaagccaatttacctttctcttcacaagagtattcagcttctgtgatactaaccagatatacatctgacacacaaaaacagcatcaaaataaaattgtaattacaagagcttctgtcagatttttagtaagttagagaaattataggcaatttgtaacccttaaataatcaggagacatgatagcttgactatgacaaaggtcatgaatctaatagaaatttgattgaataaatgaggcatccagttcgatattagaaaacaatattagaaactttgagaagtagggactttctccatttgcttgttttttaaacccagttctctctccctctccttccctccactaatcacccatcacatcccccttctgcttcccagggaaggtgaggccttccatgggaatagtgggaaattaccaataccgataagggtatttaatatggaaaagccttacttacagagcgacctagccagccggcgaggcagcattttgtacacaagcccaaaagagaaaacgcagtcaccatacatccccctgaccacgccctagaaagcgtggtcaggcacacctgtagccagcccctaagtaggtgtggctacagcttcccctacacatggggggaatcttcaaagtctgtcatatcatttggagtagggcctatgccctccccatctgtctaggctgtgcgagtatccctctatgtggagagggttcccaaagtccattcgtataatagggataaatactgatctaacacaagaggccccatacattgctgaagcctcctcaatgacacccatgttcagggggtctggatcagtcctatgctggtttcccagctgtctatgtagggcccctgagcttctccttgttcaggtcatctgtttctgtggttttcaccagcctggtcttgactcctttgctcataacccctctctctctgtaactggattccaggagttcagtccagtgtttagctatgggtgtcttcttctgtttgcctttttgataaataattatgggaacataaaatcaatataagccaaaactttcctttggaaagatagggttttcactttctggagagactatcaaatgagaacagctaacctttctttgaactctaattaaaagaccaagtctaatatagttaacaaagataaatcttctaagtcttctgtggttctttgtttttaataagaaaattcaaaaaatataattagggttatttctcaataagtgtgtccttaattacatctcatatcttaaagcatctggggtatagcttcctacagcccgtcacacacacacacacacacacacacacacacacacacacacacaagcctcaaccacattttctgtcactccttgcttgatagactatagatccacaattacaacttttttcccttaaacatttttttatttattcaaagtaagaacaatcttattttacattaatccaagttctctctccctcctgtcctcccatgcccctaccagacccccatcccacccccatacacaccccagggttggtgaggcctcccatggggaattatcaaagactgtcacatcacttctgtcagggcctagatgcttccccatgtatctaggctgagcgtgtatccttctatagggaatgtgctctcaaagtccatgcactaggtgtaaatactggttacactgccagaggccccatagactgcccagacctcccaactgacaccacattcagggaacctgatttggtcctatgttggttcatcacaccagggtccatgagcacccagttgctcagatcagctgtttctgtgggtttccacagcatggtcttgacccctttgctcatcactcctccctctctacaactgaattccaggagttcagctcagtgttacaagatttaaaatgaaattatgaatgaatcatcatacaattgggaaacttaaaaaatatggaatctcagtggagtgagaattaggtagggaatactttacaaaatgaagtctgttttcttttctttttcttattttgtttatttatttatttattttctgggaggaagttagcttcagcagctagaatagaaatacttgacttcacaattgatccattttagctactcagtggtaaccccaaaaccccaactatggagagagcaagtgtcaacatatagattaatacactttattgatgagcaaagagctaggttgttggaaccatttcaaagaaactaaatggagcttaatgaacagagatagcctcaaaagtggatttgaagtttatgaatgccaggttgctaagaaactggtgcatggcaacagaggatataaaaataagctttatgagaacacttggtccttcttcagtcatagaaggactagttaaactatgaccttacagagttgtcaaagagaaagccagaggaaaattcatcaactaagacgtagaatatttaccaatttgttttaatttctcctaagaattggatcatttctgacatgaaatttcattaaatatttggctattgagcgtgatagaattatttctacaatgtttatactatattaactttctttttagtattagttttaaaaattgatgtttatgtacattttcatccagatgcatgcattttcagacatagtttcttttgctgctgttttattttattctttcttctcctactctttactgtaatgcatggtatattatcatatgcataaaactcattggtatctcttttatgtatagaaaataaacaggatatgctactctgatatatagacaatgaaatggaaggcaacatgtatattttatgcttcagctagcaatagaaatgtgttatcaccaaagctcatactgtacttaatatatctgagtttttcttttattctctgtccttatcttcaataagggtattctttgagttttgcatagttaattatacaagggggaaccctataaattttataatctcttataatttaaaatgtaatttgcattcagaactgtgggagaaaagtcccaagatatatttgtagtttacagcatagtataatgtctgcctcttaagatttatttttatcttatggattgtgggactatatttaatgccctcctatcacaatagtactcaagaaaagatataagaaggtattataaaagtgtagaagaatcataatgattagacaagagaagattatgcaggtgctttataaaatgtgtatttggaattaatttttattaacaattcctccaaatccacttaactactcttctttgcaaaagcagagacttaggtggtaatggtgtcagagaaactacaggatcagaaactgcaggaagatgtcaagtaaagaatgtcaaagtacaggacaggctatcatgatatttgtttgttcctctgtccttctgaacatcagtcccaaattcaaagacagctggatgttttgcagaataatccaatccctatttcatgtttatttttatttttaacaacatcgtaaatactttctttcgtatatttgaatttcaataaactctaaaaacaaattgagatagtatgatatgaaccaggcaatcttcaatgagcagagtgatctggtcagttgacttccttcagtgaaatttattttatattctacagtttaagttttattcttttctcactcaatgctatcacacaactctccgatataatgtaggtataaagaaagtttaagtaatatataggaggtttgatttgtaattttcttctgcagtcacaatgctatacataaaattaaaaacattcacacctatgtccacatgaaaaataaaatcatataaaagtgaaccacttgtgggtttaaggacataactcagtggtaaagtagctgaggaacatgtgtgatgttgagagtttagcatctgtttgaggcttctctttattgtacatttaaatagctcagcaatttcccagtacttgcagataatggtgtgcactcactcatatactaacttcagttttctctagaagttatgcccaatgctatttcacatttttatttttttcttttcttttttttctaaatttttttctcagattttttttatttgaattagaaacaagattgttttacatgacaatcccagttcccttctccctcccatcctcccactattggtgacgcacacctttagctatttcacttttaacacaataatatctgttatgtcagtaacataattactctttaggagttaggatatgaatgaaagagtaaaagtgaatatttgtatgaaatttatggtctgctgtcatgtacacaaacacagacacattaacacatttatgaacaggattatttatccattagtatttcaaacttagaaaacatactttacgatccagtggtggtggataacctgtgcagaccagagacgacttcataaagagcatgaagttttgttggttttactttcatttgttacagtggctgctctttgcactactagccctgactactaaagctgtagctgctactgctggctaactttctctatttgcttgtgtcccttccaaactcccctgaccccaaaataaaaacacacactcagttcatccctgctacttccggtcattcttgtcaatcaggtgcaaaccccacctctctgagctaaaattgactttatttaattaatgcaaactcaacccatatttccataataacaaatgcagcacaaacaaaagttaacacatctttgcctggctaaacaaatattccacaatgtatatttgaattaaaacctgttctttagtaaggattttccattttgaagtagagggcagacccttaaagaggtgaaaataaaagataagtataaagacttggtacttcagaatcagtgagaaaaggcaaagtgtcatagtactgtccagaacatcctcccctgtaataggagtaacttacttatttttaaatcagcatgcaatgagatcagtgtagctcacctccaggaagtgtttggaaataggctcctcaacatcatttagcataacaaagaagtggagtaaaagcatagttagggcaccatcaccagtgatccccacaccacccatgctgaatattcatacaaacataactcactcatcaaactacattcagaagagctaaagaaatcaggttaaaaaccatgatagctacacaataaccacaaagatcctcctagtaattaattatgaacatttaatacacatggtcaatatggaaagacaaatggtaaacagggcaaagtgaggcataataaaagacaagagagacactgttacccaatcaagtattgagactaaccacaaagtagtgtgatgatgactgctggagtagtcaaactgcagtggcagggtgtatcagcagtcactaccagaaatttgtgcattaacttatttttatcggttataggagatcataattcacagtgactaagctaggcagtttcatgtgtggtatggagaatgggtaagaaaagagaattctttcctcattgggattattccttgctatctcaaatcatacttctagaggaagattattttgtttgaagatccataagagaaaaaaagactgttaatagtctccatgaagttatgctgacgttggggatccaaaattcagctgctaaatggggtactcagtttaccctctgggagccagtacacatcagaaaaaaaacaaacataaatagaaaaagatagcattttaatttgaaaaaaaaaaaaaaaaacaaaaccttgatgctagagaggctgctcagagggtaaaagcacttgccattccagtagaggacctgggtttgttcccagaacccatatggctaatggactggttatctgtttcacaactaactctgacactgtggtttcagaggatccagtgcccacttctgacctctataggcactaggcgtgcacatggtgtacatgcatgcatgcatataaaatttatattgtttcattccgtgtttgtaatttcattgtgacatttcggcaacatttggtgacaagtctgaagactttcaagcaaattcatataagtatttccatttgttcgcaccagagaagcatgttaaataattgggaatgttatcaagctgaggaaaccgagtctgagaatttacctgacagcatgacagtcttacagttgataagaaaaactaaagtaatgaaatttactgttgttctctgtcaagtgtgtttgcataatacttcagtttcataagtgttttctaataaagcatgcaacaggtttttgacacaactcatttctgtgtcccacattcagtctgtcacactttgaccagacctacattacagctacatgcacagtattagtttactttgatatctttctcctcatgattaagtattattttcccctggaattgaaacactttgcagatattatccaattaaagctcatagattttgctctgaggtagatatgtagtaacggttaatcatatgcctttctaaatttatatctccacagagagctttaaagagcttagacaaactgatagtttataattatctttcttaggttttagggagcacattctcatacactggggcagcctccattaaatctgtataaaagcaatagaaagaaaatgctttgaaaatggcataacaatttaaaaatatgagcttcagttcatactgtgagaactaattggtagagaggacttcagtttattgcttgatattagagcagatttgggccatttgcatgatattttctgtttaattttaatgaaaatatagaaacattcatacaactcacactgaatacattccaatttattaggaaatttggtacctaaggaaatttcaaattgtaatacatttattccccataatttgaaagaatttacatttgtaaattttatactttcatatgcatcttaggacctcatagccagttacttaacagcaggtgtaacaatgtttcaattttttcctttgagaatattgtgcaatgtttttttttcaatcacattctttcttttttcccccaccctcttgccatccaatttctatggtttttctctttttcaaactaactaaactgatgaataaacaaacaacatggagtgcaatttgtgttggacaactcctgacatggatcatgtcctgggatgtaactgatagacccagtgttgctgtgtggagaaaactgagtctcctgctcccagcagttagttatccaacaccaataacaaggaggggaaaatggaacaacaagcactttaaaacatataaatttcagttcatgatcttcactgtagcagtacatctttggtttgattgtcattttttatccatgcttccaaccctaattttggatttataaactagatcgttcttctaacccaagctctatttcctgttgtctgtgaaactacaattgtggaattggtttctatactagagttggatgtttataacattgtatcttgcatgataacattgcaaaacttaaaaatgaacctacagaaaactattatggtcatgataaatgattcaacatcttcaacaatacagttctatgctataaggaaggtttcagtaagtaaacatatatgtcaggggtagagtgcttacctagcatgccaaggtcatggattcccatccccgaaatgacaaaagcaagaaacaaaagaagaaacaaacaaacagaatatgatagaataaatattcatagctacaaaagcaaaacaaagccaaaagcaaacaagcacacacaaaccacagagccaatggcaacaatctagactgcaaaatggcagtaggtaaattctctatcactacccagaacagagtttgacccctctgctggtgtctggcattgacaatctcttggaacatgatccctgctttaatgatactttgatgacaaatacaaagatacctttgggtttctctacgttagctgtaaattttcacatgtctgagccatctcagcaattgataggattggttgttaataccattgacttttctaaacaagttaataccattgacttttcttgattttattgaaacaaatttttatttcgctggtcagtcaattcaatctttctttgcttaggcagagtatgttagtcatttgctttttcccagggtgatttatatgctgaatgctttattttaaacttcaggagaataaactgttgtagaagtaatcaggtaagtcatagttcacaaatatgtagacaatagatactaggagaatttctgacaaaattaatttattctttatttacaaacaaaaattagaaaagagtgctctcatctctctcatgttcttgtgaggttcttttaatttggtgttctctaaagtgctatttttaattttactttcatttttcttttaattggatgtatgcatatgtttctgtacaagggtatatgcacatgagtgcaagcacatgtgaatagacacacccagtggacagaagagagtgttggatctcctggaagtgaagggttacagacaattctaagccactcaaaatggatgctgggaaccaaactcaggtcctttggaaataaaatacatgtcattaactgttgagtcatccccacagcccccatgataaaatatctgaaatatgtgactccagccacaaatttgggatgtggtgaaataggtcttgacagtgacttgtttacaaaaactatcctttctgaaataaagggctgtgagttcttttactttcatttttgttacagtccttgttaacacagctctcccatgctgtcatctatcactcaaatttacagtttctctaaagctttataaatttgtatcattcaaagataaaaaggtcaaaatctatgcagaacttcataactacatgtgggcttcaaaccccaggggaggaaacaattatgaataaaataatttaactcaccaaattctttcatggcttaggaaaagctccaccctacttcattgcctcatgagttaagtctttaccaatggcaaatactgaattgctgttctgctaagttcctggttctctacgtacttggcctccctctatcacactgacctactccatttgtgcatctcacaagctgcaaccttaccaaaatagtaacttatagggaatgcacagccattggcatgccaaagcaatttgtgctatgatttactcacatgggaaatctgaaagcatcttaaatgattacacaggcatcaaatgttactaccatccatctttttttcccatttcaatctccactctccctcttgtcctatatacaaatcagcatgtctcagaatgtgcctcatgttttgtatagagggttattttgatgtaaaacaaaaataataaagcacaaaactgatgatattgtttatatgagcaatggcacaaatattttaaaagaatagtgaagggagatcttttgaccagtgaactgtatctggtttcagaggtctaaaatattgatggtatgctttttctttaacaggagtgttgagttctctctctctcctggagctttgtgaaaacttgggccatgtttaatacatcttctgatgattgttctcgagactatatattataggatattaaaggcaatcctgtaacgtccatgtcacagactgagagccataaagttatacatgaatcagtaatgtctccaaatgtgtttccccttcaagcgattctcctaaggactttagtccatcagtgaagtaaataaaattaaaaaaataaagaaaaatattttccaaagaatatttttattacggctaagtacaggaagagtgtcagactagaaacgcagttaggggcactggatgctttcacaatagcccagattcaatatccaatagctacaaataagctcagaactgtttatgcaaatccagaagacccagcatccttgccctccgctgccttcttgggacactgtacacatgtggtgtacagatatacatgcagacaaattaccaaataaacaatatttaaggcctggcaggggtgttgcacacctttaattccagcacttggtgggaagattctgatagctctatgagttctgagtttgaagccagcattgtctaaaaaatgagtttcaggacagccagggctacacagaaaatcttgtcatgaaaactgaaaaataagccgggcattggtggcgtaagccttcaaccccagcactcaggaggcagaggcaggtagagaccagcctggtctacaagagctagttccaggacagcctccaaagccacagagaaaccctgtctcaaaaaaccaaaaaaaaaaaaaaaagaaagaaagaaaagaaaagtaaaaaagaaaactgaaaaataggtaaataaatatttaaaagagagatataatcccaacaaattcctagatgaaaatcagtaatttcaaaactgtatgattataaaattgtgaaactattaaaagcattcaaaggattgcaaagtatgtttttttttttttggtaaaatatgaagtaaatataatgttgggaagcattcgacgactaaatttccccatttgtattgatcattttccttacaacccttccatttataagagtgaatttcttgatatgacagtttcatttaaatgaagtgtatggctgttttaacttttaaatctctagaaataacttctcgaatgaattccaggcatgttactaaaaagactcagatgtgaatttctaactctataggtatcccaattttatttagtgaatgttattccttttctaagatatcaagatatagcatttattttacagccacccacaactgttcaaaggtacagaggaaaatagactggcaatgttgagctctaaatgggactttgatcacagttcctctacgaaggctcaaagaccactgcaacatagggagcaaacagactgtaagggtttgcagtgtcaaatgactatatggaaacagtgtatctcgaacacagcaagacagttgaacacaagaactcataggggctagggtagcatgaacaagacctacataatctcaagccagacaaaaatccaaggacaaaaatggaagtgttcattatttacttccaaaatcaagtagaaagctttcttctagtcttgacatactcttgaccttgtagattttggggttttatatttctatgtcattgtgacaacattgaatttctgctgtacttgtatgaggaagtcctaatacatgcaccatggtgagcaatttatttcttgttgcaaccttgatattttcatcagaataataagctaataacaaacttccctttgtgttttattagtatttaatgtggtagtatatgcaatatgttagtcacagggtctgtagtatgtattagttctagatagtctcaaatttatttcatgctgtgaaatatacataattgggttttttatatactccaaaatttaatgaattgtaagatcctccataatcttatcttttatttagtattttgattttcattattcctgtgtgtactatgtataacattctacaatttttactaaatttctttatggtgtttcatagtgagaacattacatgaagaaaatgatgtgtttgtgtggtaagttctctcacatctgatagtgtcactattttaatcaatacaatattaattcagcagaggaaatacatttgatcccactgattctaagacattttaataagagcaatactttatcccttctggctgatcttaactacatattagcagtgatttgtgtgcatgttgactgaaaatgagatacattttgatacctcactgagaaatcaacctgtattcatttatctgatgatgtgtattacattcctaattaacacttctagaagcaagttggttttacgtaagtctcagatgaataaagctgattaggtgacagatgccttcaagggtttatcttggtggaaatgcatttggttagctctccctggtaagtaacatcaataagcaagcacactttcaaagtactaatttattaagattacattttttccttgggtaacaattttttaaataactgctttgattaaactccttttacttgcagtgttagcagagtgtcgtcatgtatttgactctagtaataacaatgataattacaaatttgggaccacattatcagcttttggagcaacactgattttttaagtcccaatatgagaagaaaaagactttttaaaaatatggccttgggaagataaaatgagaccaaattatacttgctacttgatttcagattatgctcttgcatttgaacttctgttcattttcagaagcaagtgaaagttaggcatatactacaaaaataatgaaaagagtagcaacatatttgttttctgaaacaggtggtacacaggtaactttgtgattgaggaaatctatttttcatgtcttctttctccatctttgaaatagcaaatctaaataatgaagaatctgccattcctgttattaagttcaagtgctgagatgtttcaaaaacacaaaaggccgatgccaagaattggttacctcatttgaggtgttgaccaagaaatttgcattcactgtagctggtttttgttctttggggtcctgccacccagctcccaaataaatacatggagacttattctttcttatgaatgactagccttacctaggcttatttccagtgagattttctgaaattattccatataccttttctctctgagtttttatctttctctgttctatatatacctttctttacttcttactctgtgccttgctgtatagatagatggctagtccctaatgtactactttccttcttttttctcactccatctttctactcctcttcctatttattctctctgtatgccagtaccacctatcctttctcctgcctaggtatttaccattcaactctttgttagaccattcagatgttttactcagggaaagtaacacagcttcacaaagttaaacaaatgcaacataaaagaatacaacacatttttgcatcattaagcaaatgttctacagcataaacaaatgtaacatatcttcaactaatattccacaacaatagaacccaaaatgttaagataactgtgatttctcttagttattttcttgaacttgatgacaaaacctcatacctcagccatagaacatagagaatcaagttgatactaaccagaaaccatcatccttggggtaaggtttgtagtttcatacaggccactggaagagtaaaggaacaatcatttttacttatttatgatccttgagattgataataatcaccaacctggaatgatatacccaccagtgcaagggacacaacatcattgaagtatccaactactttctggttgaatttatggtcttacccaaaagaagatttattaaatctctaagatttaataaaacaaagcttaaaatattacttggtcttcagagaaaaaaattatacatatgggctttattcaagatttatgtgatttaagtaaaacaagataaattaatgaataacagtaaaataaccctattttagatatgagatatatacttatacttctatatacatatacacaggtgtgtatagaggtaagaagaagatggggtctgagggctgtgttaagagatcacagaagacaatatttctatcatccaaatcaaatttacagaagacagtgatcaagactggtttacaaattgatgtgggagggttcgactcactgtgaagagtatcattgtaaaagaaagcaagttgagtgagccatggaaagcaattcaatatgaggcattctttcatgtcctctgtttcagttcctttcaacagattcatcccttgagttcaagccatggctaccctaaacattgaattgtgacttctaagccaaataaaatattttcctcacctgttgctttgtatcattgtttttgtttttatcacaacagagaatgaaattaaggcagaggtcatatttaaatatattgaaattccagatagttcaggccaaactcacactccataatgctactcttaatattatttcattctttgctattgaaagagttatttattttttattagttattattattttattagttcaaattaggaacaagcttgtttcacgtatcaatcccttctccatctccctccccttattcatacacctcctcccctacacccacctaccacccaccccatccaccctccattccccaggcagagtagggccctcaacaggggctccccaaagtccaccacatcatcctgggccaggtctaggcccttctccatttgtccaggccaagagtgcatccctttacgtgagatgggctctcaaagtcccttcttacaccagggaaaaatagtaatctattaccagggccctcttagagtgtagaggcctcctcattgacatccatgttcaggggtttggatcagtcctgtactggcctccagacagcattctggggtcgatgtgcttgcccttgttcaggccagctgtttctgtgggtttcaccatcctggtatcgacccctttgatcctcattcctctctctctgcaactgggatccagagttcagttcagtgtatatctgtgggtgtctgcctctgctttcatcagccacaggatgagggctctaggatggcatataaagtagtaatcagtctcattataagggaaggacatttagggtatcctaaatggtcttctccagtatgcctagattgtcatttcctatcatcctatgttttaagcatagattgtcattggtgtttttgattttagccattctggccagtgtaagatggtaactcagagttgttttgagttgcatttctctgatggccaaggattttgagaactttcttaagtgtctttcagccatttcagattcctctgttgagaattctctattttgttctgtaccccactttttaatttcattgattagaatcaatcaatgaaatttggtggctagcttcttgagttcattgtatattttggaaatcagccctctgtcagatgtggcattggtgaatatcttttaccattctgtgggctgtcgtttttatcttactgactgtgtcctttgccttacagaaacttctgagtttcagaggtcccatttattaattgtagatcacaatgtctgtgctactggtgtaatattcaggaagtggtctcctgtaccaattcgttcaagggtatctcctactttctcctcaagaaaattaagtgtggctggatttattttgagagctttgatccttttgtgcattgtgacaaatatggatctatctgcaattgtctgcatgtctgaatccagttgtgctggcaccatttgttgaagatgtttttgttttttttccattgtatacattcagcttttttgtcaaaaatcaggtgttcatacatgtgtgggttagtatcagggttttcaatttgattccattggtctatatgtctatttttgtgccaataccaagctaaaatagagctggaagtcagggatggtgatgcctccagaagatcctttattatgcagagttgttttggccatcctgggttttttgttttttcatatagtgttgagaattgttctttcaagatctgtgaagaactgtgttgggattttgatggggattgcattgaatcttcagattgcttttggcaagattgccatttttactatgttgattctacctatctctccatttacattgatgttgtctacaggattgtagtaaattgcccttattatgtatatatccattgtggcccccatatccccagaacttttatcattaaggtgcattagatgttgccaaagcctttttctgattttaatgagatgaacttgtgttttttgtttttcagtctgtgaatatgctggattgtatttatagatttacatttttgaaccatccctgcatctctgaggtacagcctactttattgtagtggatgatgttttgatatgtttttggattcagtttgcagatgttttactgagaagttttcatctgtttaaaagggaaactggactgtgtaatattctttctttgttgaatctttatatgatttagatatcaagataatttaaaaagaactaggcaatattctttctgtttctaatttgtgaataacttgagcagtatcatagttaaatcttcattgaaaatctgatagaattctacactataaccatctgtccctgaattctttttagttggaagaattttaataactgcttcagtttcactagaggctataggtctgtttaggttgctcatgtgatcttgatttgatttttgtagatgttatccatttcttttaggttttccattttggtggggtacaggtttttaagtatatttttatgagtctctgggtttcctcagtgtctgctgtcatgtcaccattttcttttctaattttgtgaatttgaatattctctctctgcctttagttaatttggctaaaggtttgtcaatcttaatgattttcttagggaaacaactatgattcattgattattattatttatttatgtttgtttctattttgttgatttcagctctgagtttgattatttcttaccatctattcctttgggtattattttttgttctagggccttcaggtatggtgataagttactatcatgagatctctccaattatttaatgtaggcacataattatatgaactcttttcttagaactgccttcattatatcccatatgtttaggtataccatgtttttcatttcattcagtgtgaacattgttttttattttattctttcttaattactgttttggccaacttttcattcagtaataagttcagtttccatgagcttataaagtctctattgtttctattattgttatctagctttaatctttggtaacagagaggatacatggtgtgatttcaaatattttgccttttgagacttgctttgtgtcctagtatgtggtcaatttggtgaatgttccatcagctactaagaagatttattcatttgtatttatattgaatgttctgtaaatgtatgttagttgcatttgatttatgacataatttagaacctgcatttttctgtttaatttttgtccattggtaagaatgtatggaagtctgccatgaacactgtgtgaggatcagtctgatattttagctgtagtagtgtttcttttatgaactttggtacttctggttttgtgcataactatttggaattgaaatatactcttgatggatttattttcatttttattagcaaatttttattttagaaacaatcttattttacatatcaatcccccatgtcctcaccctcccatccttccatgccctacaccaatcccccaacacagttcccacccatttcccaaggatagtgaggccttccatcatcaaagtctgtcacatcatttgggggaggacatagaccctcttccatatatctgggctgaaaagagtctatttcttctttcatctcttgaacagttttaatcatttcattccagtgtttatgttttcacagactttagcaagggatttatatatatcctctttaaaaatcttaaacatattaataataactattttgaagttcttatcttgttctactgctacattccatttctcaggctccactatagtaagtttgctgaattttggcagaggtatattgtcttgggtactaattattgtgtttttgagctggtttctaggcatctgggtttgtaatttttggtagcaataagtggtcctgtgtttgttgggtatgtgttccattccttgatttctgttaccctttctgggtcttagaaatatatggtggctgtaggtggccgggtagggagtgattctgaatccctgcccagtgtggccactggagagtcccaggtagaacatgttgggtgctgacaggaaggaatggggatgggctagaatggggattggctgagagagtccacaagaatgataggtctgctacaaggtttgattgagtctctggcgatttgaggcagagagtacaatgctttcaaagtagtttgttgcaggacttgggattggaagaacaatttgaaagtcaggaagaatggttgaagatcaactacccgataaaggatggtgtgtttcctgggttgggtccactgtgatgttcatcatacatccccagggaatcagatttcatttttaaattactttctaattagtgtatatatcccaggtgtgtttgcatatatatgtattgtatgtgcccaaagaagccagagaccttgaattgcactgaaccttgaattatagaaagatgtgagcctcccaactggagttcaaggaaccaaatccagttccgctggaagtgttcataaccattaagtcatttatcaagtactcagcaatacttcctgaagtcacaaaatgtgctcactgaaattgttgactgttttcaatgtgtattcatttctgagtacaaatttctttttcatacttgtatttcccttgtttatgtattttagacattaacatttattaatgtgcacttttctagattacatgtgaattcagaagttccatgatgagcacagattcacccttttgttcatttatgtatcaaagagataactgtttgacaaattctgttccacattaagagaaaaactcacaactatggagggaaaatatttctttttaaacgattaaaaagaaatcaaaggattgttattagtcatgatgatacacagtcatttccagaggacatggaaatgaacacccaaagttggccctggattgttatgctaggtttacaacctggcttcattccttaatactacaaagactctaagcctctgtggggtggttaccaaccctgtcctagacactttctggtggatttgatgaatttacatacctggaacacctacacctaattactttatttccaacacagtgaattgattattactcattggttttatttgaagaacaaaatcccaacagtttgagcatagagttcttgttaccttgctactttttcttattaagtagaatctacttgttatccgtcacacttaatgtgtattagtcttaaaaagaaacaataagttgaaaggtaaccatttaaacagatgctgatgtctttacttggatctttacatcatgtatatacaagatattttatctctgcacataatctttgtttcatattttatttttgtctttatatagtatactttgtgttctgagagaaaaattaaaagcaataagccagtttcactttatgaaatacgattttaacaataaaatcacaagccaagactctggtagtaaagtgctgagtcttggtttcttacaaagctgattctccagacaatatagtcaggacatcagctttgctatttacctgcttactgaatgtggtaaataatttgaactctatgaggacattgtgagagaggaggttcaagcaggagttcaaagtcatcctgagctacatagttagttagtattaacactggtctatatgacaacctgtaaaacctgtgttttatttttaaactaaataagtaaataaaattctagagataaatattcacttttgtgatcaaatggttttggtaaaagtccctaggaaatttaatcaggatcatatagccaggttaacaaagagagctataactaaatatgtacaaactgttaaaaaataaattaaaatttatcaaaattctagagttaaaaactagagccacctcaatgttagaagaaagcatatgcatgtatcatcatgcattagcaccaaacaatgcttactcagaattattttgaagcataaataatagcttcaggaaaactctacatacagctatggcttgatcatgctagtccaatatcaccagcccctcttaattttgaaacagcatctaaattgtcagagaaacttcaatattgtgaacccgctgcctcagccttcaaagtatcaaggattagacacgtaaaactattagtttaaaaatcaaatattattttgcagctcaagattttatttgcttgatttaatgaaaataccaagtgacagttttgttatagtatttccaatatactttgtttttgacaatgatccacctccctcactcctccccatgtcctgtgctacttgaacctttccatctgcattagccccttttatatttccatgtgacatatgttccactacagtttctctatttctttctaaagtctctttttcctttgcatggttttgtttctcatgtcataacatatccacactcacaatcacatgcatataaataaacaagctaggatttgaatatgagcttggacatgtggtatttatctttttgagcctaaatttcttcacttaatatataaattcccacacccattcattttccttcacttttgtgttttttcttagctcaatgcaatttcatgtgtgtatgtatcatattcatttctgtagaaatgctggccttgaattcacagagatatacctgtctctgcctcctgagtgctgggattaaaggcatgagccacccagccatcttcatttcattataaattttgtctaatttttctttagtcattttttgtcttactcatcttttgcttatacagtatggctttcaaatatctttgcataaggtttgtgcatgtgttatgttttttttcttttctaattttttttttattttttgttatcctgtttgtcttctagagagagatttaaaaaaaaggtatggagtttggtgagtgggaaggtggagaagatctgggtggagttaatggaagtgaaactatgatcagtctatattgtataaaattcatttcaattaaaactatatttttaaaatgtgtatggcatatcctgctcttctcaacctctctcctgactcaagacatgcctatgggttgttggatactgtctatctcaactctacctcctaagcttttaagtgaaactcttggttttggatgtggggaggggagatggggaagagatgactcttctgttaaatggttcaggggactactgatgaccttgctccctggttaacactgactggctcattgtcccagggcagcagacacaaaccatgtcactgactcaaaacctaagatggtttttcagacttctttcagggtgctgtgcattactaagtttcattcaacaccatctgagtaaaactaagatactggcagtgagtgtaataccttattagatgaggcagtgataactccattcttttcacatttgaatcataaaggacacctggaagcaaatattctccaaaatgtctttatgtgtgtatgcaccaatagcaacacaagcaatgatgttatgtgatgaacagatgagtatttgttatatatgtactacttatagatccattttaatgttaaaatgccaaacaattgatacctcttcatgacttcttcatttagaatcaactaaattttgaaaatcattttttatgttcactgatttttacaggacaaaaactgagagaaatgtagttcaatataagcatactgagacaaacatcatacattttggtcccagttgcagagaaggaggagtgatgaccaaaggggccgatactaggcatgtgaaacccacagaaacagctgacctgaacaagggagagctcttggtccccagactgatagctgggaaacaagcaagggactgatccagaccctctgaatgtgggtgtcagtgaggagatcttagaaatctatggggcaccttatagtagatcagtacttatcactggcataggaacgtgctttgggagcccatcccttataggaggatactccgtgagcctttacacacgggatgggcctaggccctatctcaaagggtatgacagattcagaagacccctatggaaggcctcactttctctggggagcagaaagcgtataggataggcaaggtgttatttgggggtctggggaggaggggagagagagaactgggattgacaagtaaaacaatcttgtttctaattcaaataaaaaatggaggaaaataataaataaataaataaataaataaataaatttcttattttctttggagggaagcaaatagagttttaaaatgtttaatttatatatgtctgaaatgcagtatctaaaatttagagctataaatcgttactaaatatgtgttgattcatgagaatgaagttgactatatccagtgtcttatatgattcaaagtatcaggaaaacactcattatattttaaaatatcttaattttaaaaattaaataaaaaattaaaaatttaatattatttcatattttcataaatacccaaaatattttgtttataaatttattcataaatattttataaacattatagtttcataaaaatatattttatattcttgatttaaataataaagaaaaattaattttaataaaaaattataatgattttatgaattttcttattaaagtcaggtatattagaaatattattgtatattttatagtttaaattggataactctcaattaattattacaggctatgactcaaggcttagtcttgtggtcctacctatcttttaaaatgtcagaatgcagtttttctaaagaaactaatgtaacatcatttatttagaaagtgtgatccctaatttgaacagagcataaataactgtgtaattccatatttgtttgctatacagtaaaaaaaaaaagatggaagctaaaaattaactatacttaggagagaacaataaggggactaagtggctgatggacacatggggcactgatggggtacatcttcagatgtaccttctgctgtatgtatgtctgccttctgtacacacacaagtgtcatagaagagaataacgtatctgaaagaagggaacctaacacatttgagagatgtctaaaaacaggtatgtgtggtaaaaataaagacaagagaaaagactactagcttcagatatgcacagtttgtaactaaaagaacacagactggttattttcatattaaaacaaatataagaatgcagaaagctcatgagtagtctcagtaacagaagaaatttccagataagctgcatatctgtcctaagtagattgccatccaaagacatagagctcagcaacttactttagcttgtgaagtcactgagtatccaagcagagatattcctaacccctcagacatgacatctataaattctgaacaacaaaatttcagtagcatagcagataaaaagtgtagttcctttgtatatttacatctgaaaaacaggctggtttaaatgacacaaacaatgtcaaaaaaaggctcttttggaccacggcagtgaccagagtaattaagatcaaatgtattggctaaaatacccagaatgaatataatagctcagctttccagggaagtaaaaatacaattattgaggttgtaatcatgtgcctgttgttcatgaatatttgtatgtgcatatatttaagcacatgttcaatggtatcaggaaaatgatgcctacagaagtgatatatggtaatattgactacgctctgggttaagagtatttataatagttcaatcatcatggcctttgatgactctaaattgtattcacagtagatttagagaattccaagaggcacacagactgtagtacaatgcatgttggactttgccgaagaagtgttaaaatttctgctaatgactatattttgagctttgtaaaacagagaaaggaaaccattctgcttaaggaaggcatttggcctcaatgagcctgaaatacactttcaagataaatttactggagccaaaaagacagcaagatgagtgtcagaacaagactgacattcaatgagtaaggaataaaggcaccaggatatttataggactgaaatatgaattgtatgtgaacaatctccataagaaagaagatataaaatagtgcttcataaatgaatgaagtgggattgaactactacttaagccttatgatgggaacataatttaagggacaagcacattcatgtccgaaagaaagcccagttgcacgcatcttttaaaatgagctatatgacaacactcaaaagctttctgtactgcctatatacagcatgcttaagcattttgcaggatcctgttataatatatagaaagtgcaagtgtaaaattcatctgataaataagatctactgttcaatgctaacaaatttgatagcatagtctcctagctgcttgctcttctttttaataatagatttttgtgtgcttggggatataatggaaaggtcactgcacacccagtagataatcaataagtatcttggtaaaaactttagtgaatgtgcaaatgaattattaaatttcaagttaagtccatgtgtttctattccgtatcacatcttacatccttagaaatatctcaagtgattttttcctcacttacattgatttaattttgatacagtatagaattcacattgataaatagaaccataagcttgtggattttgaaaatctatactctattattttcttctgtacacattgggtctctgtagcagcaaaaagagcagtccttctaatgcagtttatgaaagcttcccacttccatgtgttcctgactaacttcatgtttagaaaaacagtcaccatgccatgaaccacacaggccaagggacacctgtcaaaaaattgccggatgatctttcagtagggaagaccttttaacaccaaccctactacaaatgggctctaaacatgtaggcattagtacatggacatgcctatccactcttatgcacaattctctgaaggacctctgtgcttcagctggctgacagattttcctctacctccctttactgtcttgacttttcctgtgcaaaatagaaacttatgctattccaaacaaataattttcattgctagaataaaataaaaatatattttaatttcacaaatgaataaaattactattagaaataaacaaattaatctctttattttcatgaatccaggacattttgcttaaatcacaaaaaagtttctgttcagactgaattcttaagagtgctgcttagaaggccaattcattgcttcctacattcttttgctttaccttttgagaaggacataaatgaaatacagaaagatggagttgaacaaagagaaaataagagaacaatgcctgattaaaatgtctaaatattatgcctatcatctgaaatcatgtcctcatatttatatttataaagtaatttgttttatacatatgcacatcacttgtttttttttgaggagtttataatagtgcaagcattagcaacccacagtgggcagcatgaacctttcctctttttaagatgagtctcaggtactctctataggataaaaattcagtaagcaatgagtcgaaagtaatattatgtatattgagatctaatcagtgcttaaaatcttgaagaagcatggtctagacttatctttttttaaaaaacacattctctgtgttgggcactggaacatttattttctgctcatgtctagtcagtttctttatttttcttctaacactgcctctttgcctgtggctagccttccatgaagtctcatgtgtagattggtatgcagaattctgtgatagagtgtgaggcatctgatttggttatgcttcctatcgatgttaagggcttctctacataaattgggtcaacccctccagacaatgcaactgcaatgaggatttgtgaattgtctgcatccacactgttctaaggagaggcttagtaatcagatgcaatcttaaggtaaatagaacagaaaactatggacacattaaaataaattatttggtcaggaatctagccaaaatggacaaaccttttgtagcctttctcctaacaggaaatccattttttatttcaatacatagacttgctcactgtagctacaaagtgagaactcattcacagcaaannnnnnnnnnnnnnnnnnnnnnnnnnnnnnnnnnnnnnnnnnnnnnnnnnnnnnnnnnnnnnnnnnnnnnnnnnnnnnnnnnnnnnnnnnnnnnnnntggatgcttctgtactcatcaatccagagggactccaagccagcacaattaaaatcatgtaaagttcatttgaataacgtagaaaattattagtttataaacatatagactgttagatgcatcaaagaatataatgaaaatgcagaaaatgagggtaagagtgaattgaaaaatcatatcaagacaacaacaatttatattcaggaccacaagggattaaatttaatttttgtggcacttatgggaatggtctctttatgaggagacaaaattgtatccccttaataaatgaaattctcctagtagtgagaaagtcaaccccattaacactgcaatctttccagagtgaccagtttaaagctaatataaaatcattttattgatagaatttttaacttctatgatggctgttactccattcaaaatatcttttaggttctgagctaattattgaatcatcatacatattaaaatggtagtgctgttaaagatagaggagaaagggcatgtgaaaaaatgagaggaggagagaagtcaaagatgaggcaaaggaatgttagagttggagtggtagattggatattaagattcatctcatatcctttcagtctttgattcatggaaaacatgtgagcctcatgattcagatgaaacaaattgtgttaggtcattcagagtatgcaaaggggataggcagcatgttccttcttgtaaattttccaaggaggatttataaaaacatttaattttagtgtacttagctaattatacatgataaaagtaatgtaagggagaatttggtttttaaagactttgttctattttatgcacatggatattttgcatacatcatgtttatgaaccacagttatgcctgctgtccacagaggctattagtggatgttagaactgttggaaatgaagttgcagatatttgtgagctatcatatgggtgctgagaacccaaatattggtgctctggagaagccagagctcttaaccactgagccatataccaccctctaagaaagattcacttgcctcatagtttatgacaggatgcagtttatcacagtaggaaggcatggcagagggaacaccaggtagctgttcctattgagtccacatcaagaagcagagagtgatgaatgttgctgcttacattattttttttattctcggagcatatagaactcttaggatgatgctacccacagttctcctcagttaaacctctctgaaaacattaaatacaactagaaacatacctctttggaaattcaaatccagtcatgtcaacaatatatattaataattatcagagtattatagtggaaaattttacgaaagatttttatgtaaattaaagaatagctggtatcagttttagaaataaaaaaaaaaaaactcaatgaacattgagaaagattcttcaagactggttctaacgttctctggatctataactgagagaatgtctgtatgtatgtatatgtgtgtaaatgtgtgcatttgtaaattaagtgggtagagaaagagaagacagcagacagaaacagagacaaaggaaatttattttatacaacttgctcatggcatgaatgtggatcagactgatgcattgaaaatcctcatattgcatgagcaactagaaacccaaatttagtacaaaagctagatactagcaactttctctttatttgggaaaattcatttttacattgtagatgttaatgggacttatttaaaatacactgattaaagaaacctaaacaactcttcatagtactctccagacaagcatttgactgtaactcagtactgtggctactacacatgttgaatcataaagttaaccatcaaagatagagataagacaaaaggattaaactccaggtatagaaacggtgatcgtaaaagtaaaaagatggattctagattctgtactcctttacccatagatgggagtgtactgataaaaaaaaaatacctgttgctccaggggatgaaaactctttaagattaaaaaagactcctaaaaggcaaatgagataaagttcacaagaacatctgagattacctgggagggaagttgaaagtcactctgctgcagctattttaaaactttcctcttccaaggggagtttctaagccctcctagaacccatgtcttggtcagggatgcctactcctggtaatctaagcatcatcttaatgaataccagtccacttgggatgccttctgggttgagtttccatccagggacagttgcacctcactgttcattcctcctgcatctttatgagctgcaatccctacctccttacacttgtatactctatagtctcctcctttaaaatgtcttctagttacagtccctagtgtctgaaatcggaagaaaagattttcatagctttgttctccctaattgttgcatattactggggttccttttctcttgttccactttcaggatgcctttgtctcaataactaggggatgctcttatttcaaacataattccatcaaccttcttccctgtatccttacttctttttgctcttgaattctccaatatagctacatgatacattaattgtatcttcatgatagcattaattcttgaaaccttatttagtttttactgcagtatggcttagcctcaatagaaacttgaaatccagtctcagtggccaaaacagaacacatttgatttccaaatgctcacagattttggaaacttctacttccacacataaaaataatctaaaaatcacacctttctaagctttcttagctgtccaatctcatccctttagctaatcatattgttcagtcttacagagattcaaatattatttgggtatgaataataacacaattttgtcacttgctattttactttattacaaagctagaggaaggatttggcctacctgctctagacctaaatgtgtttgtttaaatttttctctaaagtttttgtcctaggtcagtctggtcacctgactaacagggaaaaataaagcaacataagtaaatgcactgtattcttgaaaacatctaagacataaaacatttctaatagaggttacaaatgatatatgtaaccacagatgtttaactctgaataatccctacccacttttccttgattttgttactaactttaaactttttgttgaaatgtaaactttctttctcagtatttttaagttcattgggatatgtttaaagtaatgtaagatctgaaaataacagcaaagaaaggttaacttaaaacttgcaactgaagtcatataaaaaactgtggtatcttataagagtatattataaaagatttaataataatggtctgagtctctgtaaaatgtatttatggtttaaaatttattttgatgctgaatgaatttcaattcaaaattatagattttcagacacaaagttaacagtgatggaattataaaatcttataaaagttaataacttattttaaaccattaaagatgtaagttaatgggcagtcaccatataaatgatcgaattctttaacgtactttgaaacatgtttacagttatactaagtaaaaatataatttatgcacaaggacaagctttggcatttttgtattgtctcaaagttaagcctgataaaatttactaaatatagtattcaaacctgggcactagataatgccgatcaagcctttcagacatctgctgaatatgcattgaaggtgtttaacagaaggaaaggacaggaaaaggcttcctatgataggcagaaataccatcttcaggaaataggcctgagtccacctccaaacagtcctaaagatttcaaatatacacccaagagaaaactctccctaagtaatttaactttgcctctgtccacaatctctgtctcatcagatttccaccaggctggcagacactgtcctagaaccacctttaccctgcagatactctgaaacctgctcacctccatagcctgggctatcctcaaaaccaaagggcctttgaactgatgactgaccaaagtgaggcacttatttcttcccagtaaaactgtatttactacataaccattctggtcaggtaaaagagcagattaacaaccaacaatcaacagctggtgcacagaatctgccccacccccaatataggactctctttatggtgtcctgggggcttgtgacttatgcctctgatctctagtttcctcataataaatattgttctctgtgtcttcagtttttttttttccaaagagaattaacaatgagctgacacaatgctcagggaaccagatgctaattatggcactccttctggtatcctaccattacaatttgaccacctactttggagcaacattccagactaccctttttcccaacatccccactcaactgaaagtagccagtggacaacctttggctattattatcaacaaaaggccaaaattgtggatcattagccagtccctgaaaggctatgtttctagacatattttggggtatcagctccactgcacttgaactaggttttgcaaggaaatggaaacatacagcatttctcagatgctcttaaattagtggttctcaaccttcctaatgctgcaaacctttaattcagttcctcatgttgtggtgagctacaataataaaattattttgctgctacttcataactgtaactttgctactattataaatcataattacatatctgatgtgcaacccccaaatgggccatgactcacactggttgagaagaaatgcctgaaaggctgaggaaacgctgctaaccgaaaataagtgcctcttctgaacaattccccacattaaccatctggcttttccagcatgtgaattgtctccccactcccattttcacccatgtaaaacccagagatctttccagctgggagctgtcctccactgcccaaagcagtcagatagtttgttaattttcatttcactgttctctccactgagtggctgtgttcatagtttcttgctaccttacttaaagtgttgttcccaaaccttactcaatactgaaaagtttgtgttgggggctaggggctgggaagagggctcagtcgttaacagcacaggctcttctttgagaggacccaggttcaattctcagcacctacaaggcagctcacaactgtctgtaattttgttccagggaatccaacactctcacataggcatatatggaggtaaaattccaatgtacataaaaagagtttgtgtggctcctagacaagcaagtaggcaagaagtcaacttgtcaggacaaagatcccaggatactgtctctctccagaaagaaagggaagaaccctttgtatgaagatgtaagctggtttgtataaaatcttttactttttctttgtctcaaatgcaaatttgtccctcatagggtaggcagaggtgctaatgctgtaggaattctgaggatgaaggtggggaccagcagcaggatcatggttgctgtcctatacacagcagccatgatagctgtctttttcatatagatggtgaagaggaagtagtgacaatggagatgctaccgagatgtcatgggctcctcagcaggctctgtgacaagattttgactttaagtggaatttctagcagagcaaagacaattctgaacatcagatttgctaagtgactacatcagtggtgctcaatctatgggttgtgacacccttggaggtcaaatgatcctttcacctgggttgaaaatcagatatcctacatatcagatatctacattacaattcataatagtggcaaagttatagctatgaaacagcaacataaataattttatgattggggtccctgcaccatgagggactatattataaagtatcatagcagtaggaaggttggaaccactcagctacttgaagcaagcacttgttacttgagtgatgaaatggcagtacttgcaccttatctccatgtcttaagtgatagaagaacatatctgagtgtctccaacccatcctaatcattaatcaggatcctgctttgggggtcagctttgataataggttaactgcaccatgggaacagtgaacaatcttgcaatctccaatagggttattttcaatcattgcacattcaaatgtgtgttagagtctgtgtgtcaaacaacaattttgttatttgtgttttgttctctctctctctctctctctctctctctctctctctctcgttggactccacacaaatggtaagcagttactttataagagatatattttggtcacttacttccccatctgaaatcagccctactcgctccatctgggtctcttattgctgagaaacactgtgactcccagctgcccacagctcaagccctgtctaagtcttaataaaagaatggtgttgattcaaatctgtgccctcatgagaatggactttaaggtattattgttttattcacttaggatcttattttttttctatgaggattatgttggttttaaacaatgatctcttcagcaagtgaccaagcacacactatgattctcctccaaaggcatgtggatgtttttcttctgtgttctgctttgcctccaaatacctctgctaggtttctatgaaatattctcatttttgctgctttgcaatgactctaaatacctcatcagagttaggagttcttgcttgtgggcaatgctatttcattattgatgtgctatttcattagtctgtgctatgtgaactctattatattctttctacattgttgataatttcttgtgttatgtcaaatgaaatttgaggtgatggaccttaggggatgggcagctgatttatctcctttaatgctagaaaaatctaaaatcatgcttaaaaaccaacatacacatagtgatattttatgtaagcttttctttgactttagcaatatgagcaattttagcaccattttaaccacttggagttttaatattttctttgttttactaaatgtgtgatttataggtttgtttttggttgtatgcttatttttatttttaagagaaatggaagggcagaaatgtaagttgacacccatttcctattaaaacatataaaggctccagtttgtgggttagctcagacatacagctctgtttagcatggcagacacccggagttatattcctgccactaaacacttcaagcccaacctgaatacactcaaatcacaggaaatggtgaaaatgtgagcagaacccatggctattcagaaaatgctaaatgtctgaataatgtactaaatggttacagaagaataatttctgataatctgcaagcaagtaaggaagaatttttcccacttgggagtttcaacaatcttaaattaataaagcctaaaagtattttaagaatttattcaatatggcagatttttccctaaataaagaacccttacatcaataattgtcaggaaatgcctcaaaatgcccacaattctgtgaattttaacacaataaatcaagtcaaatctgattctgatctgttttgtttttttttttttgagacatggtctcacgtatcacaacctacctgtgcttactatgtagcccaaatgcaaccttcctgcctctgctcctgagtttggtattaatggtgttcactcctgtacctgggatgcaactcagggcttcacccatgtgaggcaagtgctttctcactagaactacatcttaagtataaatcaaactaattcttcattgtcaggtaccctaagatgaagcacattgctgaagggaccaccttaaaacaacatgaaacaagtgttctttcttgtcttattacacatcattaaatactggtgtcaagcattccagcaaagttccaggaagtgtattaattaatactgcgacacagattatatcactttatgttactgctcaactgctgccactattaagaatttaaatttatgccaaagacatcataagaactttaaacatcaccatctctcttcagccatacagtgaggtccatctttgagttctttacaggagtcacctgaagctgccatctctttggctcttggctgtgccaggctttgctggtggcacaagcactttgtcgaagtcgatgaagctgataaatggagtgctcatatgtaagcagtaactattaataaaactgctcataatgggggtctgacagcaatgcaaactcctctactgacacacgggaggaaaccaaggacacattcatcattgcctttcattgatcaatacctaagtatcactttatggacaaacactctagcaacagttagtccgagtcagaacatttgctctttcaaacacatgcaatgtgtcacttaaaaaagaaaaggaaatgtgcttagctgtgactgcaggtgcaagaagagactgaggctggagtacagaagcgagagaaaaacatgatttacacagtgtaaaaataactggcccaactattataaaaatgaaaaatacaattacatggtgcacatagtttttttttaatgtaccttggcttatagatcatcactaaaagaaaaattcttaattttaataatgcgttgtatgtccttttcttcatgaatcatgtgtgcttccttcaaaaattcctagtcagtttatgcaaatagcttctcatactatccctaaaacaattgttaagctaagacaaggaatatagtctgttagggttaccatgccttaagacaatactttgactttttaggttttttaatttttattagtacattcattttccacttttattgaaaatagattcttttctcatacaatatatcccattaagagcttctcagaggaggagcaagagtagataatgtggtaaacttgatcaaaatgcattatgcacatgaaaatgtgacaaaaccaaaacaatatatgttaataaataaaaaagtgttttccctcactctagtcttcccacttcctccctgcctccccttccattcaaatccactccgtttctgtccctcagaaaagaacaagtttctaaaaggcaataaaacataacaaaaaaatataataagacaaaacaaaaaccattaccttgaagttcaacatggaaaacaaacagaagaaaaaacagaagaatgaaagaaccctcattgtcttactctggaataccatataatattaatggaaaatcatactctatacccatacaacctgatgcagacccttgcaggccctttgcatgctgttctgtttcgagttcatatgagctttgctttattagttgatttagtgagcattgttttcttggtgtcctccatccctagtggatttccattctttctgtctcgttttccacagggttcccagagccctgaagggagagaattgctgtagacatcccatttagagctgagtgtgccaaggtctcttattctctggatattgtctgttaatctgtatttgttcccatctgctgcaagaggaagcttctctgatgatggctgagttaggtggtaatccttgagtatagcagaatacccttaggagtcattttattaataattttttttgttttttaattttagaccagtagtgcttggttttatcctagctctctggaatatttaatctctatttcttggttagtcaagcagtactgagtatgggttccatctcacagagtaggttgtaagtaaaatcaggcaatagttagttattcccacaagctttctgtgatcattgacctagcatattgcagggaaatgtaggtcaaagatttttgtggatagattggtgtctatgcttttcttttaatagcttgaagagtatcttcctgtaaaacagaacatagggctgaagtttctatatagtcaccacttgactgttccatatgcagtgagtggtaaatgtgttgtcttcagcaatggggctttgctgtcagtttgtgtacaaaaacctataattgtgccaacagcctaggttgtgtgggaatattcataccaccccctttggccaaaaactcaactgaatataaccaagtgttagtaatgaaagctttgtttggtgacaagagatgacagttgagactgttttcctctaagtatttggagacttcattaggattttcttctacattttaggaagttaccactgtactaggttttcattccatcccctccattgcccctcagttctaggtgtttctccctgcatcccttcctcctctcccaattatcctcctatttccatcccccgtcaacaccagtccacctttcaaatttattctatttctgcctcccatggaaatcaatgcatatcttccttgtcctttcctccatacctaacctctctgggtctatgtattgtagtttggttatcattggattaatagctaatatccatgtataagtgaattgataccatctttctctttttgggtctggcatacctcattcaaaatgatttttttctagttatatccatttacctgcaaacttcatgatgttattttctgaacatctgagtgacacttggttgtataaatgtaccacacgtcctttatccattcttctgctgagggacttctagactgtttcaatgtctggctattgttaatggaacagcagtgtacatggttgaccaactgtccttatgataggatggagcatcctttgtgtgtattctcaagagtggcatagctgggtcttgaggtagattgattctcatctctcagcgtaaataccaaactgatttccaaagtggttgtacaagttttcactcttaccagcaatggagtaatgttcaccttgcttcacacacttgctggcatgatctgtcacttttgttattgatcttagctgctatgtcaggtataagatgaaatctcaaagtagttttgatttacatttctctgatagctaaaaatgtacaacatgtctttaagtatttctcagccatttgagtttcctcatttgagaattctgtttagatctgcacaccattttaattgggttattttgggttgtgatatctactttcttgagttctttttatattttacatattagtcctctattggatatggaattcttaaaaatattttcctatttgaaggttatgtgtgaatgagagtgtcctgtgtcattgctttctatgagcatagtgaaaaaccagagtcgctccatggacaaactgccagaaactctagtatcgtgtgagaatttaggagacataagaacaagagaaaataaataatatggggctagcactttcctcttcttgatcctctttaacagtgtaaaatgtggtacatacagatccattcaaggtgcaggctagctagcatttgttgatgcttgaaatgttcaaatacatattcctacatgcttcccattattattaaatgtacgtgaacaaactcagctgcaaaaccctgtaagtcttgattttgcgttgttatgaaaggcctatcaaaaggaaataaagtgtaatcagatcatcaaaatggataagaatatttgtaaaaagttttaaagaatacgaggttagatgaagggaaatcatccatttttatggcttttgatagtttatttgactgaaatttgtttaaatgctcaaacatttgattttgatagcaaacatacatatatagaaaaactcaaataagctctatttttagtacattttctacaagagctgatatatatatatatatatatatatatggaaatttttttgtaaattgaaatgttcatttataaaatgcaggtgatgnnnnnnnnnnnnnnnnnnnnnnnnnnnnnnnnnnnnnnnnnnnnnnnnnnnnnnnnnnnnnnnnnnnnnnnnnnnnnnntgcaggtgatgcagaagtatagaaactctgttttatagaaatctcaaaaatagatgcctgtaattttgactaaacagaaccatttttacacattatctaaactaaaagtgcaagaaaatatttctaaagaataatatatgaaattacttgaaaatgtgtctgtgaatataccatgttaaccctgcatggaactttcatttctaacgtgaaatctaaaaagtaaagaagttaatcaatttcatgacatccaaataagttattgacagacacattgaaagttttattgatttgaaaaccttattaatgttatacccaaaaggatctattctggtaaataaattaaaatgtatttttatcacctttataatataatgaccaattatatgtattcacacagatctatgtgtgttcataaaaactggttgaaaactgagcagtttatctgttggtatgaagaaaagactgaaaataatacagaggtttcatctaatcaggcattttcctgattaactgatagaaaaatgtttgatctctgcaccacagaagatggattatatattgccctttttattattttagttgtaggatacaactacttaaatacttaaaatctttgtgacttacaggatttttcatattgaagagaacagaaattcccataggacctcaccagagaaatggggcattatataaaacctgattcctaccccctgggtataattcaggattctcagattacagcgaaactatgactgtgccaggtgtgattttttacataagctttcccattcctacacaaactggaaggtttttcaagctttccccatgacatcatcctgatttacttctgggtctcagaacagaattgaattcagaataaggtctaaaattctggatgttgtgttagtaatgtgaacttggaccaggatttattcagggaacatctactttattacttgtaaaataataatgaaattgattccatgcatttattaaactaaaataaaaatgagaaataaatctgtatgtgtgttttgagatcaattgatcaaatctaactttagtatattttatttaagtaaggtaagtatcaaaaaacaatttcttggtagattactttgattaggatcctaaaggagcattactaaagatttttaaatgtaatgttttagtattttgatacaatgtgattctttctgcttagtatagatataacagaaacaacagattgactattttgaatcttatgtatcacatgatctaagtagcagtgaattgctcttaggagaaagatcaggtagtcaattgaagctcaggttctacaaaactgtccatggaatactgatcagggatagtccataaagtcttgtcattatttatacagttgagaaaagtataacaaactctaagagaataattagctgttcatatatttttgaacacacatccatggttgtgtatgttcttcaaggtcaattgattaaattaaagaacaaattagagattttttttaattaggtggtggccagcacaggttgttgtattccctgaacctggaagtacatgtgtttgtgagtcagaaatgggtactgtcaacaaaactcaggtcctcttcaagaacattaccaactgtgaactgctcactcatctctctagcttgaaaacagttttgataaggtacaaagtcaggaagtgatttacaaacattgtactaataatacacttcagtgatagagtaagtggtatgaaacatttacaagacagaggggccaaatctggtgtcacaggagaatcttctacccatatctgttgtgttttatgaggtttaattcattgtttctgtggcctgtacttgagtctgcacattctgaactggggcttggtctatattatgtttgacaatttctatagattctgacatggatatatgcatggcaagaggaatatgagtgtttatttctgctgatcctaaatgtctagacatatgtggtgttgtattataaacaacaatgtgtgagatttgatgtggcattttatgaccactgaaattatattttctacacaatttttatgacatatctgttaatatatttgctttattccaatatgttgaagaaagagatttctttttttctatctcatccatatttcatgtcataatgtcatgtaactttaattatggagaaaaaatgcttattttgccctgtttagaaagtgatcataactggaatcacgttagcttctttcatgaaattcttagttaatccccagtgatgagctgttaatactttctgctaccttcaagtgttcaaagcaatgtcttccttgtctttccaggaaggaacctccatacagttatagaacattttaaattcttcaaatacacagcaatattccaaccatctgtctttgcacatgctcttctctgtgataactccctgttaaacatcagtttgcacctcaatacttcactttccaaagttgtggttaacacaatagtttctctacacaagcatctaattatcatattcttcctactgtctgcaaactgcttgaaagaaggactctatcattttcaaatccatttcattacctggtggagtttcacatatgtagcatactttgctaaattgatgacagaaggggagtctcacgtgtactttaaataaaatagattacaacagtcctataaagtgcattacaatatgcatgtcttcaatttcatgtatgtgtgtctgtgtacatgtttgtgcatgtgcagaaacatttcatattaatgtcatgtggaaaccaaagaatagcctcagcactcgggttgtttttaagacactgtatctttgctttatttttatttttaatttgaaatgggactcttactagccttgtaatcaatgggagggctaagctggttgatcaatgagtctaggtatgtgttatccttttgtttaaaaagaagaaaagagaaatgctgagacatgagacatgttgactataagtttattataaggcctggcagagtagggagacaaagaagaggaaaggaacagggataatggctgaccgtcatggctggtcgctgcagaggggcagagtgagggcataggtgagagagagagtagagaggaagcagagagagtaaatgggcagggatctgtctttttaaggggtcctctccacctgcatgcagactttgttcccatggaaccttgggctgaccagggtactgcctgttccaccaggtaacaggggcaggccagcataatgcctgaacctttcattcccacctctacttagattcaacagccttagtatttttctgttgtgttttttttttccttccctagtataaggccagtattccagccttgtccaggacaaggagttgccaagaatgtttggagaaaagggacccgagaaggttggggtgttgccatgtcctggggtggggtagctggttgtttcattgcagtcggggctatgtggaactctctgatgccccttagacctggcaagatgtttgcagagtagaggacaaagttaagtttaaaaaagaatttttcatagatcctggaatttgagggaagattgtaaggtaagggatgggttcccgaggtgtctcaagatgagggaagggaatttgggactggggaaaggttgaatattacctggagtgaatctgacctgtttggatatgattcggctccgtggaacttacaagaatccttagagtttgaggaaacataagtattaaacacattagcagcttgttcatgttagaagcaacttggctgaaagcattatcattttaaaatagacagatttttttttaggacaatgaaaagcatcttaatcttgaccnnnnnnnnnnnnnnnnnnnnnnnnnnnnnnnnnnnnnnnnnnnnnnnnnnnnnnnnnnnnnnnnnnnnnnnnnnnnnnnnnnnnnnnnnnnnnnnnnnnnnnnnnnnnnnnnnnnnnnnnnnnnnnnnnnnnnnnnnnnnnnnnnnnnnnnnnnnnnnnnnnnnnnnnnnnnnnnnnnncactttacattaccatcttagaccttccattttcagaccttcataccttccattctcagaacttgtatttatctatcgtgttagacctttccatctgcagacctttgtaactacattctcagacctttatacatcttacactttcctatcttcacatagataaaccctaaaatacgcgttcctggaatctgttttgctttaagatggcaagactaccagtcgtcaaaagcatcagagttcttgagaaggataagattttacctgaatcaatgattaaagaataacagagacttgccagcaggctgcatggacagccatccccaaggtcctccatccatagaagtgggctgtaagacacctgccttcttgcttgtagcatgtgacctgtgtattacagactatgggaagactcacctaccattggcccaagcaacactgggaaagtcgattccattgtcctcttgtccacggtctgcaatactttgtagcagttgaggtgaagggcagggttgctcagtgaccagcgttgtcactgactcgagatgaagcttcttcagtgcccatcagtattttggaggaaatggggtggggccagcagctggcctatctctctattataaataaatttttaacaaaacatattaaatgccataatctctagatctctgggcatttgagggctgtctgtttagtatctcagcagtgtttagtatctcagcaatccaaagcttgcctttagttagagaaaaatcctctttttgtaataaaaattgtacctttgtaaatggcttacaggatggactgaatggtataaatattttattaatttgaaatagacttttatgattttaaactttcatcatcatttaaatatacacgagttaaatttaagttgtatagacttagcttatagtttaagtatagttaaattagacctttatgactttaaatgtttaccattatttaaagatatatagcaatttagaaatatgagacttcgcacagtttaatttaagtagcatatagagctagataagtataaagttaaattacagagacaagcaggactgaataacagtaaaggggaactagaatgtaatctctgatctgtgcattgtagcaaacagacaggagattttttttttcgagacagaggctttggagcctatcctgccactcgctctggagaccaggctggnnnnnnnnnnnnnnnnnnnnnnnnnnnnnnnnnnnnnnnnnnnnnnnnnaatctctgatccgtacattgtagcaaacagacaggaaatttaaagggagagagtagatctaaacagagggccctggaaaggcacagtatttaggtaaacaagccatgaacaacagagccagtgaaagaagaaatcacagacaaaaaataaaataaaataaaataaaaagcaaaaagatctggcagaaatcaaaaatccgacagactggttcgctggcacaggccgctggagctgggcgtgcctacaggtaggtcacatgaccaaaaaggtggggaccataagccgcttttgtctgtttacctgcttgttggatgaaaccagaaaggttcctctatgcatttgccatggtgaggcaagtggaaaaccattaaaaagctcctctatggatacacgtctgcccgtgggagttaccagggtcctggacccaaggggacacagctgtcctgaaaccaaaaaaggaccagcggtccaaaccaaaaaatcaccattcctggagcgggatcccatgcctgaccttcaggaaatgtacccaacaagtaaaagaagaaataaaaagcaaaatgtctggtggccatggttgcctatgcaagtcattgaattgagtgggcaggcctaagctatgtcacctggttatgaccaagatggcggcccccaggttagcacacgtggttgagatggcgacccctgtaagcacattctcaattgccagaaaagtttcaaacctcattcatgtggaaaaatgaaaaccagcaaacaaacaaaaaactctcagagcatctcaaacagacattgtcaaccaagaagaaacacagtcagagatagaacaaacagaacaaagagggacattcccagatgaaagaaagttcagtgaaatgcagtagtcagtgaaaggcagtactccactcatttacctacttgctggcagtagccaaaagatcccgtaatatgtatttcccgtgggcaaggctaaaaaatggcacagattgctctgtctgagagcacccagcagaaagcccaaaagaggctcagcaatctgaaaccaaaaaatagacccagagtgaactctaaaatgtagtgctgggtccgccccttgggaaaagttatgggtatcttaccggattgcagcgaacaggaagatgagtgagttccagagatccttacttggaaaagcggcaagttgaagtctggtacaggcaggaggaagtgccaggaaaagctgagatggaagtgggttttgagttcagattttaggatccccgaaatttcctgtgcccatggcaggagagaaagcctatcctgccagtaagcttcaagagtttacgaagagagcctaaaccaagtagggcactaaatttgtttttccagcactgggattacagatctatatgaccaggcctatgcttttgtttttgtcatttgtttgtttatatgcattttgggatcaaactcatgtctttctgctttcaaggcaagtcctttcctgctgctgtcaattattggtgaataaattaactaatatgataataaaatttaacagtttccaagtcaagattaacacaattattatgcagttcatgttccttcatctggaaataagtttgcacaaagttgtgtgcttgaaattatcaggaaataagagctgatagcataatttaagggtatgaattctatccctgaacaatccagaacattataggaacattcaccaactgtgtatggttacatacatagggacaataaaatgatattagttgcctctgaaaaaaataaatctctatttttatcaatgatataagtgtaattatattgtctttaataaatatgctacactatctctcatcctcagaatgaaaaggaacaactggtacactatgtgcattgttcagccaagttacccaggcttgtattgtcaagagcaaccacatttctggggtgccaatgaagcaatgactatttttaattaaagtcttcttcttttacactcttttagagtgtaacattaaaatgcaaagaaacactgaagggccttttcttcattccagtaaagtcaacaagtatttattcagctagactttatttattaggagtacttaaacaactataccactccatctgcatgttagtcaaggattcctctgacagctgctccccgaggacagggataatttggtctagaaatagaatgtgacagcattagactcctattaatgcgctaggtggcttttcagaggatagatatctgcaatggccaggtttcatcattctttgctggacaatttgtatcattattatttaaagtttcttttgattgagaacaaagtatttcatcctgttaaactcacttaaagcagcatccaggatatttaagaatatgtctcagagtgctctgttttctgttgttttgacgaagtggctgacagctaatcctgctctcttgatgcttttgttcctgtcttgctgttccctaataaggtcaggattccaaaaaatgtcttagtgttgaagaagacccatcagaattgattgctctgggtgactggtaagccagatactgcctggaagggatccgtgacatgtctgtcagactttgacaggagcattgttttcaataaattcttagtttccatgtagtttgagtgttttcctactactctgattggggggaggtgagtttttcttgccaaataccattgtttgaaaatgtgttttacagaagattattttgaagttgttcaaataataattaataaaatggtgtacctgtatgtgtttgtgaaaacatgcatacataaatattcatatgactggaatgtgtacaggaacatgtgcgcacctgcgaatgcttgactagaggtcaagtaacaccttctccaggtccaaaatttaactcctttgagacagggtctctccttagtctgaagcctgacaaacatgttaggccagtcagtcagggagctttggggtccctcctctctctctctctctctctctctctctctctctctctctcttatctccccagcactgatttacaagagtgcaccaccaaacaagttgtttttgatgccttctggagatcgtgttcatgtccttatgattgcaaagcaagtgcttcacagacatagctgtcccccaatcccataagaatcttgaaatgtgatggatagagtcttccattatgttcagggagaaaggcaagtgggtgagaacaataaactacccctattagaaacttaacccaagccatagttgtgactggacattcagttttctgtagtaattcatttcatatctctcctctctctctgtccccctccctctctcatctatctctatctatttatctatcatctatccatctatatatttatttttactcaggagtttattcttaaccctataatctagaaaacagtacagcagtatataatgtaattctttgcatgttaccttctgtccaaatatcacaattttatttaagtatttgtttatacatattttcctcacaagaaagaaaatttgaggagagaatttcagctctattccacgctagaatcctactaggtatagggagtaggtttatttacacagcaggagtgaggaaacagagcaaaacactgaaacttaagtatggttttctgctgtgcttctccacctgacagagccaccaatctggctgtagccagtttagcatgctctcgttttgatcttctttctactctctataatcagaatctttcatgttctcactatctttccatctacctactgctggtcatcacaaacagtgcacagtggctaagttctgcttctgtgtttgcacatgcattctgcatggggactgatatacattagctgtgattttattttattaagtacatagaaattagcaggtagatatagagatttttaacatcaggcacccacattgcagaaagacagccagagtggtccagttacaataacaaaggtgttgtcaattagatgcttacaacagttatcctatgaaactgggaagatgccaccatgtcaaagctccagattgaagctctccatcaatgggtgagcttctggcttcttgtccccactagaggcactttatatcacaaaagaatagaaatatctaccagctatgacttaacattctagcagattcaacagccttagtatttttctgttgtgttttttttttccttccctagtataaggccagtattccagccttgtccaggacaaggagttgccaagaatgtttggagaaaatacattttcttattctcagtatctgtgcttagctagctaaaacagaatgtgatgatccaatatagtgtacagtacaactagcatgttgaatctgcactaagccactgacaggccaattgctatcttcataattgacaatgctgtagctgaggtctaattatcaactttttcctgtctccagaagagtaaacatgatagagttgtggggatagcctctgggcacctacaagtctgtattcacaaagttgcctgtactggagcttcacttctttcaaactaagtacaactaacagggcctcctgtgtagtcttgataagaatgggaacatcaagtgcccaatgtgtggcaattgcttacacatcttatcttttatctttagcatgataaacaaacagaacaagaacaaaagaacaaacccacagcccatttttctcttagggtccccgctatatttgcactcaatgcttttggagtttcaataccacaggatgccattctgctactagtgcccctcatttaccagcaactctataacgttctctttcattattaacataagttgtatctcgtgctcaactcagtaggaagctgcttttttattccctaaactaattgtcaaatgctcagccccttctcttcacctggaatctgttttttatttatttttatttttttattttttattttattttttttctcaccaactcaagttcataggctatggaggaatattgaatgctttcttctctcctctccattattacatatttttaacttcccagatcactagggcacaattttccctctctttgcaaattctctttcaaatttgtctggctcaggaaagctcacaaaatgcaccatgtctggtgttggtactatatgtactcagttgtttgttgtctatggccaaggttgtgatattcctgcatgcttattccatgttggttaatgactgacttccgcagtccctgtcaaggtcttatacgtgcttccaagcaatgtggtctgaaaacatgcaaaagaaaggctgtgtgaagccacaggagtttccatcaaacctgaggcaatacagccacgagggaaccttccaatttctcctcactctcatccattgtttcagaaagcagcttgagtctactgcagcactacccttttataactgatcttgtcaaaacatccttcacactactcagaaggttccaggattaatgcatgtgagtcaactttttgtaactatgagaaaacacgtaaaataaatttcttaaaggaagaaaagttattttgtatttgttttacactttcaaagtccctatctggcatgcatagtatgccatcatggtggtttgtgtgatggagcaatcttgctcagggacaaggtatatcttttcagggcacacctagaatgaataacttcctccaactagagcccagcttccaaagttgcactaagttcctaaaatttatttaaatttggtatttaccagtagattaatacaatgataaaatcagagacttcatgaaccagccctttcacaaattcctgttctacaaacagctttcagtgggaacctatgatttcaatacatgactcatctgcctcatccccaggatatctgacaagacccttgccttttatgtaaccacatgctctgcacatagatacatatgggtatacccacatgcactgcacatacatacatatggatatatgtagcgatatcttgtttgcacaaataaagcctatctgaaggtcagaaaatggagcttgccagtagctaaccatagaggtctagaggtctgtacagagagacaggaaagtgaggtagctgggtagaaacaggttataagaaggaaaaaaccagaaacttgctctcttgtctgttgagacactaaggaagtaatgtgtgacatggtttgctacttctttctgatctctcagcattttcctctttatctgactccaagtttttattacttagaacaactaagaactccatttacagatatacccacatgattgtgtgtagatacatatggatatatgtaatgaatgattgtaatagactccatggtatcctgaaataaagagaagtcagttattcaatagggtttgactcatgaatgacaaataaggtagatatccaacaatgtctgcccataggtgctagaatctgtgatctgatctgtgagcactacccgaaagagagagagagaatcagaaagagagagagagagagagagagagagagagagagagagagagagcttgcttcccagtcaacaaatagcacctgagaccacactcagaagtgaccagtaccttaaaaactattggatgaatgagttctcacaacagatatacctacatgcactgctaaatgcatatggctatacctacatgaactgcacatagatagatatagatatacccacatgcacagcacatagatacatatgaatagacctacacacattccacatagctacatataggcatccccatatacactgcacataactacatatggtcttacccacatgcactgcagatagatacatatggatttccccacatgctctatgcagagatacatatggatatactcacaaatactgcacatagatacatatggaaatgcccccacacaccgctcactgatacccacatacactgcacatagacaagtatggaaatacttgtcacacatactgcacatggacaaatatggacatacacaaaaataagcaataaatcttttaaaagaataatatcaaatataaaaaggtagatttttctgagagtggtacagagggagaaataccaggagggttgttaatacatacaagatttattgaggtgacgtcagtcagtgtcacaactgccaatacgatccagcaaacagagtggttggtgagaaagataaccttttatgtgaatgttaaacaggggcaaatatagactcacataaaggccaaagcccactggatttgatatctctcatcataaatcagggccccctgtggaaacatgtcccattatatttagaggagaaatccaagggaagaaacaaattcagagttgcacttttgccccagttgttaaaaagcagtttcttatattcaaaagctgagcataaatgttattttcctgacacagtaaaaaatttaaaaatatcacagtatctcaatagcacctacattcatgttctcataactgcacgtatacacaaacatacataagtttaaaaataaaatcttaagaaatactttggtcatttaccactgtgttaaattgttacctacatcatggtaaccacattcattcccttaaaccagatttctatctagttgacctcattttttccacaactacgttcctgtctctggtagagaaacatttgattcagtttgcaattagaattattaaagttcataaatcacagaaacaggtttgtgttgaggatgttgacactttttttgactcctgtggagagagaggacaactctgtgttgtgactcccaggaagtcggaaagtgctgtcttggctgggtgttcagtcagcctagctccctaaattgcagagagctgtatggtaaggaatacttctgcaaaggcagcacttgtgaaggtctagacatgctcaatgtttagattatcgtgctgatcccatgcttacacttataaaacaagcacttgaaatatggcttatactcaattcccaatcctattctcatggtgtgagagtgtattctaactcagcaaggggaatttagtaattcccatcccttatattgtataaatcatacatctctaaaactagggaccatctatttaagaagaaaattccaataagcaggattattccagtgccacctattgttgctgaagctcagtgttagtgtcatcatcaaaccccaaagaattcattggaggtccgaagctgcaaggctcagctgatgcttctgcaaaaacaaagcttcatgccttctgggtccacacagtgtattgcagcttctcaattctaggcaacataaatagctgaaaacaagaatatgttttaaaaataaaagaggggggagctacgagaatgagaagggaagaagaggaagaatgcagaggtcatgagagagcagaaagtttgagtcaggtgtagattagaagaaaggttatgtgataggtagggttttagttggggggagtggtaggggaggaagggagggagaagggtactgggattatcatgtaattcaatcatgtttgtaattcaaataaaaaagtcaaaaaaataattcagtatgaacaatgcaaccttttatgttagtcaaatagatatagctcaaaagagtgggattcttccaaagtgaaggtcaacttaacatatcctaaagctgtttgcattgagataattttctattttgctctgtacatggcatccatgaatatgctgttggcactttcattactggtagatttccttcatctattcaatctgtaagacaattcccagaggttgtttgccatttattaacttttagacattctgatgtgtatgtgaagatcttttgtgaaacactgcctaaatgtgaagcatcgttacagttgtttctaatgattctccagagtaaatgaaggaaagtcaaagtcagctttggctatgagtgacccatacttactaggaaacataaatgatctggttaacaagcattccaatttgagacttgttttttatggatagggcatccttcgatcctgattgttttcatcattcttcaatagactatgcttctcatcacccagtttagaatcacagtcttgtaaaataggtttctataagccgttgactctcccagtttacagttctgattccctgtactgtaattcaaagtggatgctaccacacagcttggcgagccctgcctgtgacaggttccagacttgttttccatcctattatacattgaaccctgtttcctcctcaagatatctttactgaatattcacatacttcctttttaagccagttactttctatagctttctaataatttctttcctctacagtctttatttccttaggaacccacttgcaaactatgtatttatccctgattaaaaccctagctgtaatacacctcactgaaatagaatagtcccagaatccccattgatcaaccattgcccaagccataaatatggcttgaattttgctttcttttaccttcctggataagtgactggaaatttcttttgtttgtaccttttgttttctaaacacatggccaggtgaaggttcagggatttcttaatttgagtacctttcaattaattcctttcttctcaatgctaattccacagtatattctctagaaaacagaaaatccctttgaagaattcttcagctaaaaatctccaaggatatctgattatgtattcagtaactctaaaacacttatcatggtgccaaaacatgaaataaaacaacccaactaacaaacaagacactaacactcagcttcccctttcctttacaaaaggaaacaaacaattattaaacccttatgtgtcagcaaactgtaaatgccatctggtcacattttacacattgcaactgatatactgatatattacctgttgtaaataccaattgaacaggatgtaggtatgggttcattctattttatttacaataaactcaagtttatttacataactgcattctaatttatttacaatagccagcccttaccctggccacatggattttattgggcctacacacaagcttgaacacacacagatgatgccactgaaattctttgtacacttcattgccatgctcatcccagtctggtaccatgttgagccctgacacatgctatccttcctcctagtgcagtcttttgcactggttgttctgctgctctctggaatgtcagttggagtttgtttgcagctccttgggacctcttccacacccttgctgaagctttctaggatcaccctgctttacccagcatcttcatttctttgctgacactcatacccctcttcttgcatttcctgccatagcacacaaacatgttcaggtcccatttgtctgttccctgccacactctgttctgggagagcaagcacttggctttgtttgcagccacagttccaacctagtgtaccttttagagtgtagtagattctctgtaaccatttgtttctccatccattaaaaattaagacatgtaaatttaaggaaacaagaagacttaagaagcctgaaatacaaaagccagaaaggactcacacagagtccaacagacacatttggtttcagggagtagcacaaaaaccacaaattaaaatagaagaagtagagatacaagtgtgaattttatttaactatgaagtcagcagtatttgaacctggtaactactacttgaccatccttctatgaatgtggaacttctttgcacattttataaaagaattcttcctgggattggcagcactgagacaaataccagtgctttacttattccttcccaaggaaggatccttaagatctgcaattattgtagcccaggacacctgaagtacatgtctaaggttactgtgaattgtaacaagttctgcaccatcattttcctcctcataaacacttacatgaaatagatattcataggattaagacaggtagaattgataataaccaaattgtggtgtatttgtggttatgtgctcacactctatgtcttcattcactcagattccaagaggtgagaatgtgaagcaaaatgagccaacttcctaagtaaactggcaacttcttgaattgggatgctactcaggggtagagctttgccatatgtcatggaaagcggtgactaatacatatcttgatagaatctggctaagttttgtgcttaaaagccaagtatgtttgcttagtttttccataccctcagcagtgtgctcccagtgatacggtagtgttactgtgtaattgtgaattattacaatgaccataacaagatcataaattggagaaacaactaaagattagatataataaactatttacagacaatatcactatatatttttaacgtgcttcaattttataggcttagaacagcatagtagaaaatgcatgaggacttcaaaaccaattagcaaaataaatcaggatcttatcaagaaatgcagtggatccttgggtgggctattggattgtgcagcctgatttgtctttcttaatgtcaatgtgggaaatacaaaggctacagaagaacggaagcccattttaagatacaactcttcagtaacttctatggttaactttccctatcttctttcacatctgtgatgaacactgtgattaacatcagcagctaccacatcatccacagctagtgtctgccttccactttcatgactaccatggcttccatgggtagtacctccttccacttttgtaccttacatgaagtctgtggagttagtgactctaactcaggtttaaagattaagaaatgaaggtcagaatggtcagtgggctgatcaagtcctgcaaatgccagaaccactattcgtcatacattatgtgtggctttcagcctacatttgtcttttaacacctggaattaaatatatcatcttttgttttaaatcaaaattatattctcattttttatagattacatttgtgcatttttaatgctattttctaatatctacaagtaaaactttccaaaagatattcataggcaaggcaatatatattgtttaaatgtattattgttacatcatttatttcaatgcactaaaatattctacccttttagaaatgatactcttttagaaatgatgccttctgcccttttaattgatattttcttttaaaattaagaatttgatgttagaaatttcaaaatcttaaaatttatctacttcaaattgaataccttgaagtccatccatttaagtaaatagtgtaactatattataaagttactttatagctaattaccacagacttttaaaagaacagttatggaaaaaaatgaaaagataaattttaaaacagtcttacaaaatatttttagcacattgtttgtggacatcaatgtggcataaagagcatggaattctaattttttaaatgctgaaagcagtaagaaatccaaataatttaaaaatagatataattctgtcaagacttaaatgaataaaaaaataatttttggtacccaccagctgcttttaaaattgtctattaataataaagaggaattttgggaacaggcaaaagctcatggaaacaaatgtgtaaactcaactcctacctcagcatgcaggttgttactcccctgaaatgaagcccttgtttaaaaaattatacatttttgagaattttatacatgagtcgtgtttttgagtctttttcaccctccctctctgcatcaactcttcctgtgcctccctacccactgcctctcaaatcaaaatctccttctgctatatacacatattaatatatttgtaccgcattccaaaatggcaacattcattgactaaccaaacaataacacataaaagaagacactttttacacataatgtgtgtatatcaggtatatcaggtaggcagattacaggaaaacagaaatttcaactacatttattaaagtacattttatgttgctcatgggtatatctatttagaggaaaacacttgggattgaataatttataagcagcttctttaagcattcaggcattatgatggcctgtccctgtcacctggcagaatgaactcaggcagtaagtaccctggtcagcccaggtgcaaacgacccctttaaaagaaagacctctgtccacttatgctctcttcccgctctcccatactctcttctatcctctatctgtgtctatgtgtctctttacctcatttctctttcatgcccccccacccccgcttaacttctcacttaagctctatctgcctggcatgtttgtccgtccacctctgtcaccctcacctgccatggaatccaccaaggtccctgttcaaggtccccctccctcgtgctttatcttaacagcctcaatcctaaagaatatcaagtctccctttctcagtaaccattgatttcctgtaacacctcatctaacagtgggtccggaggcatttcccccgtttgcattggtgattcaactggcactgatattttccgggtcttgtttaggcaaatatgtggctgggatgtataggtgaggctttgccccccctatctagaaggtactacctggcagcagacaccctgatcttccagcacctctgctgtgattttacctgactactgggagtctgggctctattgtattagtaacacttggtgctgagcaccacatggtccttcactcatactctgcattttagccatcgggtggatctctgtatgctgtatacaagttttagaagggagtttcattaatgaacaataaaaactacatttgtttgtacagataattatttagctagaaattatattagtttagggttggagagattgatcaattttgaaaggattagaatcaaaatcaaatgacaagaaagtatactattatgaataataacaaagtaataataataacattattattattattattattattattagaagaagaagaagaagaagaagaagaagaagaagaagaagaagaagaagaagttaagttgaaaagaagacaaaaaacaagcatggctacaacagaaattacacaaaacaagcgactttttcatcatttagcaaatacattcattcataagtattcccaggagaactggaggaaagaagctgttgctactgaggttgattaatcagctaattaaaacttcatttgtatggagaggttggaatgttccaagtccaatgacaaatcatcttggaccacccttcatccctttaatagccatttattggcctgttctgtgtatgacctcacatctcctcagaatgcataaatggaccctagtttctaccaatcaaatgagtgtcttcacattgtatctgaagcttgttgttggatttctctgcttttctataacatgtctgcccaatatcaaccaagcaatatttgaaaagtgtcttgatttgtggcttttttgtttgttcaattattaaaaacaccatctaatctccaccatactggaatgaggtatgtggctaaccctgaatctgtgtcgtaggtaatggtcactcatatctggctctggagtaactattttgttgatgtgaagtaagagctgtttctttaccatcatggacgcatttaaggcagggttggactagttagaagtcaccaaatatagttggttttctctagtttcagagcacattaaaacatcttgtattattctcacaggtcagaatgggatggacaggtttccagggggaaaggaatgaaagctgagttcacccttgtcagagaaaaacctgcacaggtcactttactgcctgtaaacagaagcaatcaggcattttgaaagtttttctttaatttacttgttaatgaacctaattaaatataagtaaattgctaatttatggaaagtcaagaaagcatgttgttaatactagacagtactgcaggtactggtagatatttctagaaagatgttcataaaccactggcccattcaaaaagagaaatatggagacagacaggcacaaaaggaggggatacaaaatgcagcttttccccagttttgtgagctgagatggtgtcgaccaataacacccaagaaaatgcatccatgccgggcgttggtggcgcgcacctttaatcccagcacccgggaagcagaggcaggcggatctctgtgttcaaggccagcctggtctccagagcgagtgccaggataggctccaaagctacagagagaaaccctgtctcaaaaaaccaaaaaaaaaaaagaaagaaagaaagaaagaaagaaaaaaggaatcctctggggttaacacacaattaaatcttccaaactttaaaaacaaacattgcacaaacatttacttcaggtgaatatcatggcattagaggtggggactggaagagtcattctattagttacatgtctcatttctgacaaatgcagcttaaagaaggaggcctttgttttggtttatggtcccagggatgcagttcatcatggcagggaagacatgactgcaggatgaggccactggccacatggcctccattgccaataaacagtggaatgaatgtggctggcagctccctggctcaatttcattcttggggaaccctgctccatggaatagtgaggcctaagcaacttaatccagaaaattcctcacaaacagatgcagaggattctttctatggtgattctaaattttatctagtcaaaaagattaactacactcagtatttactagggtcagctgaactgggttaggccattagtcttattgactttgatatgcaagtatggttgttcaatgctcatgtgtgaccatctataagaacagatagcacacttacatttagctataatataatgtgtggataaaagttggaaaagcaatttttaataaatctcaatttttgagtatagatttcctaagtaaacaagctgaggagtaacacatttaattacatgaacagaaataaaattttgaaggtaattttcttaatttctaccaataactgatcaataactcaatatttaataaaacccttgtagctatatttaaaacatagaaagtacagacattattttaaataacaaacactaataataaagattaaatgtactaaatgtcctgtagacaatttttaaatatttgaaataactagctttgagtttgtatttaatcttgggtattaaaaataatttgtactaagtttatatgtatgttcacttattagccaattcttattaaatccttttgggagaacttttatcatggaatttatttcataaaatatatgccttgattgcacagagaaaaatacctagtaacaaaaattttgtatcagagaccagttaggtccagatcatggagttccccaaagaccaataaggagacagagtcccatatgtaaaagcagagagtctttatttaagcaagctcaagcttgggctctccatttgttcaaagccgaggttgagaacagagagtgctcagcccaggtggggtagggtttttctcatagtataggttggggagatgagatttttaggattcaagacactgattggctgacatttgtctagaggtgtctctgtgaaaagggatgggtatgtgcttaagctaagggacatttagatgatcctatctataatggctggaattttaggaatttcctttgtcacatttggtactttctctttggttatgtctgttccaatatggtgcccacatggtcccagcttgtggtctttcctggagtcagttgctgtcccatagtatactaagttggcatccactgagccttggcatggcagaagtacaaacaagcagcaggtgtgtaccaagttgccttgggccctacaagacccagattaaaagggagcaaatagaaaacaaacacatcaactcttgtgccaaattctgaactccaaaatcaccaagagacacaatccaatgtaaaagcaaagagtcttttatttaagttaattatgttaactcagttcctccatccatccaacacagtgggtacagtgagagagacccagagggacctaagtgcagagattttattggggtagagcaaggggagtggctaggggtccacaacagtctcaggattggtgcacttctgagcttggacagcctgtcctgtgttgattggtcaactggctactagggcctataggcactcccagggcacttgctgtgctttggatatatatcactgttaccttaaatcacatccagagcctgtaaagtacatccagagccaccagctaacttctggttggttctttgccacatggaggtttctggctttctagtgactggggcaggtccagcaaggccagaaggtcagaaactatgtgctgagtcagaggcctacatctttctggctgttttctgcagcctgtcatgactgccaaagtagggggctgggtgagggtctggtcccttcagtcttccactggttcatgtttggaaattgttctccagatgcatcagtaatcatggacaatctatcaagaaattcaaagatcttagacataattacatgcagtcagagagtatttttatttgaaaatgtcaaaaatgttgtctccaagacaagtttctttaatcacttaataaggtagagtgtagacaacaaaggtgaaattacatcatcagtggaaatgatcaggtggagtcctaatctagagacctagctttggtgtgaaaccttgatggaatattagaaatatatgtattttcattttagcatcagaggatcaaagttattacagatttttaagttgctagttcagggaatgtgagagagataaatgtgtatattcctctgtgaaatttcctaatggctacacatatctccttggctcaatcagagagtctttggcaggacttgcctaaaagtcaggatgccccatccccacatgctgaagttggttattctataaggtttcccccctgaactgagtattgactatcagagagctagaatcagtgggttgaagttcagcccttctcaatttccttatgcctataccgcattgaaataactctccagcattgtttctccatgaactgtgtccttcaacaaatagccttctcgaacttcgatgtatgtccttactattgctcccctgagattatttttctactttgttacaacaaaatctgtcttctgaaaggctataaaaagaccaaaacaactaggttatacagagagggacttttttatagaattgtcttccatcttttctccaaattatggtctgagtgagaactgtaaactgaatctcacattcttccattctacctatcctgccaagtactgtatgaatctcctcagctttttccattcgatatttgactacagccagctggaacaagatgctccctacttcatgagattattcaaggcctctgcttttccaggttgatctcatgcctgcctcatgttcatcttctacttaataattgttgctcagctcaactgggccaagaattaattctgaacttcctgggagctggataactggcaagaatcatacctaatcttatgattaatcagtagaagatagctttggctggctgtcgtcaaggtgtgccacaaagagatcacgccatgcaatagatctcactcatagaataggtttattggggatgggggagaaaaaggctgtcttggaatgggggcaacgagaaagagataaagagagacagggagacagagagaataacagagagctgcgatgtctggaggtaccctttttgtttgtttttgttgtttgagacagagtttctctggatgtatgtagcttttgctgtcttggaactcaccttgtagaccaggttggccttgcctattagggtgcacctgtctcatacggaaagatgcaggtagacagtggaaatcctaagtatcttgcaactggtgatgatgtgtctggtgtctgcagtgttgagtccctgaagggcagcctggaagaacactagatttataataactggatatcactttgcacctttgcaaacacttttctggactaacaacatcagaaattatggcaatcttacatgctaaatcacaaaaagaaaccatgcatctctctctctctctctctctctctctctctctctctctctctctctctctctcacacacacacacacacacacacacacacacacaaacacacacacacacacacacccctaccacacacacctgctagatatcttttgcatatatggacaactacttagaaaagctgtatttctataaattctcaaaaagctgtcaggataatgggattatcacccaaggtttctgatgctatgctgactctagattaaagtgtgtgtgtggcctctgtactaactatggacatatacctggtccaacacctgagacacattttcagtctctatgtttcaaagattttctgttcagcttaatccttggaaaatgaatttaacctcagccttgaggacatgactgtgcatgtataaaaatattcccagcttaggtatgctcattcaagaaaatagcaggagaagatccaaagaaattactgtgaaatcagcaagaagtgagaggtagggaggagactgagaaacagtgagggcctcctgcagagagctcttgtaccctgaggtgcatgaatttcctctggtcagaaagaaacaatggaaggcttatgttacaagggggtgaaagggctgcatttgtgctaatgaggataaataatcatgctaactgctgctgatcaccccagcatggtgttcacttagcatttctcaagtcaaaacaagtaactgctaccctacatatgaaaggattgtgattatgattggggaagggggacaaggactctctacttttgtgtttgtttactgatgaaaattttggcactaactgctatcaaattctgattctactcctttgataatagccagcaggttaatggatattcatgagtccagaaatatgtaaagtgctggttgtttttcctgacacattttaagcactcactgacatttagtataaaaaaagagagtgtttggaaatataaaagaggtaaaaatagtgtcagaataacattctatggaatagggaaaggagaatgaaatcaagatcacagttgagccagaagcatcttgctgggaagatgcagctcacccacttcctagaagggaaggtgggtgttattcttttgtttaaaaagaagaaaagagaaatgctgagacagacatattgactataagtttattataaggcccgacagaatggggagactaagaagaggaacaggagtaaatggctgactgccatgttcggtcgccatagacaggcagagagagagcatcagtgggagacagagtagagagaaagcagagaaaaatcagagcaaggaaacagagagagggaacagagagcataaatgggcaggggcctatcttttaaaggggtcctctgtatatatgtgcagacttcgttcccatggaaccttgggctaaccagggtactgcctgttccacaaggcaacaggggcaggccagcataatgcctgaacctttcattcccacctctacttattattaaaaaaaaggtgggctaaaccaagaggaatgctttaaatgagattttttttttctcaaaaaatcaagcaagcaaacaaatttcaacagagtgttgtctcaatggtgaattcctgagtagtttaactctattcattcagtttggagatagctggccctttgaaaacgtcttaaccccgaggctgtacggaactccctggcgcctcttagacctggcaagatgttgacagcagaagacaaggttgagtttagaaaatttttttcttaggtcctgtcacttgaggggaagattgtaagataagggaggggttcctgaggaggagtcctaacatgagggaagggagtcctgggaccagggaaagattgaattactggagtgaatctgacctgtttgtttggatccaattcagctccctggaacttacaagaatccttagagtttgtggaaacataagtattaggcacattagcagcatattcacgttagaagcaacttgactgaaagcattaccatcttaaaaatagattttttttaaggacaatgaaaagcatcttaatcttgactttgtagttatgatcctacagtggtattggtgaactttattatgagcagtagcatgaaaaaatagagaaatcaggaacatattttattctttttaatgtctcaactcactttatcatcacttaagccgttttatcctcagaccttcataactttaattcatacactttacattaccatcttagaccttccattctcagaccttcataccttccattctcataccttcataacttgtatttatctattgtgttagacctttccatcctcagaccttcttaactacattctcagaccttcatacatcttagactttcctatcttcacatagataaacactaaaatatttgtttctggaatctgttttgctttaagctgacaagactaccagtcgtcaaaagcatcagagttcttgagaaggataagttttgcctgaatcaatgattaaagaataacagagacttgccagcaggctgcatggacagccatccccaaggtcctccaaccatagtagtgggctgcatgacacctgccttcttgctgataacttgtgacctgtggattacagactttgggaagactcgcctaccgttggcccaagcaacaaggggaaagtcgattgggttgtcctcttgtccacggtctggaatactttgtagtatttgtagctgaggtgaagggcagggtttctcagtgaccagcattgtcactgactcgagatgaagcttcttcagtgcctatcagtcatctcgtaggaaatgtggtggggccagcagctggcctatctctctgttataaatagctttttaacaaaacattttaaatgccatattccctagatctctgagcattttagggctgcctagttaatatcttagcagttaagtttgtctttagttagagaaaaaaaatacctttttgtaaaaaaatgttgtaactttgtaaatgacttacagggtggactgagtggtataaatattttgttagtttgaaatagacctttgtgattttaaattttcataatcatttcaagatacatgggttaaatttaagttatatagacttagcttatgttttaagtatagttaaattagacctttatgactttaaatgtttaccatcatttaacgatacatagcaatttagaaatatgagacttaacagttttagttgcatatagagctagataagtttaaaattaaattacaggtaaagagacaagcaggactggataacagtacaggggaaccagaatgtaatctcagatccgtacattgtagcaaatgaacaggagatttaaaggaagagagtagatttaaacagagagccagggaaaggaacagtatttagtaaacaagccatgaacaacagagccagtgaaagaagaaatcacagacaaataaaataaaataaaataaaaagcaaaaagatctggcagaaataaaaaatccagcagacaggtttgctggcacaggccgctggagctgggcatgcctacgggtaggtcacatgaccaaaaaggtggggaccataagccgcttttgtctgtttacctgcttgttggatgaaaccagaaaggttcctctatgcatttgccatgggtgaggcaagtggaaaaccagcaaaaagctcctctatggatgcnnnnnnnnnnnnnnnnnnnnnnnnnnnnnnnnnnnnnnnnnnnnnnacacagctgtcccgaaaccgaaaaaggaccagcggcccgaaccaaaaaatcaccactcctggagcaggatcccatgcctgaccttcaggaaatgcacccaacaagtaaaagaagaaataaaaaacaaaatgtctggtagccatggttgcctatgcaagtcattgaattgagtgggcaggcctaagctatgtcaccttgttatgaccaagatggctgcccccaggttagcctacatggttgagatggcgacccctgtaagcacattctcaattgccagaaaagtttcaaacctcattcaagtggaaaaatgaaaaccagcaaacaaacaaaaaactcttagagcgtctcatgcagacattgccaaccaagaagaagcacaatcagagacagagcaaagagaacaatgaggaacattcccaggtgaaagtaattttccattgggaggcagaactccgctcatttacctactcgctgccagtaaccgaaagatcccgtagaaatgtatttcccgtgggcaagaccaaaaaatggcacagattgccctctctgagagcacccggccggaaactgaaaaatggacccagagtgaacagtgctgggtctgccccatgggaaatgttctgagtatcttaccagattgcagcgaatagtcagatcagtgagttccagagatacttagttggaaaagtggtgagttgagttctggcatctcaggctgctgcaggcaggagggagtaccaggaaaagtggagatggaactgtgttatgagtctagattttaggatccccgagatttcctgtgctcctggcaggaagagttacaaagaaagaatatcccaccagctagctttgggagagggtctacagagagagcctaaaccaagtcgagtgccaaaatgttattcttttgtttaaaaagaagaaaagagaaatgctgagacagacatattgactataagtttattataaagcacgacagaatggggagactaagaagaggaacaggggtaaatgactgaccgccatggtcggtcaccacagacaggcagagagagagcatcggtgggagacagagtagagagaaagcagagacaaagcagagtggggaaacagagagagggaacagagaacaaaaatgggcaggggcctatcttttaaaggggtcctctgtatctgtgtgcagatttcattcccatggaaccttgggctgaccatggtactgcctgttccaccaggtaacaggggcaggccagcataatgcctgaacctttcagtggggtgcgtgatgaggtatatgatttgacttgctctactagtacaggaaatttatgagagaaaagtcctatcttgccttgaacttgcatgcatatagcagatgtgttggtctgctgcggggactgtgatttattctagatcatcattaattgaataacaaaaacagaaacaagagaaattccttggtgttatatacacatacatctgtattctaattctagggtaaaaacttaagtatgctataaaaagcagaattagaaaattgcttggatatactgaatttccatccattttattataaatgaatacataaacaataaaaaaaagtttaaagaattagttgtgatcactcagtctttaaattcaaaggttttattttgtttctctcttcaaatcaatgtccacaggttcacaattaaattgagcagccattctcactgatttatggccaaccaaagcccagggcaaatactgtgtccttatgacagtgcattgacccctaacctttgtattgactgttgtccttcgctttggcaatcaaagtcagacatgatttccttccaaaatcctgactcagcttttgcctcacgccattatggttggataatattttcaaagtaaacatacatgtcaaattaagtgattgaaaataaattattcagggttggttttgaaatttcacgtaaatgattatagttagtgttctgtagtcgtttacctggtaatttgttatgctcttattctacaaaccatctgaggagatacaggggaatacccaaagatacaataaagttggttatattttttcttttttttatttagaaaaaatcattttacatatcaatccccttgttccctctccctcccatcctctcatgccccctaccaccccaccctacccaccccccacctgctccaaaaggatgatgaggccttccttggggtatcatcaaagtctgtcacatcatttgtggaagggtctaggccctccttgtatttgggctgaaacagtatccctccatagtgaatggactcccaaagtccatttgtgcactagggataaatactggttccaccattagaggtcccatatcctgcccaggcatcctaactggtacccacattcagagtattggttcagtccagtgctgattccccagctttatgactggggtccatatgctctcactaggtcaagtcagctggctctgtcgggtttctctagcaaggtcttgactgctttgctcatccctcctccctctctaaaactagatcccagcagtatggttcagaaattagctgtgggttcctacttctgcttccatcagctactggatgaagactgttcagggggcatggtttggtcctatgtttgttccccagttgtcagactggggtccatcagttcccactttctcaagtcaactgtttctgcaggttttcccagaatggccttgacccccttgttggtcactcctcactctctgaaacttgattacaggagttgggctcagtgcttagctgtggatctctgctgctgcttctatcatctactggatgaaggctccaggatggcatttaagatagtcatcattctcattataagggaagggcatttaagatagcctctccactattgcttaggttgctagttggggtcatccttgtggctctctgtacaattccctagtgccagatttctatttaaacctatagtggctccttctattgatgtgtctcttttcttgttctcctctattcctctccccactcaatctatctgatccctcttattctagtcccccctcctcttttcccctcctctttctcccaagttggtttcatttttaagtcaaacactatccataatatcctagaaagcatacatcacaattgatcaagagtgatgtcattaaagaggcatacagatggaaatctaaaaagatcagaataatattttaatgttcctttaaaatacatataaatataacacaaaggcaagagatttgcatcttaaatggattgcaacaagaaagcaattaaatgttgccaaattacaatcagttatagtaggaacataaatatcatcatttggttaaattagttaaagtgaaaaataaagagtacatccgttaatatatatggaaatttttatatctgatctcaattacatgatcgtatttgcagtttctttagtagtataaagcagtattttaatctctaaagtgtccacagtagaattttggtgctcttgaccatatggccttcatcaaaatttgtttactctaggtctgcagtgtaaaggaaaccatggctcatcagtcaatttaccacactgactgagtacctgtaaagtttagtcagtaatattgggcaagagggcagttgtttttactctttatctattagaatttcaaaatgaataagtcattgagaaaatttgattgtgatgcatttaaaatgacaatcatttaagctgttggcacaattagtgcaatcaattgcatctataaagaaacaaaaatatggatatggccatatttatatactaaggtattaattttacacattattttatagtacataagtagtgaaagaactttaacttctgtttttgttattagctttgtgtttagctgggcaataacagagatactttatatttacatatcaaaattcaaattgcaatactctagtgtgaataattttacctatgtgtgaatgtgcacataaacatacatataacacacataccttttagttaattcaagaatatggctctgnnnnnnnnnnnnnnnnctttgtacttccttctttcagatccttttttttttaaatcactgccatattctcagatatatttaatcaagaattaaattggattgtaaaggaaagaagttatctttgaaattcacaattagggttagatgactaagtatttcatttgcacaaataaaatatcaaagaaaaaattgatgtcatagataagatagatgcctgtacctggtctgtccacatcctgataggttttccttataggccagcctcctgtagatgtcagagcctgacctcacaagaaatacaaatactccctactaaattttgcttgtagaaagttttattgtcattgttttatttttctttgtttttctttttttcttctttgctttttgttttgttttgttgttttttggagacagggtttctctgtggctttggaggctgtcctggaactagctcttggagaccaggctggtttcaaactcacagagatccacctgtttctgcctcccaagtgctgggattaaagttgtatgccaccactgcatggcttcttctttgtttttaatatgggcaacactaaattatttggagaattcagaaattcaaactttacagtgcttaaggctgttgataaaatagtatttacttgctcattgttcccatgtaccaggtctacaatattaaatgcctgatgggaccaggacataataggggatattataccagttaaatagggattatacatacacatgttagaatgcataatttaggaatttttcttaaagttataattattgtacaaattcaatgtaatagctccatatattcctataattccactgaaggtaaaatatcataactttttatttaaaaataactgactgttctacaagtcaaacaaagtgtacctaggattagagtcaacattaggtggtttctctgactgacacatcagatttgagtaatcagttcacgggtctatcctcagatgactggaaagcacagctatcagaagcctttctcaactttgcattggatttacttgtgaagaagtgttgtggatgataacatgtgtagctaatacagacattcaggggaacactgaagtccttaaaggaaatgaacatagaagtattgataaataaaaatggaaggctgagcaattaacagaaacatcatcctacttctctttgatgagctattctgaggtcacatttttatttgctgttagatcttgtttcagaaaaactttctaaaaatgatcgtaaaagaaatgtaggcatagaaattgcttatcatatatctttgcaaatgcttatactttgaaagctaggagtcagttctcacattatagcttaaaaaaagaaaggtttgaataccatctaggcagcaacaatgagttctggattatcaataaggctgcaaagatgtggatctaataagcaaatgttttgtcagatatttcagaacacccaatgtgggacctacacgaggacccagtcatttaaactacatgatatgaatacacacatacagacccacacccatgcaaatgtgtgtacaactatccaaacacaattatataagtgtacttgcaacacacacacacacacccacacacacacacaaataaaataagcaaatatcaacattatcacctcttgtgctacacatacgaaggccagaggttggcaaagggtgtcttcctggacagcattttactttatttactggggtaatatgtgaaccccaaacttgcctattgaaggattctagcttctcaacttcatcctccaggaatcttctctctttgccttccaagaactaggattacaggtagccaccaaaactatccagtctttaagggggtctgagctctaatcttcatgtttgtttgaacagcttgatccactgagctatatgccttcactttcattaaactctgcagagccttctggtattgacaattttttccttaatgttgctcttttgataatcattttattgtgttaatatttaaaaaacacctgccttgcattttaggtttccagatattgtttgttgcaattagatggattcaatggtttgaacccatattaatgggcttgaacttcatatatgtgaaacaggcttctgtataaggtcatcaaagggccaatgatggcaagaaagaagactgcctggaattttcctctggagagcttcaagacatataatagatgatcaaatgaattccaccaggggtatgtgttgagaggaatggtagtcagacacagagcagaaaacagatgagtacttttattattttagtgttttgctggggcagtgcagaagttgtcgatagtatttccaaatttctctcatagacctcagcattgcatttgttctgagttttggactgctccccaggtgttacaaagaggaaccatcatctttcagatggatgtttggtatgatccatgggggacaaaaacagattgctaaaatttatagcatcttttgaagaggaaatagaagttatatttagcaatagatgattgaagtaaatactactgagtagtaattaccagcaagctaagtactataaaaggtttcaaatcaaattcctgaattaaataataggttaaaatgaaaagagaaaaaaatacttaagaactacagattgtggagtggagtagatactgttctgaatgagaaagatacaggaattcctccaaaaaaaacattcatgtaccctaagcagatgcttcctgactatttaaaagtgaaaataaagaaggatttggctgatgaaataaaatgtttcaactttcatataataataagctagaaagagttagtcacaatgagacctatgtttgatgaactatgtaactgaaatggaattctaaacatccttcaaagtgaatcctagctaagaatttatactgtacttcctttcagcatcttccaatgtgtctttccaatttcacacacacacagatacatacacacacacacacacacacacacacacaccagagaaagagagagagacagatagacagagggacagacagagaggcaaacttacatctatacatacacataaatgtacacacagaaacaaaacacacacacacacacacacacacacacactgcactaaaatatactaaacaaattctttgtgttactatatttcccaaaattaaacttgcatatttcctttatgagctctgtgttgaagagttattttattctattgctagaacataatatctcagataatataatttataaaaatgaatgctaaattcactctttgatgttctagttttatcctaagcaacttaggaagaagatgagtgtgatttgtactgatattgaacccagttcctttgcaagaaatcttgacatactagctctctctccagcctgaggggagggatttgcatttacatttaatgatcacaagaatgttgggtgatgaaaacatctcctaatttttttcttttcttccttttaattaaaatagatttttccctcctatactatattttgattacagtttcccctgcctctaattttttgtttggttttattttaatgaagtttttttaataagagaagaaaaagagtaatccataactagaaaaatatataaaaatcagaattcagaatccattttttatgtaaacaaccaaaatcaattagaaatcctagagggttttgtcaaaaaggaaggaaggaagaaagaaaggaataggaaaacactaaattagaatcaaattcagctgtaaaacagataaaggaaagtgcaaatacaaaagccttctgtgtggtcagtggatccctagtgtgtgctcatgaatgtaaatagtgagtctgtatctgctttgcaaagtcatttctattaaagtagttctattatttaatgagccttttccccagtatgcattaaaattctttaaacttatttattgtcttttatataatttgacagcaaagaaaaagcagaaattatcattgaaagtagctaagaaatatattaacataatggttgaaacaactgtattaaagaatatctaaaaaaatattggtcacaagtctgtaacattaaagtctacaattagaaggaattcattgggacagaactaaagagatattaattgtggacagaagtttctgtcttacctggttctgtagaggtttagtcccaaataaacacacatagatttatattaattataaattgtttggccaatgtctcagatgtcttattggctagctctctcttaattagtaaccaatttctattcacatgatcttggcttaccagtcattcctaagcatcttgctaactaacctaagctttaaatattataggtaactatctataatctgtatttaattatatattacatttttaaaagagctatataaacacaatatcttaaacggagtagcaatatacatttaacaaaattgacctaaaatttctataaataaaccaaaatccattccaatgcaaagtattcatttctatatcacattccccttatttttctttagagattgactacaatcattaatcatttataaccaaccccactgaaatgaaaacatttgtaaacaatatttgggaatttgcttatagttccatttgggcatatttgtctccaaagtgcttcctgctgtttggggacactgtcaatcccaaggggatcctgagaaaacccagaaccctggccaaatcctggctgtagtagtctgtgaggctgcatcctctcagctgttttggttgttgaatcacctgggtcacagcttcaggggggtcttgtttgatcaaatcatattagtctgaaaggaatccacagcttttcaattttttgtggaaacaaaagcagaattcttttccagagtaacatgtctttagacttaaattttgaggtcaaggtattttcaaattatataggttggattattccagcagcatttataatcaaatgtcttttagcagctgttgctccttcctcagcaaacaattcaaaaataacacaataacatacagtacctagactctctgtgtatgttccatctttaactggccccttttcattactattttccttttaatatttatttatttatttatttatttatttatttattttgtgttttgagacaaattttctccatatatctttggctatccgggaactggctttatagaccaggctgtccttgaaattgtagaaatctgcctgcctctgcctcctgagcattgggattaaaggcatgtgccaccacagccagctactctatttctttttttaccaactttctctttttttcttttctctcccaaacctatgtatatttttaagcattctgtgaaccatttagaaatttttttttgttcatttcctctgaatctgtctttactgtatatctcaatctatttctgaacacatgagtttttattctgctaaacggaatggctaggattaaagtagaggttttgcctgctggctccaaccagttggctttccaactgaggtttttcctgctggctccaaccagttggcaggggtatgtttaccaccacctttgggagctgtgcttaccacctcaacactggtctatgccactatcaagcagcttatagtacactgtccactaacattttatgtctgtatgagtaaaatctaaatctgctatgcagtatactctgcagcttggaaaaagcccctatgtacnnnnnnnnnnnnnnnnnnnnnnaaaactaatggagtccaggaatcctctatgtttatttttttttcaagccagactgacacagtgtctctgcaacacagccttcacaagactaagattaggaagctcactggggctccattttatgtggaaattcttgccaaacatttgggtggcccttgtggatggaactttctgtcctgcctggtccgacagctgtgaggtcccaaataaacacacagaggcttctattaattataaactgtttggtgtatagctcaggcttcttattggctccctctctcttaattattaacccataactattaatcaatgtatttctacatggtcttggcttactggaaaatgacaggacttcctaccttcccagtagttacatggcattgcttctctccattcctcttcccagaattctcctagtctggtaaccccacctctacttcctgtctggctacatcctgcttgtgcattgtctgaaacagctttattgatgaaccaataaaagaaatgtgatatatttcttgcacaaataaagtctttctgggggtcagagtatcgagcttgccactagctaactgtagaggtctgtaggtctgtggagatagacaggaagttcaaaagctgggcagaaacagaatataagcagggacaaacaggaaattgctcttttctctgctgagacactgaggaggtaaggcatgctgtggattgctccttctctctgatctctcagcatttccctctatttctgactctggctttttactatatagtccaattaagaactccatctacagagaagcatatattcacaacatacataaggacatccaccatcaatgaatcataagagaagatataatcttaaaggaaaggcagattttaatttctaattatgtacccaatatatgtgtaggaccactatcaaagaaacacagatgtcatataaaacattggccaatgatgcagaatgcttaattaactattcaaagatagttaaatttgtttacttgcaaaatacttgtttaactacacaaatatatgttgcaatttttagttatgtaaagatatgttgcatttgtttaattaggtaaagatgtattgctgttttaattgcctatcaaagacatctgattattctaataaaaagctgaatggccaacagcaaatgaggaaggaggtatatgcagtacttctgggcagagagtgtaagtaggagaaggaatttaggctggtaggaagaaagaaaaagaaacacaagttacacactggggctagcctcccagatatgaaggaagcagaaagcaggacatacagaatgaaagaaaggtaaaaaagcccagaggcaaagcatagatgaatggaaacagattcaattaagttaaaagagctagtaggacaagcctaagctaagaccaagctttcgtaagcttggtgtgtgtctttatttaggagctggctagtggcccaggaaaaattgcaactgcaggccaatgcttcatttatctttaaagtgtttgtgtgtgtgtgtgtgtggggggtgttcctagatgttgtgagccacctaacatttctcctagcaatcaaacatgggtagtctggagaaacaggaaacattcttaagtgtttactaatctctccagttcctcattattatccaagtcaaaatagttcatgtgggactatttgagtgggtaagatgagtgactgaaatagcatatacatttcacagtagacttcctatccacactgaatggtcttctggaaggatgaccagctccaagatccatggcaatggcaagaagttcattgttctcatgaaagcctgccaaaacacccagtattttgttatagttaaatcatagtatattcaaatttctcatgaattatataaaacattgcaatgtaataatatatatatatatgcacacatgtatatgcaacctaaaacattatatttacacacctataatatgttcatatgccacatacataaaatcagttatacagagaaaactatattgcatttcattatatatatatatatatatatatatgcatgtatgaatgtgtgggggccgacctgtgtgcagatgtacctgtgaacatatgcttatgaggctagaagccaacgttctgttattgttcctcagcatctgtcctcttcctgtttggaatcagggtgtctcattggcctgaagcccatttacaaggctaggctgcccagtctgtgggactcagtaatccacctgtttctgcctacatccccggcatttgggattaaaaaacacacaatagcaagcatggcttttaaaatgacttctggagactgaacttgggctctcaggcttgcacagcaagcacttttctgattgagctctcccatattccattttatcacacatgtcttttatatactttatcagtagagcatgttaaataccttgaagaaatttgactcagttgttaaattatattattcttggttgtttttaactctttagaattttctatataaacaggagtatgttgtaaatgtattgctttttcacctaaccaaacctcatcaagtttagtaaagcaataaccttggagagaagactctggactgtggagatgtctccaggttgtgcaggatgctttaagcagcagcctttgtgagtcttatccatgctgagatttccaaaaagacccatgctcctgtaggtaagtccctcctccatgctcctacaggtaagttctcctccatgctcctgaggtaaggcctcccccatgctcctgtaggtaaaccctcacctatgcacctataaataactctggtacatttatcttttcacaaacctagactgaagtcaaatctgtcaaggctttccttggtaccctgtcttggatgagaagatattttgtcatgcttcaaccaaaaattctgaacctagtaactgtggggcaactcaatggctattcagaggatatgtgacagttttaaagattatttttactgagacatatagggaagtactatagaagtagaaggtggtatcagaaaatacagataatctctgaatggtaggagcaactcagagataaaatgacagccaaagagacaaagtaatgaagggcagtgctacgttgaacaaacccaaactcgtatcacaggctgttaccaatacaatttcatgactctgtaaggtggtctaagatattttttgtttatagtagcccaataattcagcctttcctggctgttattactgtctcaccaattctaattacaagtttcaaaatgattttattcaccctctgcctctttgctttcatccatgctgggttggttctgaaatcaactcaattttttttatgcttgtacattcaagttctttttcactgaagatgttctctcaccctaaggttcaacctcaaataccatttctctgctataccagcattttgaagaatttattgcaaagcagttgaatgttagagaatgcagtgtggtgtgtgtgtgtgtgtgtgtgtgtgtgtgtgtgtgtgtgtgtgtgtgttatatgactattcatgaatgtgctggtgttccagtgcattgatatgtgaaggccagagtaggatagtggttatctcctctgacacactccaccttattttttgagacgtgatctcataatgaacctaaagcttgcttttcagctatacttgctgcctagcaaattgccagcatctgtgtgtttttgtaccttggatttcagttttacaaacctgttagggaattgaaattaagcccagttgtttacatgtaaacattcttacacagtgagccatctcctaatcctgaatttcagtttatacaaaaataggccttggtgagatactgcaatagtgtcaccaagtactgaccatttttgtaattaattgcatttaactttgtggcaatttggaaagaatggacttgcttattctgtcaattttagagatgagaaactgaactacagaatggtaaatgacttgcttaatgtcacagagctgattaataataaagagatctttaatgacaggtatatattcttccaatgagtaaataaaattgttagattcatggaatttagtcacacatgttctttcttcattgttttctttattccacatttattcattgtgtgtatgtgggagagtgcatgtgtgctatactgtgtatgtgcaagccaaaggactccatatagctctcaaggatagaactcaagttgttagaccaggcagtagatgtcctcacactggccaccatgttcccctcctatttatttcatgtatgtctgggaacaggatctgagtctgtgagtcattccttctagcctaagcagttgacctaggatcctgaatgctgcagttgctttttctttaatggaaaagtgacataactgtaactttttctgtttttttaaggtaaaatagagcaaagcaagtcagcattttgatctacagtgccctaaaattcattgtcacatacgtgaagaggtgtcatatgccaattctattttagatatggtcaatttaggaataaaaaatagtctcatgaatgtatgtcaacatggtacatgactcaatggttgcaatatatttgaagtaaaaaaaaatatggttacaattcgaaaatattagcttcttactaaagaataaagcacatgaaaaccaataatctctacttgttttatcatactcaattaacaagtaagtgttttttttgtgccagtaagctaaactcttttttggctggtcaaaagaaaatgtaaattagatatatattgcagtatcaccctggcaatggaacataccatgaaaactaatggagtcttcttcattctcacctgttctagcctatgtgttgccctttaaaagacaaataaatgtctttttaaagacagcttcagaagcttcagttgtctgtaaatgacacatcttctgtttaggacaaaataattttaacataatgtcaagcttgttatgaatcttgatagatgacatgagatgggatttaaagcttttacttaatgatcatctagtataaagtcaaataaaatattctccctttgatgattcaactatgacattaaggtagtgatataaattttaaaaagtattagtgtgcatttaaggattttctgaaactgtctatcatccatcacatgggatgtggataccatggagccatcactttggagtttcctctcgattggctcctcttcattcacatctgtacttccaggcctaagaacccaaatttctctgagaagacaaggtaaagaaaatgaaaaggattggaaagtggctagcaacccaattgagatcctttttcactaaagttggtatccacattttgtagggactgtatgcagccaagcactagaggagacacttgaaaccctccctatttaataatttcctccagaaatattgttatgaggaaagggaggaatgactgaagccccagggtctgcctggagatgatcttacatggttcttgctcctccttacatgagatgcagactagagccaaacaatgatgggtcaatgatagatgggaccaagtctcaagcaagaatgcttttcagtggatactgcttgtcctctatttcaacctaaacctcatgtgagtaattaatatgtgctttcagggtcactgtaaccattgtttaccatcttccccaacatccccactgctattcattattagatgtctccttagttggtccactggggatgtcccacctagcctagctccttgaggccacaattagccagagtttgacccaaacaactccagcaatgaaaatgctaaggcaagaaaaaagttttgtaaattatctaaaatagttctcacaaaaggtgataaaataaatatttaaaacatagtcaggactggagagatatctcagtattgaagagaattagatgttcctgtgaaggatccatgttctgttcccagtgcccacatggaagctcacacctatctataacactagttccgggaggctgtcctcttgtagcctcatcatgttcaagtcacacacatggtatacagacatacatgtaggcaaactctcacaaacaacaaataaaataaaatgaaataacctttctaaaatagccgttttcatttgcattgcatcaaatatctcgaaataccatctttcccaacagacagctgtagtaaaaagaaaaagacatctcaattgactataaagcaagaaataaaaactgtctacttacttttcaaacattgaattattaccttaaaaacagttcttcttgaaaacttggatgatttatgaaaaggcataacaataaattaagtccttattactttgctttatttttgtaaggctgcagcatcttattaaagatttagattaaaatgttaaatttattcaaacaaaaataagtcacctttacaattttgtcagcctgacagtgtctaattggttaaaagcagccatagattaaataaatgttgtgcttcgaacaaatctgtcaagtcagatttttcttacactctggggaacaatagagtgattcttgtgttaataatttatccatatggatatcacagtcatcatggatgcatatcatgttcttctggagtacctccacttacttccttgccatgtgagctgtcacaagttacttttaccttatatagaaaaagaattgtttctgtcccctaaaaagtgatctgctgcagactgaagagatgacttcccagttagaagcacttgtggctcttgctgaggactggagttgagctcttagcacccatgttagatggctcgtagctgcttataactccagccataggggatctcatacccccttgtggtttatgtgggcactgcactcatgtgtacaaacctgttccaagacacaaatgcatataattaaaaatcaaataattgtttaaaaagtggcgtccagaacaaatgagattcctagtttcttttcaactttacttttcacctaagattgtacttctggagatggtcctggacaatgattacccaatgattttccaagtctaaaactgcttgaggtatgaagtatttgttggtatgtcatttcaaaaataggaagcagagaatgtaaatttttgtatgggaatcttctggttcctgagacagatctgattattcctctgcttgctcataagggttgtgcaactaaaatgagtttcagtagccaagttcttccaatgtgatctgttctaacaggggtgtaatctattcctagttcatattagttttcctttcttgatagcacaatgttaagggctttatataattctgtgcatcacagtatatgtccagacaactacttcacagcaggagtattaaggatgtgaaatcaattgcccatcccatactttagtacccaaagacatatggccttacacctagactctgaaatgtaacatttaatgccagcttgtagagagaacataggatttatgaagtactatcttttaggactcaatgtatttattgacccaagaagacactcatatggtcccctattctcttgggaaagcatgtttgaattctgattactgtaggtgaaagcaagccccatttgacaatacttcaaatgacccactggaggatttttgctttcttatcctcacaaatctataaggttctatgttgtacaacaagatggaagcatatacttgccaggcaacacataaaagtttccccagaaaacagctttatcatagctgctgccagcaacatattcccagtaatcagcaggcaattacagatttaactatagccaaagttaactgaacatgatcagcagaaaagaaaattccccctttgggagatgctgaaaagaatatgtgtcatgccacatgagcaccttggacactctcctgaattatatgtccataaactaatgtgaaaagaatcaagcagagaaggtaatgttatgaaggtttggatccatgagaatgaaattttggttttctgtctagtcaaggcccaaatactgggcattggtaaacatgaaaagaccagaaacagactgtgaaaatctttggagatcaagtcctcataactacagctccacatttcttcttaaaaagtgtagaagagttggttcttaaatttaaactcccccatcccttcccacacaatttagagaatattttgtcatttgtttcctttcctcttccacctcttcttctcctccatcaattgtatgttgccagctagttttaggatgagtccttctcttgtgtccagttggcttatatgagtactcatatcatttcaaaacaaacaaaaactgactcccttcttccagcagctatcaaatgctaatggtgcctcagctagtggtgggaatatgtgtccgctccctcatgctgctaatttttaatgttggatcttccattcctgttgtgaaacctgtaattattaaagagccacagattgtatgttctgaaattcatctccatgtttatggcaagttcacaatttcctcaacaagcatttgtgtcattaatgattctgacacagaaaacaaggcagagctaatcttaaaatccttcacagctggggctggaaagatggctcagatgttaagagcactgactgatcttctagaagtcctgacttcaattcacagcaaccacatggtggctcacaacaatctgtaatgagatctggtgtcctcttctgcatgcaggtatatatgcagggagaacagtgtatacataataaataaatacatcttaaaaatactttcacagccattgatagctcactttggctcctgagttccttgatgggcttcacaatttccccaagctatacttcagtcatgacaatttcttttatttctgtgctgctttctccatcatcccttttctttggatcaaatttctcccaactctcttccttaaaatgaaggtgtccatctgttaagggacatgggccctaaactatgggttttaaggccatctctgtaaacccttctatgagcctcctgtaacctgtaattagatggtttggccacagggaactgctaattgcttctgttccgagaaagggcctggggctttcctgttcactgttctggggaagatcacaagatattccggctgataagaagaatgctccggctccttcctgttatcccccgcctgcctaatttccttgttgcagggctatataagcccagtctgaaccccaataaagagaagccttgacaatgcatagacagactctggtcctctttcttttgcgccacttggcttccttccttctcccgcccatgactctttttcaggcagcccccctccggaaccctgaatgactgacccgagggacgggacatccatctttctttaacaggcacttcctataatcacatctgcatatttaactgtgtgctcatatcacttgatgtggtactgaaacaatcactgccaggagacagaaaaacggaatagaagttgttaccaaaggagacagccatagaggatgtgtcagaattatactacagagaagtgtgcattatcctctgtatctatcagcagtggttctttcctgagggccattgttgacataaagaaaataaggcacggaaagtgttttattgattgcagttggaatgatggcgccattttgcagaagagacaaaatggtgttacttaatagtaaggtctagggcatggtagttagggaaacaaagtgaatttggtcttcagagaattttgataatggtaatcagaacacaaaatcattacaagccaaagtcagcggtatgggggaagacataataatctctctctctctctctctctctctctctctcctcctcctcctcctccttctcctgctatccctcccttccatgacatttatacctacatgccaaatgcagacaatttcttgttgttcagtactgagacattgtatgttgccagctagttttaggatgagtccttctcttgtgtccagttggcttatatgagtactcatatcatttcaaagacaatgacttttcttatgaattgaaatagaaagtgttttcctcaaatgtccacacattaccttgggaaatacacataacataggtttccatataccaactccaaaaggcccacagatggaatcaacatgttttctatggggttccaggtgaaaaacacatgaagctcttattgagaaatcaccaagaacgtcaaggtaatgataagaaagtgaaagggccttataagaacaggttccatgccaccatatatgccacatgtccagaaatctgaaaagcagcaaaagatggcctgatggtttggagaatattgggaaaaaagacaagtatttgaaagcccatctaagctgcataataaatggggctgttggagcaaaaggtcatactatgtggtggttacattcctggccacacccagtaattttgtctggcatttctaactgatgatggctttggtagctgacataacctcatgattaagaaataattcagagcaaagtttcagagcaagtctctgaagtgcctgcctcctggataaccatatcaagtacaaaactttaactagtcaaatgattttcaattatagaaatcaatacataaagtattttaatcgacaagttaatgttaattcatatttactaaaattgatttttcttgccaagatggggatagagagacctgcagaaacagtggacatgacctcctgatagaatggagactgtagtcataaacctggggaaacagatttggaccaaaccaaagcctctgaatgtgggtactggcttggagcccaagacagtctatgactcctataacagcggagccagtctttatctctagagcacaaatggactttgggagcccattccctatggagggatactattgcagcccagatacagcaaggagggtctagaccttcccacaaacaatgacagtctttgaagatccatagtagagggcctcactatccctggggaggagtcagagggtgggttgggtgaggaatatgggaggatgggatgggtatgtaaatatgagtaattaaaaataataaaaaattgattttccttgtcatgtcagtcaacttaaaataacagaaattttctcactatatataatttcatatatatttatatatcaacatgtgtatgtatttatattgatatgcatatattctgagtctgtattaagatttctgcaggttatggttgttttgtccttatcataaagaaccactgtccattctcccagctcaggaatgaatctaattttagtaatgtttatggatcggacgaataaaataagcatttgtcttccaatttacaatatttcctctatggttccaacattttagatagtttccccactacatttgagaaaatcattacaaaatccatgattttcaaagacttctgtagcacagatctttcttaattccaaattaatattgcttttgaactgcatttggttatgttcataaattcatttgaatttgctatactggcttctgtttaccaaggaaatattcagacaggattttctttattaattctgtctagagatgttgacaaattcacatttgtttatctgccacccctctgtattactcttcaccctgtctgcaatgaaattatcattctttggtaagttttttgttttgattttggtgtatgacttggtagtcatttacatgtaatgtaagctgataaaaaaaaaaccagcaagagcaaaattctatttcaaaatataataaatatcttacatttaaaccaaaaaaataattttaaaacttgggaaaaaatgtgagatattcttagagatgaaaaaacttaaaatggctgaacttccatcttttcagagagccaaaggattgttgggtgtgaagtaacacaatattttttctccaactttcccgtcctctatgtaaatctgtgagttttaaggcagggaacagaggctggagagatggctcagaggctgaacatcatgctttggaaaaggacctaaatttgctgttcagctcctgagaagaacagtacacctcctgtaacaccagccacaggggacctctgcagccactgcacttaataaagggcacaaagtcacaagcaaatataaccaaacatataattaaaaatctttaagaaaatttaaaatctttaagaaaaaaataaaggaaggaaagaagggagggagggagcatgaaagtaggaaggaaggaagacaaaaataggaaggaaggagggaatccattttcaggtgacaagtggctctgtgtttagaggaaaaattaaaatggaaagaatttactaagaaataaggagagatgactcagtgcttcagagcactggttgcccttctagaggacttgggttcaattcctaggatctacatggtagcccataactgtctgcaactccagttccaggagatgtatcaccgtcactcagacatacatgcaggcaaaacaccactgcacataaaagaaaataatttaaaaaaagaaatatttttctgtgactagatatgtaagtctatgtgaatataataattctcatttcttaagtataaattattcatcatttgttagatgatattctaagtttatacagtttacatattttaaagaaatagtataatgtttaaagcagtcatcaaagctattattttcccacatggcatccaataaataataatgtggaagaaagctgaaaaattgggaaatttatatacacgatattcaagaatactaggaattgggaactatctacttgatcaaacttacttaacaacaaaactgtactgtcttgatatgtaagatagatacagaaatgggattaagtacaattagaagtttagaaaattgctttataatattgtgctattcaaagaatacagaaagtgttaaatttatatgcttagttttttattcagctgtggttcaatgtactatcaaccttgtgtgtccctacattgtgctggggacacatcaataacacacagcctctgatccccaagaggttacactaaagtcctaagagaaaaatcttcaaaacaaatgaataaagcaaaatatgtccttcgttcttctcatagaagctctacttcttactacagccatgattttttattttttccacaattttatttaaattaaaagcaagcttgtttcacatctcaatcccagttccctctttatccctcctctcatgtccccatcacccctctatcccattcccttgctgcaccccagggagtgtaaggccttccatggggatcttaaaaatctgttatatcatttggaaaaggacctagcccctcccccatgtttctaggctgagagaatatcactctatgtgaagagggctcccaaagtccattcgtgtactatggataaatactgactcactaccagaggccccatagattgcccagaccttgtcactgacacccacgttcaggggcctcatttggtcctatgctggtttcccaggtatcagtctgtggtccaggagcttccccttgttcaggtcagctgttactgtggttttctccagcctggtcaaactgctgaggggtggccccacatatagtgagctctgccctgtcacatcaattaacaatcaagaaaatgcctcacaggccatttcctcaattgagtacccttttgtccaagtgaccttggttgttggacacatgataattcttgctataaataagtacataagtcctgtcaatcacataatatttatacctgaatctgtctttttttcaattattagttttgttatttggtgtactttcctctctttgttttcttaaacaagtgtcatgaatcccagactagccatgaactccttttgaaattcacaaagtccttgaactcctgatctcactgcctctaactccaaggggagccctttgcctgtctccacccatttcgtttattcaatttcataatacatccacacaaaatgtaatttttgatcatatgcaaatatacacaaatatacacaatgatcttcaaataattttttaaaatgaagggaaacaaataatgggtagtagaaattaataatgggtaaaaaacacatatgtgctctgaagtattattcttgtttgattctgccttgtgtcataacaactttgtgttacattgttacatgtcctgctacagcaaacttctttaatcattattcttaccatagtgcctggaaggctttatcatataaagtagattcttaataaatatttattggtgttgcatacacaacttttttattttcctatagtcctccaaatctgatgctttgcatattcaattatcctgaacataaatccttttgcaaacatatttctgaagaaaatatccaaacatcagcactattctcaatatttccaagtttattattgtgacagaaaatacaagtgtttagtataaaaaggctgagtaatttaatagcagctgcacatttcctgtgcatggaagttgagagtaacataaatctgcctattttcagaatgcaatgcattgggaatgatgtatagttccacagatattgttcctatgtctgtcacccacagaagtccagtgtatacaaattcctcacagatatgactaaggacccttttgctccaattcagtatctatcataannnnnnnnnnnnnnnnnnnnnnnnnnnnnnnnnnnnnnnnnngtgatggccttcaagattcacagtccccttcaaatgactgaaacaggagttctaaagggttttcctcactgtgggactacacagtgtgtctcattaggctacctatagtgcatcagttgcagaaaagcctgacagatctaaaatgtcactacaatcacttttaccaagtgctgtcacccatgttttgtcagcttttagttttgtggaaagaaatgtggaaaggccataaaggttgttcttaatgggaacaagcaatttagtctcagctctaaaataaggattttgttcaattatgtggtcatcttgacagaaattcaccctagtgagcactgtatttattaagataaaggtcatctcatctccatgctcccacctgctcaatggcagttacagaatgtacctatttatcaagcttgctcttggaaaagatgtgtgtatattttaatgaacaagtgtgagttcagatactcaaaagcaggcaagtttataattgatttaatattttgtgtgtttggtttagaattggaggcacaaaagtgcaagattgctttctcttgcttgagtgagaaatgaatcaaaggacactcaggtggtggattcagctggtgtaaagcaaaatattagcagtgacacatggttgatggttatgacaacaggtcagcctgctaatactgaaccccagacccagaagacttgctatccttgtactttggtgtttgggacagtttctgaaaatctgagtttagggcaatatcagcaaagagatgggggcacagttcaggtaataacaaataagtatataaataaataaataaataaataaataaataaataaataaaactattgacttaacatacacatctacttttttctttgccaaatatcaaaatgtttcctaacctgagaaaaatgagaaccatgtgttagggatagtcaagtagggggtccacaagtgcatattctttgttataataatcacattgagaataatggaaaacattactttcatttctaaagcatttcaaccaaattttttttgaatttgtaaaataaaatgcacaatactctttcaaaaataatggtttaatgactagtaatttacttattccacagcaaagactaatttaacatgtgtacaatcaaattaatttgtcacaaatatcctagggtgagtgtactaaaaatgaaggaattgaggcacaaggacattgagttagtgtgctgatcaccacatagagtagagcagcaatgcctgcatctaaaactaacccatgcatctctgatacctgctgtgccacacacttgatctccagtggtagcctgctgcaagtgctggccatgcttactactgccatattttataagatgatggcctcctttcatacaggcattctgcatgctcacttgtttaagcatatcatctgcaataaactatagacaacctccactgctcactatccctttgaagaactgaaatgaatatttcaaaataagaagtatagctgtcaatgacaacatactacactgagatggagtctggatagctggctgcttctcacacttatagccttatggcactgatgctgtatacaactacctggagaccttcagccagttagttctctagtcacttgcttattatttcattacaaaatatttgcatgaaattgccaaagaatgttatacccaaaatatgcatcagtgaggtacctactggtgaattaagaccagctctatactttgggtttaattctctctctccttttgagtatgtttctatctccctcacttcatgtgtttatatatgtgtgtatttgtgtatgtatatgtatgcatgttttcatctatatgagtgcataaggaatgagcttgtgtgcatgatcacatgtgtgtgtgcccttgaatgtggtgatcagacgtagatattgaggatatttatttgctgcttctccatcacatttttttgtcacaggtgtcttactgaacctggagctcactgatttaataggatctggactataagcctcaaggatctacctatcttggcctccccaggattggaattgcagtccatagtcaagcttagtgggtttttcttatttatctgatcttttatttatacatttattcatatacttaaattgtcattatgagtgtgtgcatgtgtgcatgcatgactgaggcatagcaggaaagcgaaccagaggataacttgtaggtattagttctctccttctaccatgtaggcatcagggatcaaagtcattttgtcagtcttggcagcaaattccttgaaccactgagtcatcctgctggtccaagcctagctcttcacatgtgttctaggaatgaacacatgtctacatgctcatgcttgggtcacaacaacttttctggcttcagcatttcattgctttctttctgaccattttcattgtctacttaagtctatatataacagttgttaggctgtatcataagttacacctattcatgaaattgagattcacatgtatatgctccacaataccaagatgtaagtcactcaaaaaaagaaagagagatttcatcctgaattcaacattttttaaaactttatacatggtaaggcacctacatcccctattccacatctaattctgtccatgttcctccaagttcctcacaactccataggaatacctaggcagggttttgtccccagagaaaactaactctctctttttcagcaactattgaccaccagtggtttttatgtagggaggaggtcttgtggagtttctctctccactctagcatcccagctgctatcgtcatcatgcagggcgtgttcaggcagccatataagactttatgaattctatttatcttggccatagagcagtgtttcatagctggtatccataatctctgttcagacaatatcccttaacctctctttctcaattttttctgagccttcctgtggcattgtattgcaggtttaacaaatggtcatttatttaataacctatggtagccttttttttttttacatatggatcagtaaaggatctctataatcatccccatgttgttgcaaaaggaagtttctttgagaaggggttgatcaggttggaccagtgccacatcaccattttaactgtctagtctatcacctgtgttaagtttcatatttccattagtcagtgctcttttagcaatgttgcaaatcatgtcattagtaaaattttacccagaaaaggaaaactttgtggttttctataacttggtcaaattatattgagactagatagcacagacctaatcggaaggaagttttacctatgggagcacccggatggtactccctgggaatattcctctgtgagtgcctttcaccaggaactcacctgggttacacaactcagtttaattattgcaatgtgaacactcaaagtcaattaataggggagactttgtcattttttttttacatttattaacgaaagaccaaaagctctttaaaaggaaaactgtcacctttatttagtcaggaacacacaattccaacttctttctgggaaaggtcaaccgagacatttcataatagaagcatctcaaagttatcacatttctcctttaaatttgattatatcatgttgagtgctaacatctcaacttacacactgaatagttctggcctctaactctaaaataaagtctttcagaaacatagctctcctatcaggtgtttttaaatgatcctggaaagagctcattcctcctatttgaggctgaggctttattcttcatccatctggatgaacagcttcatccactaaactgcagcaggcattaagagatacctttgttgtttcttttgacatgcttctgtcaaggagatggaaagggattcatggcagagagctcccacccactgtgacacattgaagagcaagaacactggggagctgcttaaattgcttctgtgtctctttagcccacactgtttcctgaaagaaaaccccccacctttctctggcctgtaatggaggctgctgtgttgggtagaaacttcatttgagggctctaagaactagttcagtcttactgagttcagtttcagttaaatgtgacagatgcagtgagatgcaacatttgaaatgtacaacaaaaccaatcctggatacacttctgcttcaatatttacccaaaatctcatacacttacaggcatccatatattccaggggtgactttgggtttaaagagttagaaattttcaactagtccttgaaatatatatgtcaaattttaaatgtatgttttcaagaatgtgtatatactatgcacaaatgtgtagactcaaatatgccataatatttcttccatttcctcttagtttaatgtctattggaaaaaagaaaacatacttttctaccatattaatatctattgaattatgttcacatgatcagtgtaatacctgggattttcctcacttcccattgatgtatttttaagcaatttctacgattatttattaatgatttctaagattattttttaatgatttctgttttcttgatataatattgtctgttttaaatatatttagaaattgccacactttgaaatgtctttcctgtgtatgccattatagaacctgtcattagaattatagaacttctttgagctttattttaatcaaacatttgcatcatttttgcttattttatttgattttagaagagattcattttttaaaaaatgtctttgacatcatttaacccagcaaatgttgaaataagcaattttagtgtttaaggctctaaagtgattcagatgtaaacatacctagattagtttgtgatgaaaggaaagaaaccctttctagctactctggataaatccaggacagactatacttgaagggaccaaataaagacagctgtagaatacaattctgctctctgcataggctgtgaatgtaaccttcaagtcctttagctgttgaatgatgacaacaggttagtaagattcagagtaagaagggagtataatcttccagcttttgttcttcacagggcttgaatcaattaaagtttggtgtcatcatactcctgttaactaacaaaatctccaggaaatgtataattctttacgaagaaaaaaataattattattaactgcaaattaaattactatttctgttttttaaatttatttacttttaaagtctctgtctaaatctctgcctgtcacacactctctctcttcctgtgtgtgtgtgtgtgtgtgtgtgtgtgtgtgtgtgtgtacagccatacttggccagaaaaggtcattggattctctgaatctggagatacagatagttgtaaaatatttgatgagggtgttgggaactaaactctgtacctgagtcttccacaggaaaagcaaagagacatctcttcatcccctagttctgtttcataataaattataagtgtgaagctttctaatggccattactttctctcttacttcctccacaactctctccaatatacacttattcttgcaactcttcttcccttcgtttttttcatatatcaatataatatttatttctgccaattcatattatcaattttatctgttatgaccaagaaatttgattgtcctcagacaggcaaagactactaggggaagactctcacctccaaatcttcaaccaagcaacataagccccatgactggcctggaactgggaaacctatagagaaagggacttgaaattcattacattctcacagatagcttggacttcacatatctctacagttgttattaaatctgacacatccagggctattttcatgttttacagattaggaagtggaagttagtgtggttaaataagtttgtgtgatgctcaaatcagtggtaaaaattgaacataagaccaaatttatcaccaaataaatcaaaccacaagaacaatagtatactataatacaatagtctctactcacatgttaacaactttgtatagtaagattagaaaccacacattgtgctttttaacatattggtgactatatatttaatatgattagctttatcataatgtagctccttgggtcacatatatttaatgctttttatatatgcacttactttagaagtttaaatgcattgaaaagagaaatttagagcaggcacaaactagactttatggattcaaatatgagtaaaattaaaaaatgtgtaaaattaattctcttaaataaccagatatctcatgcctatttcctatcaagccaggtcccactgacctttgtgacctctgttgtaacaaaggcccctttgaaatctcacaaacactgactcccattgtttagtaggagaaaaattgaaactctagttactcttctaaaagaaaagtcttaaatgaacttaataataattattgtcaaatgaaaatgccatggaacacatgaaaaaccttgtctcttacttaattctctataaataacaagatatcttatgcctattctcctatcaagccaggtcccactggcatttgtgatctctgttgttgtaacaaaggcctctttgaaatctcacaaacactgactcccattgttcagtaggaaaaaaattggaactctagttactcttctttagtattttatatattattagctaacactttagtaaatatctgaaagttatatggatattttaaatgtttaaataacccaaagtgctcctcattcaaacaccaaggctgttgcatgtgaaatttgtaaggattgaaaacaatggcacttatagatatttgtaccatattttcttgaaagaaaaaattatatatatacttggcaataatcctagaagccaggcttctatatagtattgcagcatttgaaatataaagcctttctaaaagtatattgtggcctccaaaattaaacatgagaaggcaaaaatgaattgtaaaataaagataaaagcgacactaaaacaaattgaaatttattccatacaatttctcaatttcattttgttttgattttccagacagggtttttctggaactcaatttttatacaaggatagatttgaacttgcagagatcgacctgtctctgcctgccatgtcctgagataaaacatgccaccatgtctggctgcaatttctaaatttgatatgtgagtaaaaataatagaaagcataggtagaaataaaccaacatatggaagaaggtaaagatttttttattgcttcacattcaagacatgctaagtgaaggtattcaagaccagaaacaattgagcttacaaaactgggcccccaaaagaagagacaatgttaaacatatgtgaaaattatcaggaaaaataaaaaaggctaattgagtacctgacaaaagtactgaagagtgaaccaattctaaaccaagacagtgattatagttattaataccagcaataccaacaaaaacaacaaagcattagctttggattgggtggaattaggttaaaaatatgaatgaatcaaataaatatcacagagtaagtgatgctcatcaaattattttaaaaaactcagatctggaactgagtagaaagctgaatcataggactgtttttatcttcaaggatgaggatgcaagtagttctccaagcactcaactgaaatcttggccctgaaacaggagctgagaaggcagaaactataggacacctggggatcccttcctagccaagctagatggatgtctatgaggttcaggcacagacaaggaattcctgtctccacaaaaaagagggagctattaaggtgacctttggtctcttcattcatatgcacattagtgcccatatattagacaagaacaaaagagaggaaaggaaggagggaaggaaggaaggaagaaaagaaggaaggaaggaaggaaggaaggaagaaggaagctgttaattcccttgtaggtcaagtctaataatacagatttcaatatctagcaatgaaaggatgggttccctgaaaggtagtgttgagtcagattgggacaaggtgtctgcctcaggttacataacagtctcattttacttattgtgaacttcaggacaacaataaaatattattaccacagttgtgaatttcattgccatccctatacccttcatggctactaccattaagaaaagacacaattttattccccctttattaaacattgattattttctcatataacataccctgattattcttttccctacttctattcccccaagtttctttctacctcctcccacctttggatttgcttccttttctatctctcattagaaaggaatagactcctaaaaggtaagaagacaacataacaattataacaatttaaaacaaaataattagataaaagttgcataagaaaaaccaacagaaagctaaacccaagaggaagcacaagaaccagaaagccactggtttacacactcaggagttccataaaggcactaaattgaatggtataatatatatgcagaggaccttgtgaagacccgtgaagaccctacctgtgtttgttgcttcagtctccgtgagttcatgtgagctgtgctgagttgtttcagaagaccttgttctcctggtgttctttataccctctgtctccccaattccttcttctttggggctgtctgagctctcatgcagaggtatttgatggacatatttgatttagagctgcatgttccgaggaaagggtcactttctaaatttctaactgtgtagagatcttaactctggaacaagtcagggtttctacaggtagcttgtaggtaaccatgtgaacatattatcacagtattcaaagtccttgttctgaaacagggacaagaggaacacattggaggaggccaaggctacataaagaacaggctcttggtaatgttgtgcttcccaccttctacatagagcatgagacaaatagacagatacctcgcttgtatgttggtatgaaggtagatgattcacagtaagtgtcaacagttgactgaatgttgtcttcttgccaccacttcatgattcatgaaatccatagcttcccttatagcccatgtaacattcttctcttcacttggtctatgaactttgaacacaatctgaaggatggtcttcatatagtctatgtacaatgacttacgtcttcttgctatttagataaacaaaaattaaattagcactttcgcaaacaattcattctacaatcttttttagatgccagaatttatcatttcctatcatcacactcggcaccctgatttttggtgatcttttccctggtaatgttaactcaccaccaacttctttgcttgtaacattgttttttcagaatattacaaatattatcactgactgtcatttattcaatggctaatatccacatataagtgaatacacaccatatttatttttcagtgactagattacctcacaaggatgtattttttttcctagtgccatccatttgcctaattttttttataataatattttcaacagctgagtgaattgtataaatgtatggttttcccctgttttttgttggaggaatcatggttatttctaattttgagttgttatgaccatatcataaatgaatgttagtaggggaagctgtagccatgcctacttaggggctggctacaggtgtgcctgaccacatttgcgagggcgaggtcaggggatgcaggttgactgtgttttctatttcggattatcttttggggcttgcatacagaccgctgccacgccagctggctaggtcgctctgtaagtaaggcttttccctattaaatacccttgtatttctacttgactctgtcttggtaatttgccactatatctggttgtcaggaacggaatattggaaacctaaacccgatttgggacaggctgtgggtttcattgggcctgaggcctaggcacagaaagtgccctctctccacaggcgtttccagctagcagccgacccactgcagctgagctgctcagaaccatccacccggctcggagatagtttttagctgcctagagtggaggtaggcctcggctttcagcagaggaaagccgcatctctttcagtggttgctgtcacaagaccatatactctctaagataagcgcagccacttttgtgacctctctccaccgttgacctactgctgccaaatgcctcggaataaatgaacacctgggccacccactggtcaaagatagttactgcatctggagtagaaatcaggtaaaattatggcggaatatttatcatttgctaaaattgttaatatttttgcttattatgtgaattcactgtttgaggaggatactaatctgccaattaccggcctatatgccgtaatggcagttagcttgctggtacnnnnnnnnnnnnnnnnnnnnnnnnnnnnnnnnnnnnnnnnnnnnnnnnnnnnnnnnnnnnnnnnnnnnnnnnnnnnnnnnnnnnnnnnnnnnnnnnnnnnnnnnnnnnnnnnnnnnnnnnnnnnnnnnnnnnnnnnnnnctgcagcaagtggaacagaaattggatgacaagcttggcactgtgtccaatacgctaaagacagagctgtctgttactcaagatgagatgtagtgtatttataccatgtctgagaccttagaggctaggctgtcagaagaccgtgatgagctaaaaaatatctgtagccagctagaaactcagataggcaatgttacccagaaattagatgcaaagatgcaagatacccaagatagggttgaagaattagacaatgccattcaatcaattattgaagcatccaaggtagcagatcagaaatttgagtctagatttgaatgtttggaagataatttacagtatagggctgggacagattacataggtccatatggtcgattgctgaggactctaaatcagcaaatcatgacctcgaatctagactccaatacctagaaggcagtttccatgccatccagatgctgcctaaggatgatcgtattaaagacctagaaaaacatgtaaatgagcagttagagcaatttacagattcactaacatgcttggaatcttttatgattaaggagattgaaacttttcaaaagaatatcattactacgcttaaagatcattgggtgcctcagaagcagaatcataccaatcccaggaacctactccacccaggtatcatgactattctaaggttgttactcgtacaccattagtgtacccagctatcatggtagaaaagcccgcttctaagaaacaccctcatgggcagatggcttatgaatggcaacctatacagctgaaggatcttaagaatattaaagaatcaggtgtctcatatggtctccatagcccatacgtaaaacagctattacattcatgggcaacctttaacagggtgacaccacagattgggaacaattggtagcagctgtacttgagaattcatgccaaatccagtggaaggcattggtaagggaagaggcaaagctccttgaacgtcagggcataaaggaaggttttgaagcccctctagataagcttcttggtcagggtatttatgctgacccacaggttcaggctgaatatgatgacgatatactgtctctttgcaggaaatatgaatatgaatatgcaggaaagcagcattaaatggctgggataaggttcgtgagccaggagaacgtctagaagcttataccagaatagaacagggacctacagaacagttccaggacttcttacaaaggttaactagggcagtagaattacaggtaacagatccagaaacaagacaatcaattatatatacaatagcttatgaaaatgcaaaccctatatgcaaaagaatacttttgcctttaaagatcagatcagctccgttagaagaatgggttttgtatgcagccaacattgactataatgtgcaagatactggagcttgggtaggagaagccatctccaaaggtttaaaacggcaacaggaaattaaaaggtctagaggtgaggatgtaagggcttggcaaggagaagcaccttacagaggtcaacatagataccaagaggctagaggttactactactatgaaccagaaccttgggtaggaagagccttcccctggagaccacgaaggctccaggaacctagatgtttcaactgtggtaaaatgggacatactaagagaaattgtagacaaatgaattctaacaatgcctcatatggaaggccactgccttctggattgtgtagaagatgtggtaagggcagacaccgtagaagatttgataagggcaggcactggaccaatgaatgtagatcgaccacggatatacaggaaaaccccttaaggttgggaaaccctgagggggtctcaagaagtcccccacatcgagaaaggtcgggtcattcccagtaacagtgggagacagtctctcacaagaacaatagatagttcattgcctattgtgaaaaatgatactgctctagannnnnnnnnnnnnnnnnnnnnnnnnnnnnnnnnnnnnnnnnnnnnnnnnnnnnnnnnnnnnnnnnnnnnnnnnnnnnnnnnnnnnnnnnnnnnnnnnnnnnnnnnnnnnnnnnnnnnnnnnnnnnnnnnnnnnnnnnnnnnnnnnnnnnnnnnnnnnnnnnnnnnnnnnnnnnnnnnnnnnnnnnnnnnnnnnnnnnnnnnnnnnnnnnnnnnnnnnnnnnnnnnnnnnnnnnnnnnnnnnnnnnnnnnnnnnnnnnnnnnnnnnnnnnnnnnnnnnnnnnnnnnntactcggtgatctgcattggactggaaggacagaaagggatactgaaaccatacgtggcagatatagctataaatctttggggtcatgatctcttacagcaatggaatactcagatcaatattcctccactgtcagatacaaattatgtacaatctttagatagtagagaagatctggtaagatgctttggaaaaccgttaccaaccatccatgctgtatagaaattaggtacaaatgttggaccttcagaggagccaaaggccctgctattgaagtggctaacagatgaactagtttgggtaggaaaatggcctatgacctctgagaagctagaggctttagaaaagttagtacaggaacagctagacgctggacatatagaggaatctaccagtccttggaattctcctgtatttgttatcaaagataagtcaagaaagtggagaatgctgacagacctaagagccataaataaggtaattcaaccaatgggctctttgcaacctggaatgccattaacttgcttaatacctaaaggatggcctatcatagtcattgatctaaaagactgtttcttcacaataccgttacaggaaaatgatagagaaaaatttgtatttactgtaccaactctgaataattcacagacagttaggagatatcagtggagagttttgccacaaggaatgctaaatagtcatcctatgtgtcagcactttgtacagcaacctttggaaataattcataagaaattttcacaaactcttgtttatcattacatggatgatattcttttatcagattctaataaggaaactttggaacgtatgcttgaaatggtgaaggaagttctgcctcgttgggggttacagattgtgccagaaaagatacaaagaggagattctattaactatttaggttacaagatagacttacagagaatcagactctggtctaggtgtttgaagtgaaagggaaaaaatcctacaaaggtttcctctcacagactttacattctaatggtgaggtacaagcagacaggaaataagagaaataaatagtatatttgaaaatgatggaagactaggggtaaaaggaaggcatgggatggatacaaaggaaatggtacaggctacactggaggcaaagaagtcctctggggtaggccattgagagagtcgtgttacatattgagactgcagaatttgttcctgataatacagatttaacttctctattcttacaattacaggaaactatcataaacagaagtaatcctatatatattacacatatcagattccatatgggtctgcctagcccactagcacaaggcaatgatgagattgatcatttattaattggaagtgtgctagaagcctcagaatttcataagaaacatcatgtaaatagcaaatgtttgaaaaaggacttctctatcacttggcaacaagccaaggagatagtgaaaaagtgtcctacttgttccttttataatcaaactccattgacagcaggctgtgatcctaagagcattcagagtaatgaggtttggcagattgatgtattccactttgcagagtttggaaatttgaaatatgtgcatcatactatagacacattctcagggttccaatgggctactgctcttaactctgagaaagctgattctgttattacacacctgctagaggtgatggcagttatggggggtataaatgcacaaataaaaactgacaatgctccagcatatgtctctacaaaattggaacaatttttcaaatattttaacataaagcatgttactggtataccacacaatcctacaggacaagcagtggttgagagatctaatagaacacttaaggagatgctcaacaaacaagcttggaagactaacccccccaaacataggttgcataatgctttattaacactaaactttcttaatgccaatgaaaaaggacaaacagctgcagaaagacactggactacggagaaaactgctgaactcaatcagcttgtatacttcaaagatgtactaacttctgaatggaaaccaggacatgtgttacataggggttggggttttgctttggtttccacaggagaagaaaaactttggatgccatcaaagttaatcaagattcgagtgaaaaggaaaaaactctcgaggaggacaaatgacagatattctactaaggtatatcttataaactgaatagaaacctggcaaaggaaagggaagtattttgcttttatcttcacaggaaaactcatctccagaaggcaactgacactccggccagaggttcaggtactgacttcaatcaagttgaggatttcaagggagatcttcaatcaattgaatcccatctaacatggactggatacaattcattcaagactttcactatactaacattttcttcctacaggaccccacatgactatcatcgtcccatttcagcannnnnnnnnnnnnnnnnnnnnnnnnnnnnnnnnnnnnnnnnnnnnnnnnnnnnnnnnnnnnnnnnnnnnnnnnnnnnnnnnnnnnnnnnnnnntttatggttgggattggaaggaggtgttcaggcttggacacctctttcagatgactttagggtttagttaaaatagatagttaggatgtgacataagcagatcttcttatattttacctttatgattgttaattttggatactttacactgttaagttttaatcctcttttagacaaaaaggggaatggtgggggaagctgtagccatgcctacttaggggctggctacaggtgtgcctgaccacgctttcgaggtcatggtcaggggatgtagggtgactgggttttctctttcggtttctcttttggggcttgcatacagaccactgccacgccggctggttaggtcactctgtaagtaaggcttttccctattaaatacccttatatttctacctgactacatattgttaatttcccactataaatgttattgagcaagtgtcctttggtacgatggagtatcctttttatatatacccaagattggaacagctaggtcttgtgtgagatcaatttccaattttctgaggtaccactatatttatatacttaatggatgcacaaatttgcactaccataaacaatagaggagtgttcctcttgttccacatccttgaacattcatttgtgttattgatcataggcaggatctgacaggagttagatggaatcacaaagtagtcttgatctccatttctatgatgattaaggatgctggacatttctttcaatgtttgtggcagcttgaatagtaatggccctcaaagactcatgtgtttggatgcttggcccatggagagtggcactattaggaggtatggccttgttggtgtaggtatggctttgtcttgtcagtggaagtgtgccattgtggagacaggttttgtgatctcaaatatgctcaagctatgtctaatgtggcagtctccttctgttgcctgtagatcaagaagcaaaaccctaagctccttatccagcaccatatctgccttcacatcactgtgtaccaccatcatgatattggactaatcctctaagtgtttgtcaaccacaattaaatgttttcttttgtaagagttgccatggtcatggcatctcttcacagcaatagaaaccctgactaaggcagtccatcacagccacttgagtttactcttttgagtattctctgtttaaaccttcgccccatttttaaattgtattatttttttgcttttgtttttgttttgctattttgatatctagtttcttgagttctttatatattttagatattagtcttgtattggatgtagagttactaaaactattttaacattctgtagactgccactttgctacagttcatagaccttgagaggttatgtgtacattaagggatgtatgaggcatggatcttgctgggacagagaaacagaatagattttatgggtgaacattgacagggggacaggaacaggaggaaaaggtgtcatggcaagggagatggcattcagagagagaatacagggaaagacagctagaactgaggggcaattgaaggatagtttggaatcctagtgtaatagaaacttcctaaaatatatgaaggcaatcctaatgaagtttgcaaagaatgagcaagaaggaatcccagcttccatctcttgtcaccaaatgaggcttctagtactatgactcacttacatccaattgaactcttgataaaagggctccaaaatgccacagaaatcaggttattgctaaaacaatatgttgctctcacagattgacagaagggctcaattgctgtggacaacctccacacaggtcattgaatatggagaatttatcttggtcctacatagaaactttatccctaagatctagtttttttagtataggaagaaattctgcaaggttcaaaaagagaaatgtaaacaccaagtgacaaactctttgatttacacaggtgtcctgcctgctagttatgctaggtcaatggttgcaaaaagcttgttgtggtagtaactgaccaatgtctaatttgaattaaggcccactccctgaaatgaaagtcatatttgctacaggttgatgatcatgaaccagagactagatggcccagaaacctagagtaaaataaaataatactagtcatcaaatggttcggggaaatgataaaattactactgatgatgcaatggtgttctactatactcatagatcagagccctgttcaaccagcatcagagaaagttcctcctgctgctgctgagaaccaatacagagctgtacccagacattatgcagaaagagttactttgaacccacagcccaaatgggatatctccatgaaatctctcccttaagagctcaaggagtcctacagaagaggaataagaaagagtatgagagcaagagacaagggaaaacaccaggagaaaaactaaaacaactctaaaacaattgtgcatagttcataagaactcactgtgattaaagcagtaaacacagggatgacatgggtcctctacgtatatactatatctttattttagtatttttatgggtttcctgggtgtgtgaacaagtgggtttatgattcttttgccatctcttgggctcctttctttctgttggttcgctttgtcaaatttcaatataatggtttttgatttaatccttttacattttgttttgttgttatttcttagaagcctattttttcctaatgagagaaagtaagtgaatatgggtggttcaggaggtatagaagaactgggaagaacagaagaaggggaatatgtaatcaggaaatattgtatgagaaatgaacctaatttcaagaaaggtggaagaaaaacaaatataattactaactacctccatgaaagctttcctgaatacacagatggcatatgcacatacacactctcaaagacatatacactgtcacagacacacacacacacacacacacacacacacacacacacacgctcgcctaaaacaagcactgtatttctcatcctctctcctgtgtcttgtcaatcaccaagggggaaagtcttattgctcttttctttctgtgaagcaggtatttgccaaaagagtgacacttttctttttatagttgagatttccacttgaacttcaggccaaaattgacaatatacattcttcacagccttacatataatgcagtacattacagtctttgaataatgtttgatgatttaggaaaaagaaaatattattttctatatagttatggaaatatctctccagtaaaatacattcacattctctagattggatgtcatcttttcatcatttttattcccttaactattcagattgtcaataaaagtcaactgtattgaattgaattcattgtcaatgctatttacctaacacccataggataaagaggcttgcaatgtatgatcatcttacttatatcatttaccacatacagggactttgtaataaatgctgctaatgtgacttttaaggaaataaataggtacaagtacacaagagatacattacactatacaatagatgcacaatactgaaagtgttatcttatacagacatatggaagcctcagagccaaatagaattgtcttttcattattcttggctataaataaaaagaacacacaataaaacttttaacagtatttttaaacactcacatattaagacaaagttgtatattaattactataatatcactcactgtattgcagaaatattaagtcttaaaaacattttagggacttataaattagattcagtccccagatcccatatggtaggagacagcaaagtactgcagattgtactctgacctccacacgtactcagtagcacaaatgcacacagatatgcaggagtgcacatacacacacacacacacacacacacacacacacacacacacacacaaatacacaatcagtcacaaaataaataagaaacaaagctttctcctctattattctgttttccatcaggcattggaaattactgtcaacagcaatgtaagagactcaagtgacggacttacaatcgaatcatcttcgatcttaactctattttcctgaatacatgatggcattggtttcaaaggagccatggattatctctgcaaaaacaatatctgttaaatattttaatgatacttatttctatacttttaatttattttctggttttctgtccttttgacttcctttatttttattattagaaacatcatagcagctagcaaatttattttttctttttttgttttgtctttatttaagatagactttttaataacattgtatggagacaccctagccccgcccaatagtcctgggacaggtaacaggtggacccgggactcgcccataagggcgtggtgaaggaaagccggggtgacataagagagcttcttaaggggctgcacatggggaccttgaccccttttgttctggctgcgctggctgggttctataacctagctctggcctgtgttttaccttggtgttttctggaataaagagaccttaatcctacacttggcgcccaacggaatttcacgaccctgaaaagccaacgggcacccaggagaatcagtgaattccttccgccccacgagggcattccctcacccgccctctctgcccctgggcccggtgcggcgctcgcgccgctgggacttctgattcccacggcggtatttccacaccactgcataagtccagcgtgcccatccacccgcttgcggccggactcctctgcttcccgtgggcgccggggcacgctgcggctcagctgcgaaaagcagctgtatgattcccaccgcgtgagagctggccgcccgcaggagacccagcctggctttgtctggccctctggctacctgggagaattctcccgggcactcactttaactagctacgtgtgtgcgcttagggcctgaacgcagagctccggcgcacacagcagagggttttcagctttcatccacagggaaaacacccgcttcatgctgctactattccccctgttcccgcatgcctgtctacacctgctgctgccttctgcggccagaccctggcagggtaagcctttcaactctagccctgggcacagccacttgcctgacgcaggtaagttctaaatatttccttagcggcaaaagcagatttctgtgagtcagatcctaccttagatagacgctgtgccacctgctggccggcatgtggttactacaaccagaaatgaaattaccaataaatatggctgcatttcctttgcagttagatatgtataacatatcttatgcttacatgcattcactgctggaggagcaggctgacttgcaaaatattggcttgtatgttttgttagctgtgactttcttgattcacttgtcgttgttcctcaagaacagaaggaagtttgatctctctacccacttgcaggatatacaagccttacgtagccaggctcaaaatgaatcaaaacttacctattcggtctagaaaatcttacatgagaattgtcgaagcaaatcacggattctgcatcacaccttgaatcccttatggtggatgagattaaagcctctcgtgaggaaattctgacccggctgacatatcttgaataagaagacactgactcactccgatccgagatgcacaattcgagaaggtatttcaatcaccctaaagcggttacacacacacctttagtatacccggccatggtggtggacaggcaaccatctaaaaaacactcccaggggcagacagcatatacatggcagccaacccaattaaaagatcttaggcatattaaggaatcggttgtttcgtatggtcttcataggccatatgtaaaacagctattgcattcatgggccacctttaacagggtgacgcccgcagattggataggattagcatcagctctcctcgataattcctgcttaattgaatggagagcattgttcagggaggaaggaggactcctagaacggtaagccgccaaggacggggttgatgcacccctccaaaaaatcctaggagaaggtatttattctgatccacagattcaggctgaatatgacgaccataccctgtccctatgcagaacagcagcatcaaatgcatgggacaaggttcgtgaatcaggagaacaactagaagcttttacaaaaatagaacagggacaaacagaaccatttaaagatttcttagacagattgaccagagcagtagacaaacaggtaacagatccaacaataagacatccaattgtgtatagtttagcttatcacagtgcaaacccaatgtgcaaaagaatacttttgcctctaaagatcagatcagctccactagaagaatgggttttgcatactgcccatattgactgtaacatacaagatactaaaatctgggcagaagaagctgtcccaagaggtttcaacaaacaacaggagattagaagagatagtaacagaaggacttgggaaggaagagcaccttacaggggctcacacaggtaccgtgaggccagtgctcatcgccaccttgacccagagcctcgcataggaagagcacgctctggaagtccatggaggcgtcaggagaatagatgtttcagctgtggtaagataggacatacaaggaaaaattgtagacagagaaattcacgcgacaggtcgttgccctctggattatgtaggagatgtggtaagggcaaacactggactaatgaatgcagatcaactagggattttcagggaaaattattggcgccgggaaactcggaaagggcccattattggcaccgggtaactcggaaaggggtctcgagcaggcccctgccccgagaacagttcgatcattcccagtaacagtggaagacaatctctcacaggacaaatagataattccttgcctatggtggaaaatgatattgctctagagggtagtttaaatagtgatgaagaatcacatgtgactaatgaaaatgacaaacgcgtattttggcaagcttctattaatgataaaaggcctcagttacaaattaaaattcacaataaagttatgtctggtttggtggacactggagctgatgtgactattatcactcagaaatgttggcctaagaattggccacttaaagaggccaatgtacaatttttaggaattggaactctatctagagttcgacggagtgttaactcgatggtttgtattggaccggaaggacaaaaaggaatattgaaactttacgtagcagatattgaaataaatttatggggtcgtgatttattacagcagtggaattctcaaattaacatccctccagtgtcagatacgaattctagacaatcgcgggatagtagaaaagatcgggtaagatgccatggaaaatggttaccaactatccgggctgtacagacattaaatacaaatgacaggcctttagaggaaccaaaggccctgccattaaaatggcttacacgtaaacaatttccacaatctcttgtttatcattatatggatgatattcttttagcagattctaatgaggaaactttagaacgtatgtttactatggtgaaggaggttctgcctagatggggtttacaaattgccccagaaaagatacaaagaggagattctattaactatttaggatataagatagacttacaaagaatcagacctcaaaaggtacaaattagaagggaccgttatcaaactcttaacagtcttcagaagctactaggagaaatatctcaattacagacgatcattggtgtggagggacatgacttaaagcatttaaaaatggcactaaaaggtgataaggacttaaacagtcctagaatattatcggctgaggcagaaaaagacctacaatgggtagaaaacagaatattggatgcacatgtagatcggataaaccttgatctagactgcattctggtcatcttgccatccagagaatacccttctgggattctgatgcagagggaagacactatattggaatggatattcttgccacataagcagaacaaaaagttaaagacgtatatagaaaagatttctgatttgattttaaagggcaaattaagacttcgtcagttgactgggaaagacccagcagagattatagtacccttaactaatgatgagatttcctccctatggaaggataatgaatattggcaaatagctttcaccgactttttgggaacaattagtaacaactatcccaaaaccgacagaattaaattcataaaaaagacggtttggattcttccacgcattgtaagacaaactcccatttctggagttcttaccttctacactgatgctaacaaaacaggtaaggctggttataaagcaggtgaggtaagtaaagtagttcaaagtccatatacatctgtacagaaagcagaattatatgcaattcttatggtgctcatggattttacagaacctcttaatatagttactgattcccaatatgcagaaagagtcgtcttgcacatagagactgcagaatttgtccctgataacactgaactaacctcgttgttcttgcagttacaggaaacaatcagaaacagaagtaacccactgtacattacgcatatcagatcccatacaggtctgccaggcccactggcacaaggcaatgatgagatcgatcgtttattgattggcactgtgctagaagcctcggaatttcataaaaagcatcatgtaaatagcaggggtttaaagaaggacttctccatcacttggcaacaagccaaggagatagtgagaaactgtcctacttgttccttttataaccaaactccactgccagcgggatgtaatcctaaaggccttcggaggaatgagatctggcaaatggatgtttttcactttacagaatttggaaatttgaaatatgtgcatcataccattgacacattctcaggtttccaatgggctactgctctcaactctgaaaaggctgattccgttattacacacctactggaggtgatggcagttatgggcataccggcgcagataaaaactgacaatgctccagcatatgtctccacaaaaatggaacagtttttcaaatattataacattaagcatgtcacaggtataccacacaaccctacaggacaagcagtcgtcgaaaggtctaacaggacacttaaggagatgctccataggcaagctggtaagtcaaaacctggcaatgtgctagaagcctgggaatttcataaaaagcatcatgtaaatagtaagggtttaaaaaagggcttctccatcacttggcaacaagccaaggagatagtgagaaactgtcctacttgttccttttaaaaccaaactccactgccagcaggatgtaatcctaaaggccttcggaggaatgagatctggcaaatggatgtttttcactttacagaatttggaaatttgaaatatgtgcatcatcccattgacacattctcaggtttccaatgggctactgctctcaactctgaaaaggctgattccgttattacacacctactggaggtgatggcagttataggcataccggctcagataaaaactgacaatgctccagcatatgtctccacaaaaatggaacagtttttcaaatattataacattaagcatgtcacaggtataccacacaaccctacaggacaagcagtcgtcgaaaggtctaacaggacacttaaggagatgctccataggcaagctggtaagtcaaaaccccccaaacataggttacataatgccttattaacgctaaactttcttaatgccaatgacagtgggcagacagctgcggaaagacactggactacggaaaaaacagctgaactgaaccaaccagtgtattacaaagatgtgctgacctcggtatggaaacctggacatgtattacgttggggtaggggttttgcatttgtctccacaggagaagaaaatctttggataccatcaaaattgatcaagattcgagttgaaggagacaaccccctcgacaaggatgactgacaggtattttctgaggaactgccctctataagtcaaaggacattacatgtatggatactcaaggaaagaacgtagctataaccatcgaacaaaaggaacgtgatatacggtaaaaatttacagctgtctctcgaataactctatgtctattcatttcctggtccctattcaactaaatcgagactggatttagagttgggtttggctttcctactctaaaatccaagtatgttatttaacaacatttaaaagtttctgtgttatatcaagaagccaattgctataatacagaataaataagaataagaggactatctttgtttttcttggcttttcttttacaccctctcagaatcgttgttagtcaaggttcatggctgggttctataacctaactctggcctgtgttttaccttggtgttttctggaataaagagaccttaatcctacataacataaaacaaaagctaacacattgggataggacaaaccaagaaaaagggaggaaagaaactatgagaaggcataagagacagatgtaggtacagacacccacatgattgcatcctaaggaatgccataaaaacaaaactggaagccataacacatatacaaataacctgtaggataaaaaagaaaagaaaataaatgaataaatacaaaataaatactcaaataaattaaaaactaaaaatgaatgatccaggctacactgtatataaatatttttcccataaacaatttccatttcttggcaaaataaatctgtactttcatgtgttttctattggcacataagtaataaacttttccatatattttcttcttatatattcttctctcataatatataccctgaccacaacatctcctccttccattaccacccttcctcccctcttccctccctttaccctcagaacagagcaggcctcccagagatataaaatgaacaaggcttaacaagaagcaataagactatgtacaaccttcatatcaagtctagatgaggtaacccagtcttgggaaaaggaaaatgtgaaccaagagcaggcaaaaatttcagagaaagccccactcccactgtttggagtcccacaaaaacccaaaactaaacaaacacagcacaacctagcacagacccatataggctctgtgatggctgttccagtctctgtgtgccactggatcactgatcagttgattctgtaggccttgtctttgtggcatccttgacagctctggctctctcaagcttacccccattgcttctgtggggttccctattaggggccttggaagtatacagcagatgacaactagtgttcagaagtcaacccaccaaagcagtgattctctgttggaggaagatcctatctgggaaaggactgtgggatccctgactgtggaaactattactcctatcttagtttcacatgtgctttagtgtatccccaaaccctgctttgtagtgggtaatctattgtgatgtatatatgtaatcttttgattacacctgtgtcttgtaggcacgtatatatataaatggtcaggaagatgacttctcatgaagctgtatgattttgatatatagaaaatatactaggatatgcttcataactagatctattgtttcacaaggactgtaagtcttaaaagcctgctttcttccttttcatcatactaatatcagaaaacaacaatttcctctcagtctaagacaagtgcacacaaattgctcatttttacctcagaccaagttcaaactaaaataaatgtttttttgtaaatgaatcagaattcaaaactttacaattatgcacaaggtcatagtctcaggtgtctaacgaagattattaacacagagaagcaacaaaacttcatgtcaatttctcacttgcctagtccagctgataaaaaaaaattatagctcacagcttgtctcattaggccctgttcccccatcatctggacacagtcttacaccagtttcttaaaccttgaaactttgtgttgccatttaccatgttacagtgactcttataatttttttttaatgttttaatcctcttggaaaagatgttttttttaaagtaggtgaacattgaagcagaggaaattgaagcaaaggagaactagaaagaattagaacttagaagaaaattaaaggacaataaaataggcaaaagaataaagcacatgactcagcatgtgtgttccatattctgtaacccctcagattagaaatattctaagttcctttcactatgctgtggcttcttacttgaaccctggaggtagtgttgggaactggactcataagttaccattagttatcaagctctgcataatgttctggtggctgtatcggctcccatcacctgctggaggaagactctctgatgacaactgggctaagcactgatctataaatatcacagaatatcactaggaatcatttgtttgatttttgccatttatgtcagtcatgattggttctaccctaggtttctgggccttccagctcctagttcctgacaatccaggcagttttaagtatgggatccattttgtggcttgggcttcaagttagatcaggtatcacttggccactcccacaaattctgagccatcaatgaccaacacagtttgcagctaggacaggttgtgggtctaaggttgtgatacatggttggtgtcccatatccaccacagaaagcctcacctgttacagatgatggcttgtttaggctccatagcctgcattactaggcatcttccctaggtctccctcatagatttgaggaagtttccattgcaaatggtttccacattgcttcttaaataccctgtattttagtcatctctccccatacactctccctccatcacttcctccttcaactgatctcttctgttaccatccccaccttccctcaaaccacctacaaaaacctattctatttacccttcccaggaagagataggtgtcccccctagatccctccttgttacccagggtctctgagtatatggactgtagcattacttaactgctaatatcctcttatatactgtttgtatttctgttctgggttgcttcacttggcatttttttttctagttccatcaattttcctgcaaattccatgatgtcatattttcttttctttttctttcttttttttttttttttttggttttttttcgagacaggttttctctatgtagttttggagcctattctgacactcgctctggagaccaggctggcctcaaactcacagagatccgcctgcctcagcctcctaagtgctgggtgatgtcatattttctaacaactgaataataatactccattgggtaaatgtccattctttggtggtagagatgatacctgaaatagcctacccatgtaaacagattgatgaatatcccaactatcattatagagtcctaatccagtaattgatgagagatcacagagatacacaaccaagaaccaggctgtagtcagggaatccagtcaaagagagggaagagggaacagatatatgagcaagggaggtgaaactcatgatggagaagtctacatagataactgaaccaagcttacagaaacacataacaacagatttaccactttggaggctccacaggatagaaattgtcccttcatattcaggagatatctgtgaagcttggtctatcagagggtcccctggctgtaggaccaggatacaaatatagtacatgagccagctttttggagctcattgcatatgatgggatgccatgatcagtcttaatgcatgggaaaggggcctggcccctgctccaacctattgtgccagactttgttgattcctcatgatagcccctaacagtgaggagcagtggacgaggggtgtcttaggggtacggtgaaggggtggtgggaggtggtgagggggttgggaggagaagtgggatacagaactatggttagaatgtaaaatgaagtttaaaaagcacaaaaaaatataagtagcctggaagagcagctcttaaggttattcctagggtttgaagaatatcttcacagcatcctgaaactgaatttaaagggtttttgttgttgttgttgtttttatctgaagggtatgcagtaaatgcaccaatgagctgttcaggtcatattctttatttttctgtctattcttctgtcctttaatttccctagtgtgagatttctctttaaacctataattgcttgctctattatggaatctctttacttgctctcctctattcttcccctgactcaatcttcctgttccttcatgtcctcctctcctatcctcttctctccttctctttctcataactccctctctcctcccccatgctcccaattggctgaggagatcttgtccctttcctcttctctagtggaccatataagtctctcttaaggttctccttgtttcctagcttctctggcagtgtgaattgtaggctggtaatcctttactctatgtctcaaatccatatatgagtgagtattagtgacttggttacttcactaggatgctttcttctagatccatcaatttgcatgtgaactacaagattccactgttttattttctgctgagtagtaatccattgtgtagattacaacattttctttatccattcttcagttgaggggcatctagattacttccaggttctggcttctataaacagagttgaacagatatccttgttgtatgcatgtgcatcttactatgttgatcctgcctatacaagaacatgggagatctttccattttctggtatcttctttaatttctttctttagagactcaaaattcttacggtacaagtatttcattttttggttagtgatgtttctctgatttctttctcgaacaatgtgtcattggtaaatagtagggctactgattttttttgagttaatcttgtatccatcagctgtaggagttccctggaagagttttttgggtcaattatgtagtctatcatatcatctgcaaatagtgagagtttgacttcttcatttccaatttgtattcccttgatctccttttgttgtcttattgctcttggaaaacttgccaaaagcaatctacagattcaatgcaatccccatcaaaatcactattaacccacaacctacaaacatctggtttttgacaaacaatccaaatatatatgctggaacaaagagaacatcttcaaaaaatgctgctggcataactggatgcaaacatgtagaaaactacagatagacacaagcctttcaccctgcacaaaacttaagtcaaaatggataaaacacctcaaaataaacccagccacactgaacatattagaagataaagtgggaaatacccttgaactaattgatacatgtgaccacttcctgaacataacaccagtagcacagacactgagatcaacaattaataaatgggacctaatgaaactgagaagcctctgtaaggcaaaggacacagtcaacaaaataaaacagcagcccacagactgggaaaagatattcaccaaccccacatggaagagataggtgtcccccctagatccctccttgttacccagggtctctgagtatatggactgtagcattacttaactgctaatatcctcttatatactgtttgtatttctgttctgggttgcttcacttggcatttttttttctagttccatcaattttcctgcaaattccatgatgtcatattttcttttctttttctttcttttttttttttttttttggttttttttcgagacaggttttctctatgtagttttggagcctattctgacactcgccataggatgtggagaaagggaaacatttctccactgctagtgggagtgccaacttgtacagccactttggaaatcagtatggcaattcctccagaaaatgggaatcagtctaccacaagattcagcaattccactcataggcatatacccaaaagaagcacattcatacaacaaagacatctgttcaatgatgttcatagcagcactatttgtaatagccagaaactggaaagcagcctacatgcccatcaacagaagaatggatagagaaattgtggtacatttacacaatggagtactactcagcagaaaaaaaaacaatgtaatcttgaaatttgcaggaaaatggatggaactcaaagaaaccatgaaaccattctgagcgagataacccaatcacaaaaaaacaaacatgatatgtactcactcatatgtggattttagacatagagtaagggattgtcagcctacaatccacactgccagagaaactagtaaacaaggaggaccctaaaagagacaaactttgtaccctggagaaggggaaagggtcaagatcccctgagcaaattgataacatggcaagagggtggagggagctacgagaatgagaagggaagaaaaggaagaatgcagaggtcatgagggagcagaaaggttgagtcaggtgtggattagaagaaaggatatgtgattggtagagttttagttgtgggggtggtaggggaggaagggatggagaagggaattagtattgtcatgtaattcaatcttttgacagaatttaaaagaacagtaataaactttatatggaaaaaaagaaccaagatagccaaaacaacactgttcaataaaggaacttccagaggcatcaccattcatgacttcaagcttgattatagagctgtagtcctgaaaacagcttggtattggaacaaaaatacaggtactaatggaatcaaactgaaaaccctgatattaacccacacacctctgaacacctgatttttggcaaagaagctaaaattcttcaatggaaaaaagaaagcatcttcaacaaattgtgctggcataactggatgctagtgtgtagaagattacagataggtccatatctattgccatgcacaaaacatatgtccaaatgaatgaaagacctccacataaatccagccacactgaacctcttcaaagagaaaataggtggtgtacttgagtgaatttgtactggagaccacttcctgaacataatactagtaaaacagtcattaagatacacaattaataaatgggacctcctgaaactgagaagcttctataaggcaaaggatatagtcaacaagacaaaatggcagtccacagattgggaagacatattcaccaaccccacatctgtcagagggcttatttgcaaaatatacaaagaactcaagaagctagacaccaaaacaccaaataatccaattaaaatgtgatgtacagatgtataaatagataatctcaatagatgaatctaaaatggctaaaagacccttaagaaagtgctcaactggactaggaggcatctggtgagtcactcctactcaggtgcaaacctggccactggctcccttgcatgagtactcttccttaataaactacctgttaacaatctatttctgactccaatttgtaaacctctaaaaagaaaaaaagtgttcaacaacattaaaccactggggaaatgcaaatcaaaccaactctgagataacacattgttcctgtgagaatggctaaaataaaaaacaactatgacagtttatgctggagacaatgtggagaaaggggaacactccaccactgttggtgggaatgcaaactcatacagccactttggaaatcagtatggcagttcctggggaaattgggagtcagttaaccacaatatccagttattccactcttaggcatatccccaaaagaagcacattcatacaacaatgacatgtgttcaactctgctcatagcagcattatttgtaatagccagaacctgaaagaaaactagatgtccctcaactgaagaacggatggcgaaaatgtggtatatttatacaatggagtgctattcagcagaaaaaaccacaggaatcatgaaattcgaaggcaaattgatggaactagaagaaaccatcctgagtgaggtaacctagtcaactggtatccagttgcagagagggaggagtgatgagcaaatgggtcagaaacagactggagaaacccacagggacagctgacctgaagaagggggagctcatggaatccagactgataactgggagtccagtataggactgttccacaccccttgaacatggatgccagtttggaggtctgtttaatctatggtggctctggtagtggatcaatatacatccctagtacacaaatggactttgggaccccattccacatggagggatactctctctgcctagacacaagggggaggttctagaccctgctccaaatgatatgacagactttgaagttcctcctccttgaaggcctcaccctcttttgggagcatataggggatgcaatagggggttggtggagacaggggaggaggggagggagagggaactgagattgacatgtaaaacaagcttgtttctaatttgaattaaaaagcaaaaataaacatttatacttatatgtggatacaatgtatgtttataatcatatttgttggagatatgccaaatgcatgcaaatgtcagaacacttattcaaaagttctgcagtgaaatactgtgaatataccttcattcttgccagagagatctattcacaaaataatgttggaattcagtgtgcataaacccactcttaggggagagcaaatgcaaatgaggtaaaataagtttgtccttgttcttggtgtttcttagaagcaaatgaattagagtgaaatatgaaaggacaaagcactataaatagcaattaaagagcaaatccttttgagtcaatttaaagaacagaacttgattctgacacttcctaactgtacagaagcagttgccaataacatagctttttgacttctttactttactttcctacaatctagaaataaacagttttccttaaacacaattaggtaatgtatgcaatgcaaaacaaaatcttgattttctataaacattctaaagattcttgacatttcttagacttttccatgaaaaataaagtgggaatggatgaaagggaaacatcaaatggtttgttttctcacacacaggaccggagatccctcaccttgaagaaaaatgtcatgcttcaagcaaatgtgctgggtactgtgcactcctttgttaatgaagtaaaatccattttgatctctagacttttaagcaaaataactttacctgggattcaagagagtaaagttccacttacagcagagttttattatgatcctcactcaaactttacagcagaatgcatgaaagacagttctctgctactctctgaaagggaagaagctggatagcatttctttgggttctgtttacactgcatggtgaaccagccagttcgccatggtcccttagggagcaactgatgggaattagcatcctctgctaaaattagaacacaatcccatctaaaggaggtctgtcattcagaaaacaatgttggtgtattggacacatttgtgattttatgagacccccacatttcacttaagggtcaacaagaaacttcatagtgtactggggcacttgcaggaatcacctggaggtgtgcacctcaaatcatttaaaaaatcgccacatttaaggaaatgtcacagtgtaatggggcacttgcaggactcacctgaagtgtgcacctcagatcatttaaaggaaagcagtgtgttttgtcactgatgcaattatgaacaggagcaaatatttagaatggcattacccagatatagatttagaaaacaaacaaaaacactgacacctacaagacagtaagccccatggttagctcttggtcacagaaaagatcacactagaattgtaaagatttgtcatccagtcttaatcaaaagactccatcaactatatatttatgtattattgatcccactcacatattgtcaattttagcacattgtgataaaaaattgaagcagggtgatgaattagcaataattcaagttttaaaatgagaatttgtatttttctcaaacaagtgaacaacatagaatagagcacatcaaatgaaatctatcctccatattttgtctcatagtataacagtcttttaccaggactaacacgtgaataaaaaatatccaaacacctgtgaaatgtgactgactataagaagattcagtttaatctactttaaacaaatcaataataatcaaagatcacattgttgcatctaatttaatattatattgattgcaagccttatgactttttaaaataagttaaattttgatacaacaaatgtccttgggaattgaaaaatgataatacataattgaataggctataattgaaggaacatgaaaaatgcttcaaaaatcaataaatacactattcaaaaatagacacaccactataacaatttctaaaatatggatttaaatgaacataatcatatattaatataatattacaaaattattaggaaaatctctaaattctttggaagaggtataaaacctaatagttgtgacataaatgagcagcaggcagttccaaaaggaaggcagtattcaagaaagtttgctagaatgaaaggggcaggaggccaagacgggacttgagatgagtagacagaaacagtacaacacatggacgtctaacatgatggtgccttagaaggaaggtgaggagcttcattatgattgaaaggaagaaagacagagaccatgagaggtggtagggagcatggacagtgttctctcagaggaaatctgtaatatgttgtcacaggcctttctataaagcaagtctgcagagtaaaggataggtttaacatttaatagttgttaggagtgccatgaaatttcacagtatatgatttagttaaaaatattgtgtatggtcaagagcactgaggatccaactattggagctgctgctatgcctctgcacagacagctactatctcccaaagaaagcagcagggaggtgcggtctaattcttgagatctgccctaaagctgcagtcccatgtccagcactggtcacagtcactgagaaggaagcaccaataataacaactgtaggaattgtttctcttctcccctctactttcttcctccctcctcttttctcctcttcctctccttcccctttcttgctccgcaattccttctcccccttttttcttttcttcttttagtacaatgaatgacaagttcacaatatcaggcttactcatgcatattaactacttcacttcccttctggaatctctgttgaattaagcactgtatccctgcagtctaacagatggaatttcacattcttacctctatcacccattagcctaactttttctttgtgttgtttcacttaaactttttatccaattttctcctgcagttaaaccaaaaagaaataataccacctgatacataaggtatcctgagaactagttcttttgaaatgtgaaaagttttaaatacatagaacatggttgacccaaaatgacctcagaacaaagttaactttcattattccttcttcctcaaatacaagaaatatagactatttagaagtattataaatcataacattaaaatctgcagatccaggaatgtccacatttcctatggccctcaaatgcaaactgtttgctagttactaatacagtgctgagtagaagaataagaagtcacttcctactcagccaaggctacttctcttttcatgtctaaatgtatgtacacacattaaacccccaacattttatagcatgatgtatgttttaattgaacaggtaaacctgctgttttagatcaatccagagatactgtgagtaactggatttatgtctactttctttatttctttcataatttctcctatagactcactatttttcaaattaagtgctttagggtttttatgagtctatgaaaatgcacataatatgccagagatatgaatagcctacctcagatcacatagtaagaaatgcactaatattgagcttaggtctggcaattctgaatataatctcagtactattgaactaaactatcttctctaaaggaattactatgcaaaaaccaagtcagtgacttttgggaaatcagggttgtattcgaaaaagatattacatacactgtagtatttgggcacaggaacttttctccttaaatatgaagtagctctcattcacttagtgtaactgacagtgtttgaggggaacctccacctgttgctttagagcatctaattctcttctcccagatgaggctaatgtaagaacaagttgctgtctgtatgtgtttaagcctgtgtgtgtgtgtgtgtgtgtgtgtgtgtgtgtgtgtgtgtgtgtctgttgcattttcctggcaggtaatatagaagtgatactccaaatgaaattccaatatctcaatccaaaattaatgaattaagtaatttacaccttataggaggacaaattcttttatttctaattatttactcagggaggagacatttacaaggggccagcagcacaacttggattttctgttttttcccttatttccttattattcataatctcatattttccttctaaaagccagcatcttgcaggtggggactctaagtaatgggcatttgtagattatttaccttcatggtgaagagctataaaggttcatgaagcatggatcatgaaccactgctttacagtcattggtaaaggccacctattcaaaagaattttgttcatttgccttaaaactttaagttatcaaagttgcattatgaataaaaaacataaaaaggaggggaaaatgtgcaagtttccatgaatgaccatggatgtctctcccagtatggagattattgaccatctttgtaaaagttttaaacgaggggttaaaaaacctccctctattccagaaactttatatttaatttaaaaacataactaaaaaacaagtaaaatactctaaaattctttttatttaaactttccttcctttctttatcatccaaagcatattttttttttttacaaatatctacctatgtttgtattgcatgaaaagtaaaactaagctagcacactgattctttaaggtaaacctgttccagattaattcacctagtgctgagagagaagagttagcaaagcacagcacagcatatccttgtttctaggaaaagtgctaagtactgcagttcccatgtagggataatctctcagtctaggtaaatggaggagggcttaggccctgccccaaatgatgtggcagactttgatgatcccccatggaagaacttaagttccctagggagtagatggggggtgggatgggggagttgttggagggcatgggaggaaaggagggagcagtaactggagttgatatacaaaataagattgtttctaatttaaataaaaatttatataagaatacaagatgcagccctcttcaggctcagtgctggggaaaaccttttgaggtagttcactgtgctgtcttgatttttcccttacttaagtgatagatgtaatatttttaagggatggaaaatagctgatgctgcttcttattcatgtacttaagtccaaacctgcatttgacagaattagaagattaaacaaagatttgagaagtcattaggaataaagacaaagactttttatcaatggaatccatgaacttctaacatggaaatagatataagttagtttcttccactgtgagaccactaagagaggatgctaatgaagggacaaaaatgaagcccctcccccaacaaattactgatcagcacctaggtacttagaatccaaccctctagctctgtaagaattccctaattgcttctgatccattaaatttattttaaaattctacacaaataaatttagacaataacgaatacactcttctcatatgactaaattaatatcaaaagtgccatcctgtattctgaggttggtagcaaatgatatatcactgaatatgaatgggttgtctgactaatttgtgcctcaaacacgttggcatagtaaatagctcaaatactttgtggcacagaatctctgcctctcattcatcttttctatgttagtaaaatcacattatttgaccattttccattttgacttatagaagttactgtaccaaaacaataaacatattgtttgattgtgtctctatagcactgagtattggctatagctcctatcctcagcatgagtaaagaaagtgattagttaattaatttacggaatttctttgtaggaaagccaactagacccatttgggctgacttctgggcccctagtcataaaacactggatagtgtttaattaagtgtggcaacataaccactctcttcatactaacaggatattggccagctttctacctttgttctgaaaatgtacttgacatattattaaaaatataacacgatgcattttatttttttattctggcttactgaggtttagaagaaaaagtaaccagcaagacttaaacatataaataatcaataaacaaagttataatattagttataatggtaaaccatacctatctttcatttggatctaacattggtaagcatctgaaagctgcaattgtacgattacttagatgtacttacaaactaataatctttaagggctgagtgatgttattatctaaacaggtaatgaagttatctgtaagcttgaaaaatgccccctcctttataagcttatgctaaaatgtatttggttgaatatataaatcctcacaatgaattatttgtgaaggaaaatggtacagctggctgactttgaagggaccagctccccattttggcagccataacagccgaacatgcacttgcctgaccttgtcttggtcactaaagtcagatgcctgcccctttcgccagccataacagccaaacacgtgtttgtctgaccttgtcttagtcactgagaggtcagacgactgtctcatggcaagtaaccaatcagaagttagctggtggtgctatgctttaccgttctgggtgtgctttatgcacaagtgcacagcaatgatgcacagagcatagcaaccacccttggagggcttatggcctataacaaccagttgactaatcaacacatggcaaaccctccaagtctggcggcgcaccaatcctgagcctgtgcatacccctggacactccccttatgctttcctacaaggtctctacccagtctcttcgagctgtctttccttgtcatccatcatgatggatggacagaaggcctgagctaacatggggttaatttgttaaacaactataataagcctcatgcagtttgcattgaagggaccaactcccaatttcggcagccataacagtaacacgtgcttgccataactttgccttggtcacttagaggtcagatgcctgcctcgtgacaagaaaccaatcagaatttagctggtggcgctatgctttatgaccctgggtgtactttacggacaagcacacagaaatgacacacagaacatagcaaccaccctgggagggccaatgggccataacaaccggttggccaatcaacacagggcaagccctccaagcctggaggcataccaatcgtgagcctttgcgtacccctaaactctccccttatgctgctctacaagattgctctgcagcaggttaaaactgtcttttgtagccaacaccatgggggtggacaaaagacccgagctaacatggggttagctcattaaattacaataaagcctcatgcaatttgcagcaagctcttgaatctgcctggtgattggggtgaccgaggtcgtggcctgggaccccaaatacctgagttttctgggggtctaacagcatcatgtttctgcctacagatggtgattggggtggccgaggtcctgagctgagatcctggaagcctgagcttctgagggtcttacaacttcaagtgcagtttgttgtcacagttttgtttttgtttatagctgtcaggttactaagtgttgggatgctttgtatcagacaattcagaccctctgagttaatacaaactgcattatcagaaaaggatgttcatcttccttcaggggagattccagagctctggcttaatgaagttctgacaggaggaatttgaggagagaaattaatgaaaagtaagtaaatattttaattaaactgtccaaaaactggacaccaaagacctctgagtccacagaggtccttgcatggtgtgaaattctatgagactaagaaaggatgatctggaagtagatgagggaaaatctcacataggacttggagacactcattctcaccagcaatgtgaaactcttaagcctgtagggtattcatgggaaaccctagaagtccttttccatatgaacactgatattctaattattaactaaaaggcagtctccaccaataaatgcctaacaaacatcagagtacagagaagtaactggaagatgatatacatgactagatgataaggacctttctctatcctcaaggatggcaaacaggcttctcggtgaatcaagatgttcttcaatatggggaaactatctactagggcagagctgaatgttcattaaagaaaaaagaacctcttaaatttacaatatttaaatatataaacctatagtacagctgtaagtttaaaaaacaacaagaaaatttctagactcacccatgtatccaccaataaataaaaatataaggaaaactgaacatctgataaaggtgcaggaatgatgaaataagtagtcaagatcttcaaagtggttgttgggcttccttgtatagtgttgcttagtgtgcatgaagaccttggttaagattccagaagttggaagaaaagctgtgacaatctaaaggaaaaactgagcagagtaagtaaagcaattgaggaagtgctaaatcaagtgttaataatcacacaggcagacaggagctgtttatagacagcaaataccagtagccttgaagatttaatcatagaatccaccttaaaacatagaaggttttaaaaattaggagcctgtctccagcagcctgtccatggtttccagttgtataacttgtgggggaccaaaataattatgctatggaatattttgagatccagccttgggtttccctaaacaggaaaaccagaaagctcgggcccactattgtattgttaatgccagtaaggctactattgtttaccatggcctcagggtaatatgcctcctatttgcatctctgtgggcctaagcatctgaataggcctgcacctgggcagagatgctaggggtgtgagtaacaagggaggacagcagttaagggcaagcgactagaggagaaaggagaacaaggagagaaatggttcccttgtggtaaggaaaggatggttaagagacagcagaaaagaaggttaataaagaaatgactagttctacaacatggaactgaaagctctctcaagatgacaagatgcctgtgtttggtctttatcactgctgggttgctaggagtttccagatccacacactcccactctgactgaacctcatggcttaaggctgagacatgctgggtcacaacaataacttcgatagaattcatgagatgttaacgtatctaagacgggacatgtttaaagaagacctagtgaaaagtttccatgtagtaagttactacagagagcagaatagtgtggaaacatgaagatttgacaaagaagctccataactgattaagcattataataaaatgctatgcaacagctgtttgccatggtacgttgtactgaggaaggggtgtgcaaaatctcccaaaacagccacctaaaaaggctgaaagtgtgccctggaaaccccaattagcatccagcagaaggcctttgtcaaatcacaactgcatgaggaaagcaggctggatatcagcctacaagatgatttgcagggctgacccaagctgagattcaggaactatctcccaagtgactcagtgaagtacttccaaattgagctttccccacattgctgacctgataattgaaattgttgcttggaagtatgaatttttgatatacaaaattggataattagtacaataattaaattttgtaattaaaattttcacacatatggtttcacaacctgtagcctgagatggctttattagcagattccactaacatttaaatacagaaaattctagtcttacagaagtcatgataaggggatttatttctaacttgtgatttacattttaaaaaatgtaaagtttggggctagagaaatggctctgtgttttttgatcttgcaatggccccaggtttggttcccagcacctacatgatagctcacaactgctggccaattccagttagggagatcagttacactattctgtctcctgcagcctaaagaatgctcaagctgcacaaacatgcacatgggcaaatagatgtacaactgttagacccctgcaaaaactcaggtatccggggacccaggccatgactgaggtcaccccaatcaccaggaagattccagagcttgatgcaaactgcatgaagctttattgtttcttaacgagctaaccccatgttagctcaggtctttcacccacctgccatggtggatggctcgataaagacagtttgaactggctgctgagagatcttgtagggcagtgtaaggggagtgtctaggggtacgtacagggtcacgattggtgtgcctccaggtttggagggcttgccctgtgttgattggccaactggttgttatggcccattggccctcccagggtggttgctatgctctgtgcatcattgctgtgtgcttgtctgtaaagtacacccacggtcataaagcatagtgccaccacttaacttctgattggtttcttgtcacaaggcaggcgtctgacctctagcgactaagacaaggtcatagtgagcatgtgttactgtcatggctgccaaaatggggagctggtcccttcacaacttctataatgatttcaatagtgtaatatttttatgaagtatataatttgcctggttataaatagaacgatgcatgatatattagtctgagaaaatattttttttttcaggaaatcagcattgtttgataatttgaaaatcagtgtaaatgaacatattaattgattaaaggagaaaaggaaattatcattatagcttcagaagaaaacaaatggtaagtttagtatccaagaaagaaaacttgccttagcaaattaatattctcccaaattacatacacatatctgttctcattatatatacttaatgggaaaatttatatacaaataatttatttccattttatacaaaaaacagattactatgactattttataattataagatttatatgtatggtatattaatatattatatacaattatatgtacaatatatgtgtatatagtttaaatgtatcaatgatatgtatatgtatacatatgccattgtgggttaagagagatttttagggagtgtacaatagaataaaggtgatatggacaggtaaaggagaataatgcaaggaggtttaaatgataatgtggatggggtaaataggaaagagaaagagatttagaaagggacaattatccctgaagatgttttgaaaaagccacatggaaagctgcacacctctccctggtcctgccttgtctaacatataaagtgacatcttgaattgtcatatgtggaatgaagcaactgttacccataacccaaagtgtccttcttcaagcaggtaactgaagtccttccaggaagacatcagcaagtctgactatcaaatgagagaaggccacagtttgccctggttcctgtgactaatgtaaaaaaggcactgaattcatttctcggttaattctgaaattttcaaggtaaacttgtgaccctcataaaattccctcaatttccccaattttcacaatgaactgacaaggcaaatgagattcaggagatcaaggaaacattgaatgccacacaattgtaaatagccatgaggacacagtcatgctggccacatgagaaaacacccagtggtcagacacttttaatacaggagtccaggtaatacagagagcctggacacacttcagcaaggctgtaaccagatgtatgaaagtgtcaaatactgcattgcccagagtcctatgagaagataagaaaaccactaagttattttatgttagcatggacagacctggaaaacagtgttgaatgaaaatagcaaataaatattaatcctagcattccatgagcatatgagggctttatatatcttctgcaatatactgctgcagtttcttttttcagttcttaaagttttcattgtgcagaatcttcgacttctttggtttgatttgttatgtttttttctttttttttttttaggttactggtaattttattatttactttattagtgaattgatggcaaccaatcaaaagtacctttcaggccacaactcatgttattgtgggaataaagatatgtgataagcagagccattcctttacatgatgtatccctaaaacctgaccagaaattgtgacatcaaataatcactgtaagtagaaagaaactcagtcttccctaccagatgtcactagacagcatcgtagatttgaggaaaacatttaaaaatttgtgtactttaactttctgactacaatggatcagagacttgtatctccatagttttttcttttactttgaaagtcttatttataccattattatgatagtacaaatccctttcaagtttgtccttaattgcaggagaaatctaagtaaattttcagtgcaggcaggtaaccaactatatactccgtttttctctggttatgtaattaacaaatatgtactctagcaatctcacatgatttgcagtgatttttgtatttattgtcttttaaaaactgtacacaaattgaattcagtggatttccaaaaagagaacatgaagttatgtggatgggatacggaggtaaatcgggcagcagtggtataaacattgtataaaactctcagagttagtaaattagaatcactgtcaccctctgaacagctctcacttactattgctcagcggtcttcacttacataatttttatctgatatattagacttcagtttttcatagtgatgcccacagagaatggcatgtgaatctctaagagctacatatgccagatcgtgagtcaataaagtccattgtgccctattaacctccacaggtgacactgattctgagaactcactattttcctttccaacatcatgtatgtttcaggctgcatttgttgtatttaaagtcaacatagagaagcctggatgtaattacaatttttaacttttgttttagcttaaatcctttttagatgctttatttttccttccaattttacattagaacacctgaaagataattggacttgtcctgttggctgagcctcatgtattggcatacacttagttggtataattgctttattcttcacatgtgctgggtacagaatagtaaattgttcttgctacagatgcctctgtgcatgccttccccatgagagctagttgagttccactttctggttaatagtaagacactccaggctctaaaaacctcagtggggccttggttgcacacactcagtgctgaggctgtggaacatttccttcagagcatgctgtagcttccattgccttttgatttactatatgcattcataatcaactaatatttgacctacgattatatgtaaattttattgatttaatgaaacattgttttacaataaagatcagttttgacatatctgactcaatgggtgcaatatatctgaaatcattttggctataagtttttaaattatgttttattttctgaagagggctgcatcttatattcctatataaatttttatttaaattagaaacaatcttattttgtatatcaactccagttactgctccctccttttctcccatgccctccaacaactcccccattccaccccccatccactcccgagggagggtaaggtcttgcgtggggaatcatcaaagtctgccacatcatttggggcagggcctaagccctcctccatttacctagactgagagattatccctccatgggaactgcagtacttagcacttttcctagaaaccaggatatgctgtgctgtgctttgctaactcttctctctcagcactaggtgaattaatctggaacaagtttaccttaaagaatcagtgtgctagcttagctttacttttcatgcaatacaaacataggtagatatttgtaaaaaaaaaaaatatgctttggatgataaagaaaggaaggaaagtttaaataaaaaagaattttagagtattttacttgttttttagttatgtttttaaattaaatataaagtttctggaatagaggaaggttttttaacccctcgtttaaaacttttacaaagatggtcaataatctccatactgggagagacatccatggtcattcatggaaacttgcacattttcccctcctttttatgttttttattcataatgcaactttgataacttaaagttttaaggcaaatgaacaaaattcttttgaataggtggcctttactatatttaaggagaaaagttcctgtgcccaaatactacattgtaggtaatatctttttcgaatacaaccctgatttcccaaaagtcactggcttggtttttgcatagtaattcctttagagaagatagtttagttcaatagtactgagattagattaagaaattttatctcagggaagatgccctttttctctctccaaaaatatatatgaactccaaatgttacattatgttctttataacattaaggaatatttgtttcagtaacatttccttctaaacatactggcttcttagtcatttaaaattacttgtcaggaagcatgctgaaaagcagaaattgaaataaataaacaaaaacacacatttaatgagaagtcaccaagtgccatcattttctcttacatctttaattgaaccacctaaattaattggtttttctgtttgcaattaattccataaccacacaatctactgttgttttttgaaacataaatttttattttcttgttactatttaatttccttaaaacatattacaatattatagttagttatacatatttggcttatttctttgctcatcaagactctattgtgtgcttaatatataggagacattgcacaattttgattgtgcagtaattagaaagcaaacattcttcttgcctgcaaaatgtttatacttgggtgacagaaggaataaagtggcattgctgaaatgcagactgattttctcttcctctttccatgggatgagatcccattttccatgacttatatcactgatgggttgaggaacaagatgggcaactttgaggtggtctcttgctttctagaattttttctttccatttttagtttaaataccaaaagcagtcctgtaatttcttcttttataaggaatatgttttgcaggaaccatccatgttaaagaaggatataatatctgacttcactcatagctgtgtgatcagttttgtaaaaagttaggaagagaatgaagcatgcccatttgtccacagatcaaagtctccttcaccatctaggctttatcagcaaaaacactggctttttaaaacatctctctatctcttcgtcttaactttaatcaagtctctcttatggatcgactcagtagaatactcaaccataggatttaataaatcttaaaaattagaatttatagaaactactgaaaagaaagcattaggagtaatagtcactaaatattttctaaagaggaaaagtcatacatggcctacatgacaccatgtgtaaacgttcactaatgagaaggttgtctttgtcctttgaagcacacacgtattagataaataaatgtaaagcttttaaggataaaaacactctgggcaaggcacacccccaagaaaacattctacaatacatgagtaactgagatggagttcagactgatctacaaggcaccttagcatctgttttatatctgtagaagggtatggcagagcaaagtagccaaaaagctaacatttgtacaagagcattcattgatattgggaacatggagtcttacatctgaatgtaaccatgcctgggtattggtttggacacccaggaatggctcctaaaaccagcagcaataaaagatgcagcctgaatttatggctgcagatcagagattttcagatatttccagtgagtctgtaactgggacctacactggagaggtagtatagatacaaggcagtgtgaaacaaagatgaggtaaagtaagaagacagattcccaatatggacattaagataattgcatacttaagtattttaagaatgagtaaatgcatccaatgacactccaaggctttttgagttgcattagataaagcatatactttatagcaagattgaaaaatgcaccgaagtttaaaaatccagtaaagttgagagtgaaattcagagatgagctggctggatcttttctcttgtgatcagtaatttcttttggacaatgagaacataggtggcctgagcatttgttctatggagggcattcaggtttaataatgagaagggactgtagattaacttgaaatacaggtccctataggtagacaaacattttggccctattcctaagaagctttattacctattttaatacacttatttggaatatttcttgaaaataatttttttccttgtagactgtcttttcagtggttcagtcaattgtgttgatatatttgactctcagacagcaaaacacattaataaggtcttaactgccctttaattcttagtagatggaaacatgaggcaaaactgtggatatagtaatcatgtttataaagaaaaggagaaggnnnnnnnnnnnnnnggaaagagtttaaggaagtagagaccaggcaaaaaaaaaaaaagaaagaaagaaaaaaacccaaaccaacaacaacaaaaataaccaaaattccaacatgtgtatctggtagaggttagggagatatttccatggatataaacaaactacacaaaaatacatcaggaaatcaatggaaaggaaactgacaaagaccagaggttgagatttttaaataatgcaagagatcaaattctttggagattcaacattcttttgatggtgaaacactaacatcattgtatagtgggaaattaccaatacggagtcaggtagaaatataaggatatttaatagggaaaagccttacctacagagcaacctagccagccggcgtggtagaggtctgtacagcaagcagcaaagagaaagcaaaagagcaaacgcagtcacactacgtcactctgaccacaccctcacaagcctgatcaggcacacctgtagccagcccctaagaaggcgtggctacagcttcccctacatcattggtcaccttaaccagagtcatttaaatatagtaaaaggaagcaatctgaattaatggtgttcgtaaatttaaatatacataatgaaagctttctcttccccccttgcctcatgtagagcaagtgaaagtgtttagaacatgtactccaaataaaaggtgtttcaaaacatcctcttgatattccaagtagtcacaaccacacaaacagtgaatgggaggctatggaagagaagacagcatgcacagcacatattgtaatgcaagtaattatgtgtcgttgtaaaggaaaagtggcattgaataaattaattctattatttgtgaattgataaatatttctcaatatttccaccttaactttggctttaaagaaaaaagtactgaggttgtatgtctaatagacttgttcccaagcaatatgagagacacttgtttttaagaaacattgaattggaccagtaagatgtcttataatgagtaacagtgctggataacctgagttcaaatcccagaattcccacttaatgcattgtcaagtgggcacctgtatttatacacacatactcaataaaaaataacaagatgtatataaaatgcatagaataaggaaaggtgggattgaaatggttggtaattgtgcataatatatcactcatcctaaatatatttaccatgtaaaatatgtattgactatatgctgctagcacttttaatattagaaatattacatgatatttctcattagcttatataactactgttcaaaatgctcagaataaatttattaatctctaaaagaatttgtttgtcatgtatgcatatagtttacataatttctgaaattactcattttctcagtagatcattctaaagctcaaaatttaaagggaaatgtttaatttgttgtatgaccacacttacattttaagtaacctatttgcatagaaatttgttcatcataaagcagtttcaaacaaatttagccattaatctcatggtattctgaaaccatgggtagcaattttaacatttttggaagaccaataggctggtcaattgcatttaaggaacttgtcaagctttctttggcaatcaatattgaagccaatattggacatctggtctcctagctaaacagagtacagtataattacatagaaatatgatgtgcccaactaatttttatatttcaattaggattgtttattttttaaaaagctgataaaattataaatgatctcatctaagcaagaatttggaatataaattcagtaatgttcctttttataagtgcttattcataatttgaaacaatggtctttcaaaatgtaaaaattcaaatatcagcatcactaaaaccacaccataaatcctttgatgaaaatccattaagcttagaaagaagtctaaattctttaatgtgatctaaattccttatttactatttttcctttttattgaaaatagattgttttctcaaacaatataccctaattacattttctcctccttccactcctccaagttcctccccatttctcctctgctctagatccattcactttctgtctctcattaaaaagtataggctcccaaaagacaataaccaaacttgacagaataaaacacaaagagataaaccaaaaactatcacaatgaagctgatcacaacccaaccagaagaaaagagtcccaagagcaaacacaagagtcacagatccacttgttctcacaattaagattcccataaaacactaagctaataactataataaatatacagaggacctggtgtagaactatgtaggccctgtgcttgctgcttcagtttctgtgaggtcttgcttagttgattcagagagtctttttctgctggtgttctccataccctctgactcttaccatctttctgcttcctcttccatggaattccttgtgctcttaggggaaggatttgatggataactccaatttagattctcataatatctgtcagtgagtctgtgcatctgttcccatctgctgctgaggaagtctctctgaagatgactggataaggcagtgatacatgagtataacagaatatcattaggattaattttattgatactattttaaaaaacaatatcagttgtatgttttactgtaggcctctgggatatctagactctggttcttggttgctcaagcagtgtcaggtacagattccttcttgtggagtaggtcttaaatcaaatcaaacattggttgattactcctacacgtctgtgacaccattgccttgacatattttgtaggcaggacagattgtaggtcaaaagttttttgtttttgttttttgggtttttgttttgttttgtttgggggggctggataggtatccatgtttctcttgtggtaacccatagaatattttctagcaccaaagagactaaaacataggggtaaaacctccatgtaggcattatttcaacccctgcatgttaaatgagttgtgtgagtcttatcctcagcaatgggccacaatgccagatttctgaaagcaatcttttgttttatcaacagcctggttgttaggggattttcaagagccctcaagcaaacaactcatctgaatgtagcccagttcctctaccagaaccctagcctgccaacaatagttggtttgttgagactccataacccccattacgaggtgtcctattaggatcaccttcattgattccatgaagtttacattgaaatagtgttcccacacactcactcaagggcacccaattccaactgtgtgttctggcactctctttaccccatatttcactatctgatacctgattcccactcccattctctcccactctatccataaaactattgtatttccccatcttagagagatccaggcacactccaccctgaaagttattctttaccatacctctctctatctatgattgtcagttgattgtcgcctacttaatggctaatatctatttataattgagtacataccatacttatctttctgggtttgggttaccttacacaggatgataattttctactttcatccatctgtcttcaaatttcaaattcattatcttaatagctcagtaatctgttgtgtaattattctacattgtctatatccattcttctattgaagaacatcaaggttgattccagtctcaggctactatgaataaatacacaatgaacatggttgagcaagtgtctttgggtatgttggagtatcctttggttaaatgcttaagagtggcacagctaggtcttgatgtagattagttcacaactttctgaggaaatgccatatttaatttcatagtgaatccacaaatttgcaatcccaccagcaatggagaagtattccccttgctccaaattcttactagcatgaggtgtcacttgtgttattgatttaacaatcctgacaggtgtaaaatagaattacaaaacagttttgattgacatttccctgacagtaaggatgttgaatatttcttttaagtgttcctcgccatttaagattcctctggtgagaattctctatttagatccataccccgatatttagttgaattatttggtttgttgatacctattttgttgtgttctttataaatttttggtattaggcatcgttcagatatggagttggtaaaaatcttttccattctgtaggctgccagtgtcctttgccttacagaagcttctcagtttcatgaggtcttatttattatttgctcatcttagtgtctgtgatatcatttttctgttcaggaagtaatctgtgccattgaattcaaggctaactttccccattttctcatctatcatgtttagtgtatgctgataccatcctgtgtttattattatagctctgtggtatagcttgaaattgagaatagtgagatctccagtagtaattttaatgttcattattggtttaactatcattttttatatgaagttgaaaattgtcttttataaagatctgtaaagaattttatttcaattttcatgaggattgcattgaatctatagattgctttagttaaaatggtcattttactgtgataatcctacccatccatgagcatggaagatctttccatcttcttatatcttcttcaatttatttttcaaagacttgaagttttgtcatacaagtcttccacgtgcttggttagagctaggccaaagtatattttattatttgaagctattttgaaaggctttacattcctaacttctcaatccatttctcaattgtatatgggagggatactaaatcatttttagttaatcttgtatctagttacatgctgaatgtgtttattatatataggactttcctggtggggattttagggtaacttatcacatcatctccaaataatgatacactgacttctttccaatttgtttcctcttgctctcttgaagttgtcttattcttttcccaaaacttcaagtactatattgaataaatatggtgacagtacctggtcttgttcctgattctagtggaattgctttgagtttctctccatttaatttgatgttgactaccaggtagttgtaaatttcctttattgtgttaaggtatttattttttttttgtattcataaactattcaggacctttatcatgaatggttatttcattttgtcaaagacctttcctatatttagtgagatgataaaaatgtctacttttctttcaattagtttatatggtggattgcattgaatgacttttgtttattgaggcatccttgaatttctgatataaagccaagatgatcttggtggatgatcgttttgatttgttctgggaattggtttacaagtattttatgcagtatttttatacctatattcatgagggaagttgatgtataattctatttcttgttagtttttttgtggtttaagtatcagcttaacttgtgcctcaaaacataaatttttcagtgtacattctgtatctactttgttgaataatttgaagagtactagtgttaagtcttctttgtaattctggtggaactctgtgctaaaaccatcttgtctggactgtttttagatgggagacctttaatgaacaacctcttatttactagtgtttgtaatactatttgcattgcttatctgaaggtgatttaactttggaaaatgttacctatgaagaaaattattcattttcttagattttccaatttggtaaagtgaaggttcttcaattatatctttatgattctgtggatttcttctttgttatatccagtttttatttctgattttattaatttggatattctttatgtttattttagtaagttttggtgagtgtttgtctaccttgttgactttctaaaaaaaaaaaactaaatctttgtttcatttattctttgtattgtttcctttgcttctatttgattgatttcaaccctcaggttgattatttcctattctctactccttctgggtttgatttcctcttttgttctagagctttcaggtgtattgttaagttgctagtatggaatctctccagttgtttttcttttttttttttttcttttgatgtagtcactttgtgctatgaactttcctgtttgcactgctttcattatgtgtcactaatgtgtatatgctatgaattaattatcattgaattttggaaagtccttaatttcctttatctgcccagattcattattcattcaataaagtgttgttcagtttccataagtttgcaagctttctgttgtttatttttaatcgttgatggtatgataggatatagggagttacttcactcttcttttatctcttgagacttgcttgtatctgggtatgtggtctgttttgtaggtttttatataagaatccaagaaaatatattcttttgtgtctggatgaaaagtactgtgactatctgtcaggtgcatttggtttataacaattgttagttccagtattttttattcagattttgtctggataacctgtctgttggtaagatatgggtattgaagtctctcactatcagtatgtgagggtcagtatgtgatttaagctgatacacacacacacacacacacacacacacacacacacacacacacacttgggtctcttgtgtttgaagcatagaatttaagaattgaaataccatctttgtgattatttttccttttgatgaatatgtagtgtgcctccctgtctattttatttagttttggtttgaagtccattttgatcattatttgaattgctacaccatttcctttttgggtctattttcttgtaatatcttttttcagcacttcaccctgaagtaatgtctatcattgacgttggcttgtgttacttagatgcagttgaatgataaacactgcttttctatctattctgtgagtttgttatgttttattgggaatttaggccattgatagggaaggagagaaatatccagttactcttgataactgttattttgttgttgttgttgttgttagtaatggtggtggtggtggtggtagcttgtgtctgtttgtgtgctctgggaaatcaggggaaaaatagagtggcagcagtgggctagggagggatcgattccctggctgagtggtgtctgttgtctgtaagtactgtgcactttggttgctgtggggactgtgggcagtgccagggttggttctcaaataaagacaggtctaaaggagtccacaaaacccagatatatgatttacaggtggttattacaatgagggtaaataaacagttgtctttctgctactgaaaatgcagtctctacccttctgaatgctctaagcacaactgaagagaatgagggagccagcctctcctcttctttataataggtcacatctccatgcctgaagccacatccctagaatatggttcaccactgcttgtccactggctaaacaagatggcactgtgtgtgtgtgtgtgtgtgtgtgtgtgtgtgtgtgtgtgtgtgtgtgtgtttcttttcttttgattttactggtgtgagattgtttcttcagttttaatgggtaaagttagcctcctaagtttcaaattttctaacactcgaatgtgtagatagatgttgtttacatttggttttatttatttatgcagtattttactttatctatggtgattcaaagttttgctggatatagtagtcagggttagcatctgtggtctactagcatttgcagcaatctgtccaggtctttttggattttagagtcttcattgagaagttaggcgcaattctaataggtctgtatttatattttacttgttctttttctcttgcaacttttaatattctttttgttgttgttctgtatgtttagtgatttgatcattatgagcaaggggactctgttttcagttccaatatattctgtgttatgtatgtttcttggaccttacaggcatctccttctttagtttaggaaaatttacttctatgaatttgttaaaaatattttgtaggcatttgagttttgattcttccctttcatctattcctattattcttggatttgatcttttcatagtgcctcagattttctggatgttttgtatcaggaggtttggttttgttttgttttttggagatttaacattttctttgatgattttttctcttttgtcttcaatgtctgagattctctttcccatctcatgtagtctgttggtaaagctttactttgttgttcctgttcagattcttaaatttttcatttcctgaattccctcagtttgggttttcttcattgattctattataatttacaggtgtagaacacttaattcatttctttccactgttgtttttgttttcctggatttattcaagtaatttattaatttcatctttgaggacctttattatctgcatataggacattttaagatctcttttgtctcaagtactttatctatatagcaggatagctgctctctattggaagcataatgctctggctgttgttgattatgtttttgcagtggtgtttggacattgggattttggttgattatagacctaggtgctgatttttggatttgtcttcaatgaaagtgaattatgtttcttggttactggggtttttgtttgtttgtttgtttgtttttgaaatttcagagagtgtgatgcctgtgtgtagcttgataggaaattttctttcaaacatatagttgtggtccctaggacttcgaggtaaaatgcactttgggtttgggagctaacacttttgaataggagtaacctatggggtttgaatggatccataggtgaaaggagagaagagtgttcaaccaggatctgctgatttcatctccattgaatggtggggcacagttaatagaggtcaccccaaacatctgctatagcaatgaaaatatgttttgggacttagttcaagaggaagataaggagaggggaagatctatatatagtctgctatctaggccaaagtggttggtgacttagcaggctacacctgctggatttggtggcaaggataaggcaataagagggtgagttgtggttagaagggaaagatccatagaattccaatgacatggagcaggggtaaggaaggcttcaacaaggtgttctgcttcagagctggtgatgagattggaagaccggactgaaggaacagctagatggttatatttaaaatacatgctgtatagttgctaaaagacaaataatgaactatgccttgttatctgaaacaatggcaatgacaatacattgtgttcttggtttttcagtacataaagaaattgaaacaatgttacatgagcagtgataaaatcataataagtagcttttccatgaagttgtccaacatagagttgtaaaataatagactgtcatgcatgctttgttttgtcttatgtcaaacagttacccacattggtctgagccttcccccactgatatatatttaagaaaatgttgtgaagccaaggcttaatggggcggcttctcaattgcatatctctcctctctaattattccagcttgtatcaagttgatatgaaaatagccagcacagcatatattagcaataagtgaaaaaagaggcaatgagtttgaggaagagggtagaggaatataacagagggtttagattgagaaaaggaaaggctgaatgctataattacagtattactaaatgttataaatatagtaaaactgtattgtaatcttaaacataaaataagatcactagtttctcttacaaaggacacaagttcagttcctagcaccaacttaacagcaacttaggctccagggaatctatcactctctctggcttcaggaggcatatgcatacgcacacatgaatgaacatgcactaacacacattcatatcaattaaaaattttatctttgaaaaatcagttaaataaatcaatatgagttttagagataaatggctaagaaaaggtaatgtttttgtagtgatctttacaaagggaaacactctgggcttcctctatcccattcatctatatgaagatatctgtgaagacaatagcagagaagtagaaaaggatcaggtacatgcagagataataactgagggtgtcctactgacataaataagatcttctctcctgtgaaaaactgtatcgaaagaatactccacacatttggctaaataaaaacaccacagttaaaaattcaccttacttaggacttcataacaaaatttgagggaatacactaaaacatcagtcagaaatatgaacaattttatcgaagaaaatttcaggtttcttttatttctttataaacaaaagaaagtgacagatgtcattttattttttgatgtatgtctgaatggctggacaggagattagccagaaggaatagggctttgttttttatttttgctatgacaatttgaaaagaagagcacaatatcccaggggacttttgtttgagctacggtactaaaaagcaacacttcaattccctggataaaccagcttttcacagagacacggggataacttactttagcaaagtacagtttgatgtgaaaacagtgtacaatttgactattttctatatccatttaagaaaattcagttaaatgctacaagttcatataggcaacttataggtgtgttgtttatacactggacatgtacaaagatttagtttggtctaattaactggttgttttcctagctgtagactccagctgagcattgtgagaagaccggagccagcattattttagcacagccctgaaaaacttccccagaaacaacagacaaggtctcttcattccttacctcctcagaacacattgagacaaatcctatgtattctcactacacatctgtaaaggtcaaattacaagttgacagttttttactttattttgtggagcgaagatgatcaagtattataaaagcacatggttaaatagatggggaagaatatttgaattaagaaactcagaaaatgggatttgaaataagagttaataaatctataatagattataaatatataatttctaggtcaggattacattgttttacatagctctaaaagctgctaatttatagtatttataagtgtacatgtgtgtcctatatatccggcttctgtaaggaagagtgggaatcacacatgcacatccatcatccatcatcaagcagaagagtgtatttccactactctcagtaaaacaacctcatgtttttaatggaaggagattttagaaacaaaatatgtaataaacaattgcagcatttgttacactaagacagaaaacatatttctattacctatataagagactgaacaattacagacagaatatactctgcaaattaaagggaccacctaagtagatcttattacaagaggacacagaaatatttgaataaccacatatgtgaaagtggtattaaatcctttgtgtagctttttagatgttttgatgtaaagatccagagactgaaagatgttcataacatcttatcattttcaatttttcaacaaggagatggtaaaagaagttaaaggtgaacttcctaagaacttatgaacaagtatggtcatgtggtgaagatgtcatctgattggcagaagaaaaagcaaaatcattgaaattgactaatggaacattgaaacatattggttcatgttgtctgtaggccatgtggatgtccacagttcatgctgcctctgtaaaacacatacaagtacatgatcctctctgttgcttgctgctttgggtcaggaaactccttttgcagtggtatcagtggactctagattcataattgagaatgagtgacattaatggcttttgtgagaacttctcatccccatctttcaaataaaagtaacagttcagacaggatgccattgaagacagtccttgcaagagggtaggggatagggagccaggagaatgagaagggaagaagaggaggggtgaggaggacataaggtagcaggaaggttgtgtagggggatgaagagaggagagcaaaataagagataccataagagagcgagcctttatagatttaaagagaaatcaggcactagggaaatgcccagagatctacaaggatgacaagccatctacacaagagtggagaggctgtcttaaatccccttccctgataatgagattgatgactgacttatatgccatcctagagccttcatccagcatctgatagaagaagcagataacactaaactgaactggaatacagtttcagaggaggagtgattagcaacagggtcaagaccaggctgatgaaacccacagaatcagctgacctgaataaaggggtgtccttggtcaccagaatgatcactgggaaaccagcatgggactgatccaaaccctatgaatgtgggtgtcaatgagggtgcctgagaaatctatgggatctcttgtgatagatcagtgcttatccatagcacaggaatggactttaggagcccatttaacatagagggatactccctcaacctagacacatggggaggccctaggccctattacaaatgatattacagactctgaagacccctcctggaagacctcaccctccctggggaggagaaatagtatgcagtaggtaggttgttagtggggggcagaggacgaggggagggagagggaactgggattggcatgtaaaacagtattgtttctaatttgaataaaatgtagaagaaaaaacagaaaaaagaggaaaggagtgaatcaaacacagttaaaaatgtgataaagatgttggtatatatctcttgacagatgatggcttcattattctttaaggggctggccactgggagtttgaccaagctccaatgagtatatgggcaacacaaattggacttggttgattttttttctcttttgagaggagggcacaagggttggagggtggacctaggaagcaagtgcccattgaatgaaatttgcaaataatccataaaaatattatgttggaaacaatttttaaagtgtaattatttgaacttaaaggaatgagtgaaagacacaatatttttggtgagagaactcatcaaggaaattctaaattcatttagttatagggaagaatctagaatggttagacataactatgcagaattaagaagactattgaattcccatatgtcagaaaccccagttacccaagagttagatagaagaccaatgtaaaccttggatgagttgtaagagatgctaccatggatgaaggaataagaggtgttaaaagtgaggcagaggctcctctgccctctgccctcccccactgcctgaggtgagtataggcactgctcatcctctaactgcccccatcaccccatctggctttcattctgagcctgtcccttgccaagagtggacctgcccagacaggaaggcccaccttgagtctagccacagctcacacttgtccctactgtgctctctgctctctgcctgctgcctgaggtgagtctggacactgttttgccctcacttcctccactacaccctcctcgattcttcctgagactgcccctagaatagagtggacggaaggcccaccctgagtccagaaacatctcactcttggttaaccctctgccctctgctctttgcttgaggagactagaagagagggagagaccccacaagtacccatggaagaagtgatgggaagatggcagaacacactcaaccacagaaagacaaatatgacaccaccagaatctagggactccaaaccagcaagatctgaaaagcccaacacagaggatgaagaagagatggaccttaaaaattctgaagatgacagagatgtttaaagaggaaacaagaaaatcctttaaagaaaaagaagaaaaaacaagcaaaatattacatgaaatggaggaaaacataaccaaaaaattctagaaataaacaaatctcttaaagaatctaaagaaagccgcaaaagacaacaaacaagtaaaggaaacaattcaaagagttcatagtttgaaagcagaatttgaaacaataaggaaaacacagaatgaagggattctagagttagaaaagatgggtaaacaaccaggaacaactgatataagcataaccaatagaacacaaaagatggaagagagaatctcaggtactgaagactcaccagaggatatacagtcattgaacaaagaaaatttcaagtccaacaaatccctaacacaaaatatccaggaaatatgggacaccatgagaagaccaaacctaagaataataggtatagaagaaggtgaagaaattcagctcaaaggtacagaaaatttattcaacaaaatcatagaagaaaatttcctcaagctaaagaaggatatgtgtatgcaagaacaagaagcttatagaacaccaaatagattggaccacaaaaataagtccacttgccacataataatcaatacaccaaacataaagaataaagaaaatgattaagagcatcaaaagaaaaaggcaaagtaacatataaaggcagtcctatctgaattaaacctgacttctcaatagaaactttgaaagccagagatcctggatagatgttttataaacactaaggcaagatggatgccagccaagactactgtatccagcaaagcattcaatcactatagatggaaaaaacaagctattccattacaaacccagatttatgcaatacatatccacaaatctagccctacagaaattactggaaggaaaactccaatacaaggaaaataaccatgctcaaaaacctataggcaataaataatcctactttaccaaacaccaaaagaaaaagggaggtaaatccacacataataataccaccacaaacaagtccaaaacaaacaagaatcaacaataaatggtcattaatatccctcaatgtcaatggtcttaaattgcctagaagaagatacaggctaacagaaaggatatgaagactaaatccatccacctgctgcatacaagaaacatatctcaatgtcaaagaagatgttccctcaaagtaaagggacgggaaaagactttccaatcaaatgtacacaagatacaggctggtgtagcaatcctattgtctaacaaattagagttcaaattaaaatcaatcaaaagagatgaaggcaatttcatgctaatcacaggaaaagtctatcaagatgaaggctcaatcctgaatatctatgccccaaatacaaaggtgcccatatttgtaaaagaaacattactaaagctcaaaccacacataaaactacacacacttatagtaggagacttcaacaccctgctttcaccactagacaggaccaccagacagaaacttaacaaagaaacaaagaatctaacagaagttatgtcccaactgggtttaacagatatctatagaacattctaattgaacacaaaagaatataccttcttctcagtgccacatggaatctcctctaaaattgaccacatacttggcaacctagcaaacctacacagatacaaaagaaatgggaattaccccctgtattttatcagaccaccatgctttaaagttagaattcaacaacaaatcaaattgcaggaaacctaaaactcatggaaattgaacaatgcacaactgcaccattcctgggtcaaggaagaaataaaaaaaaaagaaattaaagacttcctagaatttaatgagaatgaagacacaacatacccaaacttctgggacacattgaaagcagtgataagaggaaagttcatagcactaagtgcccacataaagatattggagaatagtcacactagagaattaacagtgtaactgaaagagctagaacaaaaggaagcaaacactccctggaggagtaaatgccaggaaataatcaagataacgactgaaatcaataaagtagaatctaggaaaacactacaaagattcaatgaaacaaagagttggttcttcgataacatcaacaagatatccaaactaaccaaaaggaagagagagagaatgctaattaacaaaattagaaatgaaaaggggacataacaacggacattgaggaaatccagagaaacatcaggtcatactttgaaaacctgtactccacaaaattcaaaagtctaaaggaaatggacaatattctggatagatatcacttaccaaaattaaatcaacaactgataagcaatttaaacagacctataccccctaaagaaatagaagtagtcatcaaaagtctgatagccaaaaatatcccaggggccaaatggtttcagtgcagaattctaccagaaattcaaagaagaggtaatagaaatactcctcaaattgttccacacaatatcagcagaagggacattgtcaagctttttctatgaggctacaataaacttggtacccaaatcacacaaacacacaactaaaaaagagaactatagaccaatatccctcatgaacactgattcaaaggtactcaatataatactggcaaatcaaattcaagaacatagcagagaaataatccaccatgatcaagttggcttcatctcaggaatgcagggatggttcaacatacaaaaatcattcaatgcaatccaccatataaacaaacagaaaaagaaaaaccacatgatcatctcactagatgctgaaagagccttgaaaaaaatctaacatcccttcatgaaaaaggtcttggagagatcaggaataacaggaacatacctaaacatgataaaaaacaatatacagcaaaccaacagccaacatcaaactagatgaagagaatatcaaagtgattaatctaaaataagaaacaagaaaatgctacccaccctctccatatctcttcaataatgtacttgaagtcctagctagagcaataagacaacagaaggagatcaagggtatacaaattggaaaggaagatgtcaaaatttcactatttgcagatgatatgatagtctacataagcgacctgaaaaactctatcaggaactcctacagctattaaacaccttcagcaaagtggcaggatacaagattaactaaataaaaaatcagtagccctactatatacagatgataaatgctctgagaaagatgtcagagaaacatcacactttacaagagcaactaacaacataaaatattttggggtaatgctactcaaatttgaaagatatgtatagtaagaactttgggtcttcaaagaaagaaattaaagatatcagaaaatggaaagatttcccatgctcttggattggtaggttgcacatgataaaaatggcaatcttggcaaaaggaatctacagattcaatgcaatacccatcaaaatcccaacacaattcttcacagtccttgaaagaacagtactcaacttcatatgaaaaacaaaaaactcaggatatccaaaacaaccctgtataatacagaaacttccagaggcatcacatcccagacttcaagctttattatagagccatagtcctgcaaacagattggtattggcacaaacatagacaggtagaccaatggaactgaattgaaaacactgatattaacccacacacctattaacacctgattttgacaaagaagctcaagttacacaatggaaaaaagaaagcatcttcaacaaatggtgttggcataacatcttcagacatgcagaagattgaagatgcctatctatcacgatgcataaaacttaagtaaaaatggatcaaagacctcaaaaaaaattcagccacactgaatctcctgaaagagaaggtagatgataccctcaaacaatttggtataggagaattctttctgaacataacatcagtagcacaaccattgatattgacaattaataaatgggacctcctgaaactgagaatcttctgtaatgcaaaggacacactcagcaagacaaaacaccttcccaaagaatgggaaaagatattcaccaaccccacagatggctgatcaccaaactatacaattaactctagaagctagccaccaaaacaccaaacaatggaattaaaagatggagtgcagaactaaatagagaattctcaacaaaggaatccaaaatgcctgaaagacacttgagaaagtgttcaacatccttagccatcatggaaatgcaactcaaaacaactctgagataccatctcactcttgtcataatggctaacatcaataacaccaatgacagtccatgctagacaagatgtggataaagaggaacactcctccattgctggtgggagtgggaacttgtacaatcacgttgtaaatcaatatggcagtttatcaagaaaatgggaatcagtctacctcaagatccagcaatccctctcttgggcatataccaaaagaatgcacactcatacaataaggacatatgttcatagcagcattatttgtaatagccagaacctggaaataacctagatgcccctcaactgaagaatggatagagaaaatatgatatatttacacaatggagtactagtcagcgaggaaaaaagtggaatcttgaaattcgcaggcaaatggatggagctagaagaaaccatcctcagtgaggtaacccaatcacaaaaagataaacatggtatgtactcattcattattgatacatagagcaaaggattactagccaacaatccacactgccagaggagttaggaaacaaggaggaccccaagagaaggttgcatactccctcgaagaagggcattgggacaagaacccctgatcaaattggagccccttgaagaaggggagggggacaagaaccccttttggggggatggagaggatggaggtgggaagggaagaggcggagaggtgaacaagaggactgagacagggaaggaattgaggaaggcaagcaaggagatgccttgatagagggagacagtacaggtttggagggaggtctggcacaggggaaatgttagaggatccacagggatgaccccaactaggaatccaagcagtggtggagaagatgccattgattcccccccacacattgaaattgatgtgtaccttggttaccattcctagatccttcatccagtagctgttccaagcagaaacaggtacccacagctaagcactgaaccatacccctggaatccagttgtggagagggaggaaggatgagcaaaggagccaagacagtgctacagaaactgttgacctgacctagtgagaacatggagaccctagtcataaaagctggggaaacagcattggcccaaacaaagccctctgaatgtgggcgcctggtaggaggccaagacagtctatgggacctctaacaatggagccagtctttaaccctagaacacaaatggactttgggagcccattttctatgaagggataatgttgcagcccagatacagcaagcagggcctaggccttctccaaaatgatatgacagactttgaaggtccctggtggagggcttcactatctctggggatgagatgggggatggattagggagttgttggggaatttgggaggatgggggataaatatgtaaatttgagtagtaattaaagaatttaaataaaaataaattaaaaattaaaaagtaagaaacagacatgaccatagatgccaatatagatgtctagggtaccctgatacctatgggttttaatgctaaggattccttttttctgagagacagaaaaaatctggaggctgaaaaatgatagagattcatcatttctaccactgataataaatagaaaactactgacagtaacatcttctgcagacttgagagaaggttcctaaagctgaacacagaacgtcatccacaggaaatacaggaaaatttccagagggacagaggataagaatggggtaatgtaaggaaaaagggaaacacatttggaggtgagttccataatgacgtttttcttgggtaatatagctttgcttatcacagatccataggacaccacacttaggaaataggatacttcagttaaaataagaacctctatcctgtgttctatttaaattaatattcaataaaatacaagaccttaagatattaaaattatgataatttttataatgctgtgactgaaaatggaaacatacacaaacttttatttgaggaaaattgatttcagtggggaaaacaatatttacatttctaacaaaattatattggcaatttttgactaatatttacttgccttaaaataagctttatttttaagaaaataaaacaaaattaccaaatggaaatcctctggttttatatattaaagacttgatttttatgtaattaaactattcattttctatcatattttcattaccacaacaaaatcttaaagcttcaaattatctttcaattccttggtactgttaaaaaagagctttcctttgatatgtttgtgatgggtgtggtggggtgggaggtagatgactgggtctgtctggtatcaaatgccatctgtttggacaggttctttttgtttttgccaccatgtatgccatactagctataggaacagaagctcatgaaatctgtccatctacatccaattctgcagttggagcactgtgatatttgaaaggcattctcatggtcttctttacatgcgtcctagagatccatactcaagtctcatgctctgagacaagcagtttagccagagagccatctcccggtccaagacactttaatgtatagataataggaaaactgattaaaaaaaaaaaacaagttttatcctacaatcaggtataatgagattgtaatccaaattcttccattttcttttaaattaactaaatctagtttttcttcaataaaacggatactctttaattttgggagccaatattttgtgctgaatccatggttctatttcagtatgggatgctcattcctctgaatttccactagttggtacctcttgggtggcacacagatggtgcaacacatcttaaacttacttaaggacaggcttacactactgaactcaatatctacttcattccatgattcctatttaatatgagtagctgtgtgctgtattcaaaaacatggatgctttttaatttctactcaaactgctatatacatgtgtgtgtgtgtacatgtgtctgaatgctttataaacacatacatatatacatatatgcatatacttatgggtgtatgtgcatatgtatatatacacacacacccatatatatgtacatagatactgtcttagtgttctattgctgaagggagacaccatgattaaggcaactcataatgaaagaaagcattacattgttgcttctttagagttttagtggtttagttcataactgtcatgtcagggagcatagcagcacataggcagtcatagtattggagatatacctgagatttctagatcctgattctcaggcaggaggaagagagagactggttctgatttgagcttttaccccagagcccatctacagcaacatacttcctccaacaagggcacatcttctccaatgaggccacacctcctagtccttctcaagcagtgccactccctaatgatctgtcataaaataaatgaaactatagggccatcattacctaaatcaccatgaataaatgtgcacacatacacatacatatatatacataagtgcatatatacatacatacaaacatgttcaactaataacatatttaaaggaaaataaaaatataaggtaggaaactggctttctgttggtaaagagatttcctcttaacaaaagttatttttctttttgatggtataactccattttcatgtaagtatttttaaattaaatgctgctatgtttgtgatttagcagcctttcattgggtagaaggctagaataatagggcatgtaataattttggagaattagagaaagaaaaaggtggcttatacagatgtgaggatgcacaaagacatgtttataacaaagagactgtgtcctgtctgagaagagaagcagagcaggagcagaagaactgaaatggaaggtcctcacagagtaggcacttcatctgctaccaggctggtggcagaacactaacttcctgtctgtgtctcccaccagaggtcccgaaaggacagatctacacttcctaattccacacttccttgagatctacaaggctttgctctctccctttctagtcaattcactctctctgcttgtgtctgtggttgaagatgtgatttctgattttcctgcactggccacatccctcattattgtgctcgctttgaatcataagcccaagtatatgctttcttttataagttgtttttgatgacagcaaaagaaaagtaaataaacaacattgaaaatatgtgtgtgtgtgtgtgtgtgtgtgtgtgtgtgtgtgtgtgtgtgtacaagcacacaaacaatcacactcaagactcaagagcacatgaacacatcttgatagcttaattctaagaagtgattcattttacagacagaccttagccaattctttctagagcacatttagtcaagaagtacatacaaaaaaagggactctattgtgtccatgggcaagtcacctaagatgaaatctggcttctccctagagttggccagtgtggtcccataaggaatgtataattgtcaagctgagagaagtccagggagatattgctttgtaacactgagttaaaataaaaaaaaacataagattaagaaatcatctgatgttataaattgatgagaaacagtaacagtctcatcaaaccaccctatgctttctaattgtgttttcttaaagctgcctataataaagaaatgccaatcaatgcttctgttctagtttccagtcacatatttgaaaatgaattcaccattttatatctagaaattagaataaattttatgtcattataaaaataattcattgtaaaagttttgttcaacatgattttttaaattaagaatctagctcaagtttctccttgttgtcaggcatatctgaggaaattctgatttattttttactccaaaacataactcaataacggatgttgaaatttgtccatttaaagtggaaaataaagcaaggtcactggtgttccaaatgtcaaagggcaaaggacaagagaattatgatataggctgcattcatataattgaaaagggtttgtctgtaacccctgtgtttaactaacttttctaatattttaaaggtgtgtcctttgcatgaaaataattattcattgttacttttgtgttattataattataccatttcttctcatactatattgattaaaaatattagcaattggaaagaaaataactttcaggtgtactctaagaggaaatttgttgctagagtgtgttaaataatttctggtttgaaaaactattttaatgtgtagtgaaactattttaatatgtggtattgaacataatttcttattatggcttctactcagtaattttgtgacatacacagtttcatgatcactctctgcagatgttcatgaattattgatctaatctctgtttaaaaaccaaaaccactttgctccattttttttctaaaaatggtgtatattatgtaaaaatacaaagaactctattactcatgatataaaattatgctttcaaagtacactatcatgccttaaaataaatctaaaccatgttcgtttgcagaatgttcttcaacatctaaaaatatataaaattgctacagtgatgattaggtataacttgtgcactaaaagcaacatgatagccacacaccaaggaaaatttggtgactggaatcaataaattatcttcatattttcatataaactcctcagacttcccttcaggcttttatagtctaaacagcaaggcagagctcacaacctccggatttttcttcttttagaaactacccaaatgttcaaatttgattcctatgaactctcaacttcgaacctgtgccataagtctatttttgtgaggcaaaaaaaaaaaaaaggttttcttgtcaacttttgtttcacttgaactcccctagagtattcaaggacaaagcatggttctcaaatttaaaagggtatctatttttatagttctgtgacatggtcatgcaacttttgcctaattcaaactttctatgtacttcagcttctggataaaaattcattttattcctaatgaaactcaaggttactttcaagcaaaatctcctgaaaggagaatttaagcattcaggaaaacggttgaacatcaagtatttggttggatgagaacaactgctgttttttgtttagcagtacaatggaactgtacaattcatctgatccttgcaaggttattagccaccaattttaattagttgatgagttgcttttcctattacatctgaggatatatctgaagtacccttcatttaatatggctataaaacttgtaaatgataatttggttgagaaaatttaagtttaaagcctttgctatgagatcttcagaataatgactataagacaaaaactgggaacaagtaaaggaggaggaagcatttctggaagacttggaaagatgaaggtttcaactttgtttgctcctggttttacctttctctagatatggaagtgaacaatatatctgaaataaactggtatcaaaaagaatcaattctgaaggagctgtgactatggccccactggggtagtgcttgcctagatgtaaaaatctctacatcccatacccagcactgcacaagaataaactgagaccagtgtttcactcctggaacactcaatctcttagcatttcagaataagaggtagttagattacaagttgtaggtcatgctcagatactcatcaagaccacctagagaaacataagaacctgtatcacaaatcattctgatgaatattattgaaaatctgtaagaattttttatctatccttatgtagaaacagaaagtaaaatttaggaagaaaaaagaaaacaatccagaagacacgaaaatgcacagtactgcaaatgctctcatttcctctataagccttcatcagaatgatctttatgaattctgacctcagcaagttccactcagtagatattcaaaggctttgaataaatttttaaatgcccataccaattaagctaaattcaacttaattgaattatgtaaagcaattctaattcccactatgttaatagttgccaagtgacttcatgagaacaaaatgtcagtgacagccatagaataatttgagcaatgagtgtagatgaataagtcactcccttggccattagcaaggagctcaagcgatcattataagggacacacagcaaagggttctagtggcatacttgttaaagttaatgacaggccaagtaacatggagactaatgaatttctctaaaatgtgggtaaaaataagtatttctctcattttcaggacaaatgtaacaatcgggtcactgtggtaaattcaaaggtctatgaacacacgcactaacacacacacacacacacacatgaacagaaaatgacaaggagacatcatccatgaaaaactttctcatggacagcacaatagactcagacatataatcattctaattctttgaatattgtactggcctttaagtcacccagtttgtggtgtacataatgccaaaaaaatggctccatattatcatttgtcaaaaacaaatcttattctaaagttgcaaccctaactgtctaaaatcaaaaatagctgggagtttagctgtggagcacttcttggtttctgaggtctttggagtgctttaacctttcaagtttgtatttctgatttcaattcattttagtgcaggtgtcactacaagtgctaaatgagacagtaaatatgaatctcccatttcccagagacagttctacgtgccatataaggacagagcaactaaaaaatcctttaagagtgatagggaattctcacaattgtgcaagttcatggtcataaagtggtcaatctcagcaaaatcaaatagaaactgtatttcattattatggtgacatatgtgtggacatgtatgtttatgtatatatacatgtgtgtgtatttctatatattagaagagagactaggaactaaacccagtatccattcatcactgagtgatctccatgctgaaacctactattttatgattgatagtatttatgcaaaaatataaaaaacactacaataaacccctagttgaataaattgctttatttgttgctataatttgttttaagttttcactcattcccacacaaatcttcacttaaaaaaagactttggaatgcatttcaaataaatctaaaaaaataatgcatcttaaaatgcattaaaatgtttacaggtatgtgaaatgcaagaactgacagttcacttcatttcctattcatcacattaatgatttgtgagtaagaaaaaaaacagctcacgaatgccatccctccatgtttggataacttctccttacaacattgacataaatagagataaatggctatttcctgacagtttaggttttgcttcagaaattatcagtcagaagggttgaactgttcaggtaaaaagaaaattttcttaagacaaccattcataccaaaattgcattcccatccccttcagttttggtgtctggggaatagcgaccttctgagaaaccttccatacttcaagtaatcactatgcaattgaatcttccttaaatagcctgttcttagttttgcatgggtgaaattgtatctactaaaaattgctatctgtggctctaaaaatccatttcatagtgtgggatctgtattttaagtgactccatttgacattcatgaaaaatcaaatcaggaatatagatttggaaaataacgttgctttcatggagtatttttcctaatgtgtctctagctttgagtagctctgttagacagcatcctctctcattagatgaaaacaatgtgtttcttcttgtagtcagcaccctctttcattgggtgagagcaatgtgtttctttgttgctccctttccttctaatccaaatttccagtaggttcttggcacatgagttgcttgtgtcagcaagaatatgaagatgcatataggcaacctgtgtttcttttttcaatcatctttctctctttttatttaaattacaaacaatcctgttttacatgtcaatcccagttccctctccctccctcatcccctacacaccacgacctcctatcccactctctttctgctccctaggaagggtgaagccttccatggaagatcatcaaattctgtccatcatttggagcagggcctataccctcccctgtgtgtccaggctgagagagtaaccctctatgtggtatgggctcccaaagaccatttgtgcactagtgataaataccgatctactaccaaatgcaccatagactacccaggcatcctaacacccatattcaatacagagagactatattatctctgcattaaagctatgttgtagttcaaatagacagtgggatctcttggattgtcactgcctttaggtactgacagtgactgaggggcactgcacatagtgcacactgagcacccacatgtcaaccactggagtcctgtgacctcactatacaatagactactgtgtaaatgaaggcacagaaatggtggtgcatgatacatgtcctctacctatgcatctgctttgtgggctcactagaaaacaaaatctcaaagtgaaaatcatagcaagtcataaaatgagttgctctcttcagttttgtatcctgagtgcaagtctcatagccatgaaagcaggtgtgatggacagtctcatctgtctttgcatttattatacattccttatctgttataatattgtactggctcttagaacttataactactattgccttcagaatttcctttcctcagtcattataaacaaaattgcactgccaactacaaaatcttctgcacctacttctttgttcctgtctgatcaatcaaaacctgtagttgcttacagctcttcttttttcatgttagtaaattattttaggttacctctaaagaaaaagggaattaatggttctgtctagggctgtgtgaagaagtaagaatcaaaaggagcccaggaaacaggaccatacagagtcaccgggagtctacatctccaaaatgtctcatgtcttctcaagcatgccctgaatttgggcccaatatagtttatgcttataaacattttcagttccctcacacatgatgaatgacatggtctttgcatttattttcactaacacaagaccatctcactagctttagtttggactttcaggagaaaaataaattcttttgcttagagagcaagggattggtattttgggataatttatatcagtaactcttgtgcaattacatagattgctatagaaaatgacccagagaaatgcctggatcctttgacttaataagggggtgttggatgcaaaaaaagaaaaaaaaatggatgtcatattcttatacccccaactcacatgcctgaaaagacttttgctttttgtttcttttcttcatctttctcgtagataaggcactgaagtgtagcatcattaaaaaaagatctagagactgataatggggttcaagctttgagcagaagaaaagaaaagcaaagtagccagcctctagctcttactgatacctcaggctgaaagggctgattttgctgtctctcctcagtgtagctggagaattctgacactaaaagtcttcctatccttattgtggctggagaacaaatacctgatactgagaacttcttccctagtgctgggattaaaaacatgtgatccccggtgctgaggtcacctctgtgtgagctgtttctctttaggactggatcaatcttgcgtagatctggatggccttggactcatagaaatccatccgcctcttaatcctgagtcctgtggttaaaggtgtgtgtctccacctcctagcttctggctgatgggattaaattcttgtgcctggcttctatggcttgtgactgtctttgttttctgaatcctcaggcaatctttaataaattataaataatataataccacattgaagctatttttaatgtgttaggccacctcattgtatcccttttgccaccatgtcaaaataagctgctgcatctccatttaaacagagatcaaatccattgctgtgctgcacaggtgtatactgactgcatctcctgaaaactaatttatacattccacacactttctgcttgtgacactaatctgttatttttatagccgaaaatccttagccctagcattagtcaaagaggagaattcacttattttgtaatttccaatctcttcagttattttaaactgacatctcctgttccaacacactggtcttaatacatctctactggagtaagcaacccaagaaagactttttttttttactctaaacacagggcatttgttaccccttaacttcccatcatcctctaaagtttcatcctaatgctgaataaggcaccgagaaggtgctacaaattggttatgccaaacttctcagaggtgtccgtgttttcacaggaatgttaacttttatgtcattaccttttggcttttggatttgtataattttatgtctattatcacctaaatgaatgtattttcttgaggaccagcaacctgtctagtatatcttgtatcttctacagaagaactaactcattggccaagtcctgccaatcattgggattatataaagccatggatatcttcatataaaacaagtggctactgttttgcaataatgctgtatttgatagtttcgtagaggttgaatgattgtcaaacactgaacaaatttctatgtggacttttgtaagaaaaaaatgtttgccaacccttgatgagattctggcatgatatttatgatgcagtcatttatcagaaagatgattttcataaacttacatagatgttttacaaattaactggaaattatcatgtggacagatcatttctagatggtttacataacattttaatttttggtgcatgcaggtagtcttcaatattatgctatcacattgtaatgtaacttgaaacatttttattttatgtgtacacgtgtaaacatgtatacacaccacatgtatgtagtgccaacagagatcatcaagtcccctggacctaaacttaacagaaaatttgagctaccatgtttgtgctaggtaccaagccaaggttctctgaaaaaacagcattcaatctctctatgcttaatgttctcaattgttcttgaattgaatgctacattttgcattttgtaaattgttctattatattcatttcattgtatattattttcatgccagataatacaacaagttagaaatccaagcagcagtgatagcgttgtttcagaatcacaggaataatgtttgctgagtatttctctccctgatatttgaaccaaaaatagcaagtgtgatttattttgtaactaaaatgccaacataaattaatgtttacttcactcatgagcaatcaagatcctccaaggtggggggtacataaatcaaaattaattttacatttctaaattataatgcacttgattatacaatttttataattctaaaataatcaagaattgcttaagaaaaacaagcagttttctcaggaaatttatgaagtgggttagtatatagaaatgtgagataccaagattctgtccgtactgtacatagataatatttaaactatcaattcttattgtaataaaacagtcattattgagtatggcaattctcactttagcaagtggaatcttaggaaatgctttccttgggaattttctgtcatgagcctagtgtttacactatacatagaatatctagaaactctgtttaatagtctcctccactcccagggttattactaataaaatgtttgttttacttttctattgctatgatgaaaccatggccaaggcaacttatataaaagagggattaatttgggtctatagttccacaggaataaagttaattgttgtaacagcagggagcagggcatcaggcaagcaggtatgacatttgagcagtaacctagagctcccatttttagacaaaaccacaaggcagatagagacatgcgtaacactccagtcctgaaatctcaaagcccaaccccattaacatgtttcctccaataaggccacaccttctaatccatcccatacagttccatgttgggaccaaatactcaaacacatgatcccaagggggtcattttcattcaaactaaccacaatgtttcaagttagtctggtcctaaaatctttgaagttcaagcttcacattcatgattaaagctggctccactcaataactgatacctgggttttctccagcttttttcaaggagtcatgactcacttcttagacatgaataacaacaagttgattggattctcatgttttgcttatcaattcatctacaaagatatattaactgcttccaaaaaattagcaacctcatgttaagcttctataatcaaccatgtgaaatttttttttgtacacatgttagtgcttcatttggctaaatatttggaaagcaatgactggattgtatcttaaaagaatgtttcacttaggggccaggaaaatacaaaatacaaaaaagaacaagaagtggtcttgtaaagtcaatagtagaaaaacagagacagagaatttcggggccttgaggaccagtcaagctaatttatgtcattaattctatggaagttacagattattacaaaacaaaacaaataaaaaactggatttgattgtgtaggaggaatgacacctaatattgtcctctgcttgtccacatgtgcacatatttaaacacacacacacacacacacacacacacacacacacacacacacacaccacaagcatgaatattttagtatataagacactgaaaactaggcatctctacaatggtacatcactggagaggcaaggaaaatgcattcctgttgctctatattctattccacattcagtaccatcttccttccgagctgtcttcaaagaggctttcaatggcctccattgttttctctctctgaagaacttcttttaacaagtaattcttataggatgggtgtctgagcccttaccaggttttgacctggaaggaatgacaaactcagctagttggttttgagtacaacataaattgtacttcacacttatgtcaaagcaactcacaagcaaaagcaaacaatcctaagaaccacagacaataggctcacagcagggggtacctctcctgcagctggcggccctttcaggacttctgcttcagaccagcaaatctcctgagggtgtcatggaaatcaggctcagaatcggccgcactcagcttgaagtaccggttgtcaggttagcacaggagagatccaggacatagagtcctggtacactctaaaattcccagttctgagctggtccttaaatagttcactaaatcatgctaatcacactttggcacacttcacacattttcacacttatctacaacagttcggctgcttagtaggcctacactgcctttcctttaatcttccttcagccaggcctttgcctgcctggttgtaacttctgtcataatctccctccagccagacctttgcctgcttggttacaagggccctatgatgggacaaaggtaaatgtagaatcacattttagttttattgaaaaaattgtttgtttctcccccattaacttcaccaaatatctattagtattaaatttgtgtgaataaaggcatgagaaaatgagtataatatatgttgttatggaatagtgacctgaacttcagcttacattaacaaatatattgcatcatattaacaaattctatggaagctgtttgtatgactatggtgaaaataaatttgtatctacttatagagtcatttaaaaactacagaatttttgttgctaggttcttttatttcaaaagcttagatgctcattgtactctggtcttagcttgcaaatgttctgagaagaaatcagttatatttgtgttcatatttctctgcacactaaacagctccctttaattcttgtcatattcttttaacttttcttttcttttcttttaaagaatttgaatttgaaacagcagaaaagatggctaataaagaaatgattctagttttacaacaatgaactgagagctctctaaagatgacaagatgcttgtgtttggtctttatcgctgctgggtggctaggtgtttccaggtccacacatccccactcaggctgaacctcatgggttaaatctgagacatgccaggtcatgacaaatacccaaagctccagaagtcttagagactgtaaaattcccagcagagataccctactggacctgaggaattgcgagtcacaagaaaccatggccatttatgccagaaaccagaaaggaaacagaaatcaaggaacaaaacacccatccaaaagagacaaactcagggatcaatacctagacctataataattccaaacccagatctcaaaatgccagtgtaagaacacagtcaacaacaaaaagggatgtatggtactaccaaagcccaggtgtctgatgatagcaagacctgaacattccaatgcagctgaagcacaagaaaggctacataaagccaaatttatgatgaaagagatccatacaaaggaaatgaaagaaaatcctttagagaaattgaggaaaagacagacaagattggaggaagtcaataaattccttaaagaatgccaagaaggtgaggaaaaacaagaggtgaaagaaatattttaagagcttaaaatggaaataaaagcaataacatacacacacacacacacacacacacacacacacacacacccaaaaaaaaaaaaggggagaattttggaaaaggaaaatctgggtaaatgaacaggaattatagatgcaagaatcactaacagaatacaagaaatggaacagaaaatctcaggaattgaagatatgatagacaaaatagatttatcagtcaaaggaaatgttaaatttttaaaaattcctagcacagcggggcgttggtggcgcacacctttaataccaacactcgggaggcagaggcagggtgatctctgtgagttcgagaccagcctggtctacaagagctaattccaggacagcctccaaagccacnnnnnnnnnnnnnnnnnnnnnnnnnnnnnnnnnnnnnnnnnnncaaaaaaaaaaaaaaaaaaaaaaaaaaaaaaaaagaaaaaatgctagcacatagcacaaaacatttaggaaatctaggaaaccttctggcttttatagtctccatggagacatcaggtctaattctaccatatctgactttatatgttacttggccttattttttgcagtttttaatattcattctttgttctgtatttttagtgttttgattattatgtgctaaggattatttcctttccacttctgtctatttcatatattgtaggcatcttttgatggtattcatagctttccttctcctgtggaaacaaaaagatcaagaaatcacattttgaaatataatttaagcacatatatgtactccaaatactggatttttaaaagcattctaggcattctttcatgaatcacgttcagtagtttctgttgttttctggttttgtttttctttcttttttttttttttgttttaccctctgactatgattgtcaaatgtcaaataataacaatatgtaagaaatgccccaatgtaaggtggcatggtccaccctaccttcccagatgtgggttggatgaacacatactatatgaaaatctgaaaagaaactttgtgccttcctactgatctgtgccacaaggagacatgagaaagaagtttttaatgtgactattcctgtagacattttataaagtcaagccaactacatcacagattagtcgcctgtgaaatttctattttatgctagctttagtgtatagtaattgtataaggaatgatgcttcattatgacatttgcttatatacatttgtcttaattacacttctattgctgtgaaggggcacaataaccaagacaactcttttttcttttttctgtaccaattgttatttattactaggatttaaacttttttttaatgaatgaactttggagcagcttgccctacggcatggtcttgtctacttacatgatagcttaaaagttgagggagtctgtctgtctgtctgtctgtctgtctgtctgtctgtctgtctctctgtgtgtgtgtgtgtgtgtgtgtgtgtgtgtgtgtgtgtgtgtgtgtgtgtttgttgattttgggctctctcttggcatggtcagagagcaagaagcatagaggcaacttgtggttgggctttttacccctgtgtagaatggctggatgaatgcagctgtgttagcagaggcatctgctttgttctgtgtttgtgagtttgtcctttcattataccccttaataaattggttattagacttttgtgaattcttattttactccttcaacaaggccatacctcatccaacaggccacacctcctaatcctcaccaaacagttcgtcaagtggaaactgaacatgtaagtatatatgcctgtgagggtcattatcattcaaatgaccacaacatgcattatcctgtctcattcacccttattttccccatacccatttcacatttcaaagggtcactttttatttgaatgtcctgcctgttatttatctggaattccacagataatgagataatataggctatttctgtgtgattctggcttattttactgaacatgatgatcttatgttcaattaattgtttgccaaataccccattctttgtttcatttaagcctgaataatttcattgtgtatatactccaccttgactctatgccttaaaccatgaaggcatgactagactgaactgagaacttacagttgtgaatggcacaattaaaaccatagtattggtacattttcatatacttattcaggcaaattcatttgcccattttttgacttgatcattttatcttttcttgtttgagttaaagtcacttatatacttagatattcatcttctgttgcatgcagttatttacaggttgatggtatgaatgcagggtaaggaacatcagcaataacatagtaaagacaacagaaaccagacagtattcacatcttgggtaaaacattcatgcaatgtatgtttacatatggttgtatttactttgcaagttacaactgttttatcatactacattttaagtatctgaatgcagaatatgcacatatacccataagatgagtcttccagtcatgtgcaccagcatcacatatgtaaaaattttcccactaaaatataactagataaaagaatttctggcagatataagggaaacttagtgaatattttaccagagatttatgtgataagctttagttgaatatagaccatttgccatatgaataaagctttaaaacatgagaggaaaaagaatttcctaaaaacaaaaatttggccatggttgttacactgaaaatatttctgacatattaaattatacaaggaagaacttgttttaatgtcttaaaaataaaagatagtgtctagttttgttttttgttttttttgaaatttctctcattctttgattgaagggtcttaccacaagctagacaaatttaccatagttggatatcctcagtctttcttatatttttttgctgaaacttaactcattatgaaatatttcctggctcattgtaccagatacaaattggttttatttggtcatgttgtaattatgtagagagaagcatatcttgccaataaaattaagaagccatgcttgccattagaagaagacacactcattaattttcaatgatatattatatttgactaataaaataacagaaaggtactctgtttaatgggacttcaaagggtatatctatagattcatttgagatgcaaatcataaatgacatagacaaaaaccaaacaccagtgtacagtgaaacaaggaaggaagaagcacatttcctaagcagaccctgactgaggccagagcctgtaagaagctattgttacgaagcacaagtgaagcctctgtagaacatagtgtagaacaagccacaaacaggagaatggaaagggcaaaagctcaaaatatgagccaaatccctatttgggggaaaggtatgtcttgcctgaaacatgctacaagcaaagctaatccaacattaagatgctgagtgccatgaagggtccaaaattatcatagcaatgcccacttgatctacaaagcaaactcaggtgaaatattgcatataattagagagtaattgccaatatagtttaccaatattggcaaactcttaataatctaataagttaattctttcctgccagcaggtgattgacatggccttgggaccctgagatggcaccagtccagtttcctatttttccagacacatggagcagatggcatggtaactcctctgtttacactgaaatgatcccattatcattttatttttcctggcacagggataatggataagggaattcttatgggcagaggaaaacactttcaaaaattatacccttaagcaatacaatatatagttggaaagaagaaatacttcacttgactgggaatctataattcataatgtaggagttgtgttactttaaacaatttttaaaacatatcatgaataatcttcattgtaagccattatttaaatttttaatttttaaatttttattcaatgattttacgcagatgggtgttttgcctgcctgcatacctgtgtgctatgtctacgccttgtgcctgtggaggccaggagagggtatcaggaactgtaattgcagatagtactaagctgtaatgtgtcactgggaattgaagctgggttctctggaagagcagacagtgctcttaagcattgaattatctctccaatttcttgattgtttaaaatcaggtaattattactttagaagaagcagaaaacaaattttaagaacaatgtggtaaataatttaaatatttaaatattctatgagtttcacttttctatgtcattgtaattatttagtttaactatagaaatgtttgttttgctgattcagttcttgatttctttcttttttttttttgcaaaacttaaaagggtttttattcagttaataataaaagaaatttccaggaaagtgttctgtttactctatacatttcttcagattttcatgataaaatttagtataaaaatcaaagtattagtacagatatttgtttgttgaagagatagaaattttttagattgaatatgttctatagatcaataactattgtcatgagtaaaagtgcttaccttaaaaagcagtgtcctattgtactattatgttttagggtgtccattgctgtgaagagacaccatgaacacagcatctattataaggaaaacatttaattggatgtgtatgggggtaatgtacaattccagaggttcagtcagttaccatcatggcagcatgcagattgacatggtgatgaagaaagaggtgagagttctacatcttggtatcatgagcacagtaaacatcaaagcctactgccacagctattcatgtcctctaacaagagcatacccactccaccaaaggcttacctcctaatgtgattatggaggtcaattacattcagtaattaccagtgagtaaggtattttcttctgtatttttcttgcaaagtacaaaatatattaaactaatcctatcttttatcatcataatataattgtgaaataatccctatttttgacaatgctctttacttatggaaaaagaaaaaactggtggttagattaattaaaaatttctacacactggatcataagaagaaagaaattctcagcacctgtgctatgttcaaaagtcttctctgcaagattattccccactttttccctttttaaatttcattttacattccaaccacagttctccctcccatccctgctaccaccctcttgactccttccaacccccctcactgacccctagcccactcccagtccattcctcctcatggataaaggcttccatgaggagtcaacttagtctggtacaacaggttggggcatgactcggcccctctgccatgtattaaaactgaacgtggcatccatagagaatggactctaataagatagctcatgtagcaggtttgtatctgtatcatggttctactgccactgagcatggtatcccacactaagggatgggatccaagaagctagctcatataccaggtttgttttgtggtcttactgccagagtcccctctgatagtccaagtttcacaactgtctgccacatatggaggggctagtttagtctcctagagtctccacagatgtaggtctagagttcatgagtttccataagcttggtttaactgcctcagtagttttctccatcatgatcttgacctcccttgctcatgtgttccctcctccttctctttgactagaggcccagagctccacctggtttttggttgtgtatctctgcatctgcttccatcgattactggaagaggattctatgattgtagttgcgatatccatcattctgattgcaggggtagactagttcatgtgtccattctactattgctaggagtcttagttggggttctccttgtggattcttgggagttaccctaacttcaggttttcccctaagcccatagtggctctattaagattttttttttcattgcttttctactgcatccctcaccccctaggccatctcattccctcgtgttctcatccctcttgcccttaccacccacacccccgtttgccctgatccatttcctctaagggtcctccttgttacctagcttctctggagctatggattttagtctgtttattctttgctttccttctaatatccttatgagtgagtgcatactatgcttttctttctcagtctgtgttacctcactcagaatggttgtttctagttctatccatttgcctgaaatgttcatgaggttatcatttttttaccaataagtagtattccattgtgtaaatgtaccacattttccttatccattctttgtttgatgggcatctaggttttttccagtttctggctattataaacaatgttgctatgaacattactgagcaaatgtccttgtagcatgataaagtatcctttgggtaaatgcccaagagtggtatggctgggccttgaggtagattcactcccaattttattagaaacagtcatactgatatccaaaatggctttaccagtagtggaggactgtctctctgactccatatcctctccagcataagatattcacagaattttttatcttatgcattctgacaggagtaagattattattttgatttgcatttcctttatgattaagaattgagtactaccttaaaaacttttgatcatttgagattcttttggtgactattctctgttttgctctgttccccatttatcagttgagctatttgtattttgatgtcaattttcttgatttctttataaattttggagatcagccctctgtcagatgtggggttggtgaagatcttttccctttctgtaggctgatatttttgtcttattaacagtgtcctttgccttacagaagattttcagtttcaggaggtcccatttattgactgttgtttttagtgcctgaggtactggtgttgtatataggaaatagtcttctgttgccatgtattccaggctacttcccactttctcttctattaggttcaattttgctggatttattggaggcccttgatcctcttgtatttgaattttctgcattgttatagataaggatatgtctgcaatcttctgtatgttactatccatttatgacagcactatttctcaaagagatttccatttttcattataccattttggcttctttataaaaaaaatcaggtgttcataggtgtgtggattggtctctcagggactttgatttgattcaattgatccacttgtctgtatttatgccaataccaagctgtttttattattataactctatagtagagtttgaagtcagggatgcctccagaagttcctttattgtacaggattgttttagctattctgaatctttgggttttctatatgaagttgaatatttttctttaaaggtctgtgaagaattgtgttgggattgcattgaatctgtagattgcttttggcaggatttccatttttttattatgttgatcctacctacccaagtgtatgggagatttttcctctgtctgatatcctcttcaatttctttctttagggacttaaagtttttgtcatacaggtcttgtttggttactgttctgccaagatattttatatttgtggctattgtaaaaggtgatgtttctctgatttctttctcctcatattttttgttagattcaaggtatgtatcctaagttgtggtctttgatctttttggagctgagttttgtaaaaagtgacaaatatggatgtatttgaatgcttctaaatgtagctagtcaatttgatcagcactatttgttgaagatgctctcttttaagggtatatttcttgattctttctaaaaaaaaaattaggtgttcacttgtctgtattcttttgtctggaacttccatttgattccaatcaccaacatgtctgttgtgtcaacatggtgttgtttttattaatatagatctttaacaaatcttgaaattgaggatggcagtaactgttgcagttctttcattcttcaagatatttgacccatcctggttttgttgttgttgtttgtgggtctgtgtttacaaatgaagctgaacattctcctttcaattgtatgaagaattggaatacactggagcaatagtgtcataaatattgtgggagtaaccaactactgtctatttagacttaaggccagtccattgaatggaacccatgcctgacactgcttggctggccaagaacccaagactagagactagatagtccatggaactaggggtaaaacaattatttttttaaaataatacaacaatcaaatgactcctaaatcagtgtctccctcagccattctatgagaaatagaagggaattagtacagagacccacaactaaacaacatacagagaacaagagtctttggaatactcaattctaaatgagatatctctatcaaactcttccgttcagggattagggaacacttcagaagaggaggcagaaagattgtaaaagccagaagagatgaaggacaccaagtaaaccatgtcttctggacacaacaggactgatgcaaatatgaactcacagacactgtggaaacatgtacagagcatgcacagattcaaaaaagataaaatcctagtgatgaaaggtcaaagccgatactatatcccatccctaacttagaagctttctctaattgacaatcaattgcaaagaaaaaattagtgttctccaatgtagtctcacttaagtgtaggcaatatgtaggtccatgtccagcagtagactgctaacataaaatcaactaactcttgttttctagatttttgtgtttcataatgcattgcttcatttttgttgctgttttttttttttttaacttactggtgttttgttagtatatcatactttctggttttgtgtttttatttgctgtttgggaggagttgtgagggggggagtgggagtttctcatgacttttcaatgtttctttgttttgtgtaatgggttatttgctttgctttaatttttcctgtttattttctaaagagaaaaaaggaaaacctagagttggatgcttgggaaggtgaaaaggatctggaaggagatcaggaaggagaaactgattaaaatatattgtccaaacttttatttaaaaaagaaagtaaattaaataaaataaaaatattttggataaatttaagatgattaaagaagcacaaagaaagttctgaatttcaaacaatgttgaaaagttacataccattttgaaattttatttcggtctgtcctttttcttagtaagattttttttaaatggatggataattgataagacacacgatgaatggtttgtagaaggtttggaagacatttaaaatattgcaatttctttcagtatatttggcttcagtgtctggaaaatatgggaacaaagaggatcaagtcaactgttctctgtctgaataaaatggagacaatgaggaccaagtcaaatggataaagaggaaatgggacattgaaacaaagcaaactaatgaagcagtgaatttgcagtttgatgtgtttagctgaggtttctgcagcatgttaataactatatgcctcagtatagattttggaacatcttttctggattcagaagaatggaaagatgaaatattatggtatacacctgggagtagagcagcagagagtaaagacaggggatttaatggagagatggatgcatcctgcataatgctactaaagtaatttatccttacaaccacttgtctctgaataatttgacctattttaaatgttcagattactgaacatttgctctgatctgctgactggatttaaaaaaaaaaaaaaaaaaaaaaaaaaaaaaaaaaaaaaaaaagggctctgcttcagtttaaatgagggtaataggtcaggagatctacaatccagtctgctatgcattgatttaatggaacaatgttagagcagaactgattcaagcagaaggtgaatctaaaaatatgatgaggagaatcagatgaccacaaatagaaaagtagttcacagcaaaagaaagattgattaatgctgcagaaaggacaaaagagggatttgaagttgtggcactggaattctaaccaagtcatcatatgagaaaaagaaaactcatggtccctgaagagatgaggaaactgaatcaacaaagtgattcctttctttgtgagatttgattacaaagggagtgtttaagataagataatttgcagataagaatgcaaagctaaatgatggctctccttttattttctaaaagtgaaaggcctaattcaaatacaccaaaaaatgagtgtgaccctcttcaccatgtgtgttttggtcagtgtaacatgactaattatatcaactttatagctcatgacgctacttggtgctgtctagttcatgtagtagacttcaatgaaaacgtaatttcctctcatcacagggagggccacaggagttaaccctatggattcatagataattagaaaacaaagtattactctgataaggaaggctggcaagttaccaaccatcaccaccagttcactataaagttaatgaaagaaatgtgaaaagacacaatgtggatagatcttatttcataaggagtggggacacacacacacacacacacacacacacacacacacacacacacacacacgctgaggatgagaagtgagcattggaaagaaggaggccacatgaatgagtctgctgttactttgtacttgcgagcctctgatgggttttcagccagtactatacgctattggaatgttttgctcagaactgataatttgggaataaacaaatcaaagtagctgttgtcatctagtgatcttgttactggtacccaattccctgtgatgctacatttttattatatttgggcattgagagaagaaataattaaaatgtgtttcataatccatgcacatggtgtctaaaatcatcaaattaatatttcaaacaaaggcttcctagagtcaccgcttgctacagaaagggatagaggtttttgtaggtgtgttcactgtatcattgaccaaattcaatgacaccaatgttgtgaaaaattgttggacacacttcaattatcaaacctataaaaggggtttaaaatgagaaaaatgctttcatgctttatttgaaatctttaaaagtcaactgaaaatttatttgcattgattacaacattttcatatagatgatggagggaaagtaagatccttaaacatttcttgacccccgaaaataattattttctgtgtgtcaccataatcaatgaatatttttgaaatatattcacttgctttgttggggttttcatcagttactcatctgcaaatatgataaaatgttgtgacaaaaaaacaacttatggatgagatagtttatttgggctttcagttccagagagcatagtacatcatggtggagaagccatggcaacacacagaagcaggaagctggttgatcacattttcatccacacacagaactcagaatgagacaatgtagaaggtcagtccatagaccttcaaaaactcatactccagtgccatacttcatcacccagcaagcctctacctccaaagggttccataactttcccagtagagtcaccaacttggaacctaatgttctcatacatgagcctatggggggcatgtctcattcaaaacaaagcaagattctaagagccaattcaacatggacatcaggtgtgcttcagtaaaacatgagaaagttgttactattgttgaatatttttacttttataactgacatctgataatccatgttatgtaatctaaatagtactcaattcctgtgctactgacatacttatctaaaaaaaagactatttgccttatagcaatagccaatatcagcagaacaaagattaagactgagcttgagcttttaccctaatgcttacttcctccaatccatctggtcattgtatagattccttgagaataccctcatgtgatgccttccgagattacaatatgtgacatcatagtcttttatacatgtcaaaggataatactagtaattgtgttaagaacttactgttttattaggatgagattaaagtatttatgcatgtatttatgagcaaaacagtagcagttcagtgttgtctaggttatgactcctgagtacagggtaagccacatataccatgaaggttgaattataaaaacatcactattctatatggacatattattctgagaaagttccatgtctagcttccttaagatatctatttgatgatgcagagccttcagaaaaaggaagacatgctagtgtagacacccctatttctatgactgatctgaaaattagacttcacaccatggtaaacaggggaaatctaggcatttattttccatttaaagatgcccaggagatttcagtagaaaaaatatgacccacagaaagtgtgagaagcataagttaatggtcactttatgcaaaggatggtggtctagagggatgataaacaaagagttctaagacttgactaagagttgagtcacagcagccatgagacagaggcagaaggtttgttttggctttcaggccagtcttggcaacatagcgaatgtcagaacaacctgagctgtaatgtgggacccaggatcaaaaatatacatttttaagatccaaaaataaagaaaggtgctgatactagaggcagtaactagtgataaatggctaagaaacagattgaaaatagtgggacacagacacattcatagacccatacatgctcattacaaagtcaattcctaatttttgatactaaacaccccctctctcttggtatattgatagtgtctgtcatggctaagattggttgtcagcttgacagcatctgaggtaaacaaaacataagcttcttgggactattgtgaagtattttcttgatcagattatttgaagtaggaaaaccaccctaaacatgggctgcactttctggtgacaaatccaagaggatatggaagaagggaacttcaattttatcttttggcccacactagtgttggcaagttcatctatcctgttgcttcaccattccttcacaaatattagaatcaacttttggacttcctctgtagacagagaatcaatagctctccaggagtctccagccttccagcaatcggttgggacccctgagacatccagccccatggaccgagcaaacaccaaattctcatgttctccagcaagagaggacagtgttggactctccataccttaccctgcaaataatccaacaaacccctgttgtgggatatctccactgaatactataaatatgttttattattattggttaataaaaagctactttggcctataacaatgcaggatagttttaggcaggaaatccaagcctgagcaatgggccaaccagtttgtcattaatagtgagcctctgagtgaccaagcaggacaaaacaacctccatttacaaatccccattgaaatatacatatttattctttctgttcttttcttgagagagaagaaatacagcatctttctcataggaaatttgattacttgcttttaggtgagaaaggtcatacatgggaataggaattccttcttgaaactcaatttctcaagtagaagtagagacaagtaatcaacatcttaatgtgccatattttagagtggggcgatctggaaacattgaaaagaaaaacttatcaatgttatagataaagaacagactcccattcaggtcagttatctagcatctcagactgaaactgcaatcaatttcagaaaaacatctcagttgaaaaattaaaaaaaaccactgtcaaacaaaccaagtaaaactgcttagtggcatacttgtaactaatggcctccttgaatttggcagctatggtttccttgggctgagaatgaagaaaagggaatcttggtttgcctcttcttgtgacttgtgatggtaggtgttgtcatttgtatcacaaataaactcatgtgttaaaaaccttgatcaatcctgtgtggcatgacaggatctagtgaagaagatagttccttgggacccatgctcctggagtggtaatgaggactctagctcctccttggatctcacattcattacttcttaacaaccaagaggttatgaagccacttctcannnnnnnnnnnnnnnnnnnnnnnnnnnnnnnnnnnnnnnnnnnnnnnnnnnnnnnnnnnnnnnnnnnnnnnnnnnnnnnnnnnnnnnnnnnnnnnnnnnnnnnnnnnnnnnnnnnnnnnnnnnnnnnnnnnnnnnnnnnnnnnnnnnnnnnnnnnnnnnnnnnnnnnnnnnnnnnnnnnnnnnnnnnnnnnnnnnnnnnaggacaaagtcaactgttctccttaaatttgttttgtctctgatattcattatagtaccaaacacttaactgtgttcttttgtaaaattaatagaaaacaactgtaagaaaattaattctttactcatgaaaacagggttttttttatttgatttctttggaaataaatagtttcatgatatttttttatttgtaacaatgctgtatattaaagttaaaaaatcaataaaggctgtttacttggaagacaaaagtacaaagaacaactcgaacatagaaatatgacagtaaggaaaaaagcagtcatgaaaggttttgttgtgaagccagtttccacagtggctatgtggagcttctatacaatatgaaaactgatgtggaaaagtataaaatgcacaactaaggctgacctggccagaagccctaggaaaccaaggcatttctattccaacattttccagtccttgactgaaggtcattgggaatcaacaaccaataaaacttaaacaatgaagactattttttttcctgcctcaaagagaatttgtactgcagttatatccaacaactgactctttgtgttttatttcccagagctgaggacaagagaggttgtttgatatcctgagcatgtgatgtagcaaatagagactagtaagtttatgttagagctgggttctgtgtttctttgttaaaaactcaaataatggtgatgagagcttgagcacagggaaacaacaaaaccacataaaaatctcacttcctatgaattaccaatcaacaaatgggggttgggtatttgaaggaatcctctccatggtacaaaggaagatggatatgtgtgactggctctctggagtcctgacctgttgacatctttctcagagcactgagaaacagagactttggcaggcagcagagccccgttacaaactcaggattcattccatagagattcaattcaacccactgcattcccaaaggtttcactgcctcccccaaatggcaccatccattaaagacctggttttgagtcctgtgggccttgagtgcactgaaaacacttgcagattttccaattctccttttttgtttttattggaaactcattctgtgacattacaggttctagttacaacactaaagtgacaatattccacaatgacatcatgattggacagaaaagcaaatagtttattttgatactaataaaatttactatttgaaatatatttggctttttccttctgcctttaacattatttttttaatgatgagatgtaatttcaagaaagcatttggccacttgcatgagcattgggtgatccaggaccataataggttataaggcactgcagaaacaagaaaatgccatcagggatacagttgccaacactgattgaagacaccttgttttctggcctgagacagtcatatgattatgagtggcagtctgtatgtgacagacactgcttgagagatggtgtcagtcacaattatgacagagagcaaaatcagggctgccacacattacacttggtatttccaaagcagcttcatgatctgacagccactgaccttcttaactagattatttcccaaacagaaataattttatcatcaaaacaagatagactatgaaaacatttgagagaaacattatctctttaacttttactttgaagcagacatgcctagcctaatacccaatacctggatgtttctctgtgtgcacttgtttttttttcgttccttcctttttttttctttctatcccccatcatcctttttgtctccctttccttctctctgagtttatgagcctaaaatttctgtcataggactacattcagaataataaatccagaaatattagctctactttcagacaatatttgtcctatgcccaatagattctttatcacacaacagttgatatgaaaatgagatacaacttctagaaatcccaatgcaaaagaaaactaaaggccaaacctgagcatactagtgcaagtaaacttgacgagggaagatactttgactgttctcccacaatgacactactttctcctacagaaagtgaaacaacataggcaaacaggattgcttgaatacttcgttttaacttgatgcaggaacaatgaaggtctaaaattgaagccaagtcctagcattttttccaaggtggagaaggtcagttggcttttaaatctatttatttgataaacttttagtattttcaactttgtagtaaaatcactgaagggcagaagtacaggttagtggtatttaaataattttattatttcaactaaattaaatggcccatgtttagtaagtctgcattcagatctgcactctaagtaagagctccaccactaggaggcacttgcccaacagtgaggtgggtacttactaacactgctgtgtatccctgtgacccccacccccaacaccactctggaggcactagaaggtcagacataaattatgggaagttgttagcttgctcttgttttgcctcaagtatttcttgctaaagttaccttaatatttggcagcaaatatcatttaaatgtttaaagatattctgcaacactcaataaaaataattattgaaactttcataactgcttgtttccttgttcagggcatttctgctttcacaatggactatggtaagctgagtccaatggtacatgtttgtgatcccctcacaggagggtgaagaaggttcaggagctcaaggccagtaacttgaaacactgttctgcactcccaccagacaaatagcagaagaggataaagagagagagagagacagggaggggacttcaaaggtactttatcatatagaaaatcaaatgtcctctgcaaatggaagaaactttggaaagctggcagaaggtcagaagtatttaaatggaatggtttcatgttggaagctagccaggctggttgttctggaggtttatttgtcaagccttggcgctatccatactcaagtgattattcacaatggcctaatgttttaatatagaaacaaaacaggagctggctgttacatatcaaagggttgttctgtttccctgcacatatttttcctactcctgtattgtatttgtctttttcatgctttccttccttgggacatttaagtcttggatgctgggagcagcttctattaggatctatgagaagttccacaaaagaccaccattcacatatgcaatcagcaagagtgtttatttcctataccagcatatatgaggctatttgcttgacacaaatgcccatgaccctgataggagcatgtagtctctttttaggcacagctaagaagagtttcaggaacagtgaggccatcttaaatgtaattggtcaagcaagcatcagttacattagtatacttttaattgtgtgaggttttatctctgggcacatttgcacaagcttgggaaagtccagatgtgacctagaagtgagactgggggagggactgtaggacttatccttgagatattgtggggctgactgaaggtatttttcctgttccctcccttggcctgaatgtaatttgttgataaaaggccctttgtttggagagacaccagtttgtccatctcagagaactggaacttaaattcagttgtaaaagtgggagagtttaatcccttcattttctgaagtactctgaagactttttattcttctgtacaaatctttaaaagctagaagaggactaggggaatgcctcagcacacaaagttgattgttgcaaagttaaacctacgtggcagaggacctgtagctacagttggtataaacaccctgatgtgagtattgagaactgaatccaggttctctgaaagaatagcaagtattcttaacagctgaaccatgtctataaaccttctatataaaatttccttcagcttatatttccattaaacaataaaagcaaacaaaaattaacttttagactgcagtaatctgtagacatggggaaagcaataaaatatttttgtaatttgagtccttcaaaaaaacaaaaccagaaagggtagtgataaaatgactggtaatgacacaatgactgtgtgttatactcatagatcaatgtcttgaccaaccatcatcagaaaaactccttagtacaacagatggaaatagagacagagacccatagctagacaatatgctaagagtgagaaaccttggaacatttatctcttcatgggataccttcctggcttggaggaaaccatgaaaactaaccctctaaagcaacattatcaaagcatctatgaatggacagagacttaaacaccatgcacaggaaattcaccaggttctctccatgtttgttatagcttccagtttaatatttttatgggactcctgagtgtgcaaatgtaagggtgattgatccttgtgccttcttttgaattccttctgttggtttgttttgtccaattctaaagcattagtttttgttttatataattacatttcattctattatttacaattattataaagttctcttaacaataatctctgcttttacttacaagctttcactcatcactaagattgcctttagtaagaatatcctatctgttgtcgaagctgcccaaactagggtgctgtgttacagcaagctggaaaccaagacagaagtggagagaaaaattttactagaaactctcctggatgaaacactgttcactgtaacacaaaaaataaaagatccagagaccgatattgatgttcaaccttcaagctgaagatcagagaaacaaatagccaagcccctaactcttaactctatcccaggctaaaaggtcatcctggctccaccaaaccatagactgaaatctcagaatttctaagctctcctcaacagggctgtagaatcctgagacttcaatgtcttccaatcttccgtgtgcctggagaatgaatgccagctctgagaccctgttcctatcttaaatacctctcatgagtcctggtattaaaggcaggcatgtgatccaaagtgctgggatcatcttgttgtgaactgcttctctttaggactgggaacattttgtgtagctcaatgtggccttgaactaacagagataagtctacctctacttcccaagtgatgtgattaaaggtttgtactaacaaaggtctacctctacctcccaagtggtgggattaaaggtttgtactaccactgtctgccttctctagctaactaatttggctgactttgctttctgtaccctcaggcaagctgtaatgaatcataaataatatatcaccacagttactttagagcaccaaacagtcctgaaaacaatcagtgttgggctttaatcccctataaaatattgatttatgtaaaatagctaaattataaacaacttaaatgtttcttttgtaactgtttaagataagatagtctttttgtttactatagaactttttagatgaacttgaatattcacccaagttaattctttgggggattcatatttgcaaattacagtgaaattatattccctaaattagtttcagttatcatattgtcctgcttcccaagccttaactaaattacacacacacacacacacacacacacacacacacacacacacacaaacacacacaacactcatcattttattattaattttattattaatgtatattatgtagtattatgtataatgtataatgtagtattgtatgtatgtatgtatgtatgtatgtatgtaatgtataatgtagtattaataagggactgagtcctaaggaaacaacatccacagatgttcaggcatcttatataaaatattttacatagcacctacatacaccttcccatatactagttataagtagtctttagttacttgtgatatctaataaagtattcattttactgaaatagttgctatgctacattattgagaaataagaacaagaaaagaagtatgaatgtaaatctgttcattacaagtaatcaaaaaatatacttgatttaaggttggtcaaacacatggatacagaggatgaaatacacacacacacacacacacacacacacacacacacacacacacacacacacaaagtcctgtttaataataataagctattaaattgataataataattgatagttgataatggataactagcaatattttaaaacctatcttggtattccatggcacagtttaattgacacctatgaactctaaatcctgctatttcctgggaggcacattgcctattgaagtgtgaggcatggaattagtagccagtgtgtctcacaacctttagtttaaatatatgcagtaacttctaaacccaatgtgataagtaaggagcaaaatttaaacatttatcataaacaggaggacacataactaattcaaaagttcaggatcaattaagagttttcttcatttccacccccagaagagagggtggaagagtcagaggaccagagatttgctgtgagatttggtctcctaggaatatcagaagcaacagtcacagggtctcactaacatgacttgaacaatcccaatagatatggtaaagtgtagggggaaacacctatacaatgtaggaaacaccttcacagtgtaggctgcaaccctacataaagaactacagacaacaaaggaatgctgagagcaggagaaacagtcttccccttgttacccatttctaaagggtcagcctttaaaagatataatcaagtaggacacagactgagagtgttatatttaggaatatatatgtacatacatatatgtatgcatgtatctataataaattacaaaagagaccatgaatatgaaataaagaaggaaacaaaatggaaggaagtgaagggaggaaagggaaggaagaaaagatatatttttttgtttgtttttctgagacaatgtttctctgtgtagctttggagcctatcctgtcacttgctctggagaccaggctggcctggaactcacagagatccacctgcctctgcctcctgagtgattagcatatcaaaattaaatttaaaaaacttcatatccatttactcttatggtattaaatctatatattaatatcaaatatattgagatatttatgaaaacagttaaattatatcatatcaacattaataaggaaagattaaatcataatggagactaaaaaaggagttgtttgtaggaatattgagatgactcaggagtgaagagtgcttcctgattttccacaggacccaaagtcaattctcagcacccatgttgagcagctcacatgtcctataactaaggttccaagagatctaccactctcttctgtggactctggggccactgcacttgcatgtacaaagtcaccactcttttacacagacaaacatgtgacatgaaaaatgaaaacctagagacaggttcaagcttcaagctgaagatcagcgaagacatgcagccagccagtagctccatcctcagtgtgaaaggactgccctctcctcagcgtgactggagaataaatctctccaccaaccctcagactgcaatcctgtctccaccaagtctcagaatgaaagggtgatcaggctagctacaggaatctgcagactgcaattttagactgctgcctctcctcaatgtggttggatactaaatcttttaagagaccctctgtttcttccttttatacctccatattgctgggattaaaggtgtgtgatccaaagtgctgagatcacctttgtgtgagctgtttctctttaggactggattagtttcatagagctcagtgtgaccttgaactaacagagatctgtctgcttttctcttcagtcctgggattaaaggagtgtaccaccatcacttggctctatggctaactagtatggctgctaagattaaaagtgtatctcaccattgcctagccctatggcttgtggctaactttgtgttttgtacactcaggcaagctttggtaaatcataaagagcatatcagcacacacacacacacacacacacacacacacacacacacacacacactttaatgaataattaaaataaatttgtagaaaagacttgctctgttttcgtgccagcttcccctgtaatcccaggagtcatctagttggaagcagaggcaccaagtgggtcagaaaaaggcacacaaagctgtgggaattgcttccagattaagtcacaatggtggaatagcttgattgcaaagcccatcttagcagtatgaaaagccctcttttcctgctttggacacattttagctctgttttaataatcattatgtatattctttttcccattctatgattctagctgacaaaatccatgccttctaattttcttgaagtggattagttgtcctacatattagatctatagattcctgagtaaaagcagaactactaatgctatgattataaaagcagttaaaattccaaagtttatctgctacaaagttgtccctaccaagcatcagaggacacacctcggaagccagatcagctcataaccggctcttggaatctatggtgtgaagacaccaaaggttcactttcctcattatgtctctgtaaagatattctttatatattttaattaattttagttaaaacaataacatacatttatgaagcatgatgagataatacattattcacaatttaatattttctacagtggtactccactttatgtgatatatgtgtatcatgtgtttgtgtgtatatttgagagagagtgtgtagctatgcatattcatctgcatgtgtgtgcctctgactgctgcacagagactgctaaactcatgcatcattcccaagagtaacccacactaggattctttgttagggtctcttactgcaaaataagcctgaggagactcctttctctgtcttccagtgcagagattacaagtatatctcactataatctgcttttatttggggtgctaaggattggcctcaagtcctctggctgcttcagaattacttgactaacccagccctgtacatacacaataatggcatgtgcaatatcttttattcacacaattgtcatagcattggagatgaagactaactccacatttcaagatattaacctatgggaactggctacacaagtaaaagattaaaatagcatcaacttatagaattaactaatggtatagtatggatgataacatttttcttaaatggtgtactaaatcactccaaaaagcagtgaaaagtgctaccacattaggcttgctcatagttctcacatcagctagttgctggcaatatgagtagtatgccacagtcatgtttgctgtctgggattgggacaccctatcagactgtgtgtggaacagttgaaattgcttctgcatctctcatattctctactccatctctcacatgatctctccattgtaactattttagcatagaaaacatcctgagtatatcctcaagattcctatgctgcatggaagagtgaaaacaagcaacacatagcctttcgattcatggtttggctcagaaggcatgtgatgaccatcttaccagaatctagtttcctcagcagaactctgtccacccctacattactaagagaagatatagatgtacatgtctttgaggcatgaagtaaagttccccactgcaaagactagcaagtttttggaagtttaaagggtgatctcactgggagaactacctggtgatgcacacatccagtctacatgctgactccaaaatacattgccgagaatcaaatgtaatgtcatccccatatgtgacactgaagcttgattcaaggttacatggcagcactttcctccaggattctacttaatgatcagtgttctttgtgcaattggctattgtggccactcatcacaaatttctactaaggtcttaaaatatgactgctgcaagccaagaattgaatattaaagtgaaattaatgtgaactcactttaatgtaatgtaaactgtaatgatatagctagtgagcactgacaggagatgtcattctgtaaatatgtctctcttattgggtgatgaataaaacactcttggccaataggagagaaagataggtgggactaggagacaaggagaattctgggaaatgtagtaggaagtcaccatgtgatcctgggaggtgaggaagcatgagtctggctttcacgttaagataaggccttgtagaaaaacatattagtggttattggttaatacttaaaacagagctagcctataagaaatcctagtcaccagccaatagcttataattaatatagtgtcttctgtgttatttgggggccaaaggggcaatgggactcaggtgggaatccggtaacaaagtactaatttttcacagcatagccattatgagataaatttaagatttgaaatgcaattgatgccaatttattccaagtactgtggtacttcttttaatgcaacaacaacaacaaaatatttagtttaaaggattaaatttccaattgagatgtttttgctcagactcaaaattgaaaatcatttcatttttttgtgagcaaagacaatgcaaatttggagagctttgatatacaatgtctactattaagtgaacactattagctcatctagttataggagtcaattttgtgtatgtgatgcaacattaaaaaaggaaaagctcatattctccaagaagctagataatcatgaaataacaaaaacgaaattaaagaggagaaatcaagattatgttgaaaccccttgtgtattatttctggtctttaaatctgatgatttaaagttatactgcaagcttttagatgaggttatactgcttagaatgtgcaggatttgtatcacctgtgaaatagtgttggtaattaatacatgtcagatgactttctctgatcaaggtgtgtcaaagccctttttggaactgtaaaatacagtgattctcaggccattagtgtgaaacagccttcactaagacttactcttataatggaaacatcacagctcaattttttaagggattacatttcctgaatataatatttattctaatatgaatactggacagataattttcatcacgggacctttaacatatgtgactgtacacatgttggtaagaaggtaatacatggagtgcagcagggaagagctccaggttttttcaatttcttcttttctcatccatggaatctgattcatataattaatcattttatgttgaactagtgaattcctttcctttttctaaatgagaagtgaagtttggaaggcaggatgaaaagaagtaattaagattctgtatattctgtgagttccaannnnnnnnnnnnnnnnnnnnnnnnnnnnnnnnnnnnnnnnnnnnnnnnnnnnnnnnnnnnnnnnnnnnnnnnnnnnnnnnnnnnnnnnnnnnnnnnnnnnnnnnnnnnnnnnnnnnnnnnnnaatggtggagaggatttccctactgtttagctaccacaggcccccttaggggaaagggacacacctgtgaatgcagtttagagagacaaacacagcatgggagaaactagagagcttggcaggtagtagcattgaggttcaggactgcatattagtgttccctgctctatccagaggtgaagaaagaaaatagaaaaaaacaagtgaaaatgatcccatgttaaagaagtctgcagactacatgttgtttgtttctgagaaaacctgtctgttcagtttatgaaattcagtaaatattgtattcaaagacatgaacaaactcttggtaaaactctgcaattgcctgagtgaattgcctaacacaagtcaattcacctctgagacttctaatctaggtctataagaagagaatgacattgataataaaattgctcccactcaagaaagaaatgaataaagcacttgaatgcatttgttactctagagagtggctttgcaagcatcactgggcccgagttgcctgaagaaacagtaaggtcatgattttaggtttcaggtgagtgtcagggacaaaggctactgggaacttcaatggcatcatcctctctagtgaacagggcactctataacacacacacacacacacacacacacacacacacacagagagagagagagagagagagagagagagagagagagagagagaggcacaaatgcatgcatgcgcacaatttgcataagaaatgtagggtaagacattatttggaaatacgggctttcagatctgcaatatttaagacataattttagatgagacaggtaacaagaaagtcttcattttaaaaagcaacagatgtaagagatctatataagggaggctattgataggtttgtggggcatgagtgccaaggttgcaactaaccactgaaattcagaaaagagacaagagatacatttgcccttagagatcctgatggcattggagcccactgatatcttgactttgaatttctgactgcctgaggtacaagaaactaaacttctgttgcttggagttgctacatttagagcaagtagtaaaggcagctaaagaaaaccaaataacagagtgagtctgaaataagaaaagcaagacattgaagcatgtcactcagaaattaaagaatttagtcaagccaagtgaaatttatactccacagggatatcatcatagcctttacccaggaagcaattacaacattagtgggttccatagttttttgttttggttttgtgtttttttttttgttgttgttttttgtttgtttgtttttgtttttcaagataggtgttctcagtggctttggaggctgtcctggaactagctcttgtagatcaggctggtctccaactcacatagatccctctgcctctgcctccagcttgctgggattaaagacataagaatttattggaatatttatcagcatggttggcatattcatggcagaaaaaccctctttattttacccttccatatatggtagaccagatctccctttagagcattctttttctttttttctttctattttttctttttcttttcgtttttttttttttcaagacatttttattttgtataacagtcctggctgtcctggaactcattctgtagaccagactggcctcaaattcacagagatatccctgcctctgcctgaatactaggattaaaggtgtgagccaccatgcctggtgagaggaattattctaatgaccctgatcctattgaaaattcatgtatactgaagtttccttgattactgtatatctagttccttaacaagtttacatcattctactctctactaagccctcatcatatttaattggaggcagggcagaagcccccttttttaagtgacttccaaaggctgagaatgtccatagaccctaattacaaacaaatattccttctttgtgtgtgctagttctgaaactaaagctagaattactgaggaaggaaactttctaatataactgatgtgatattgaccagaggttgcagtagggtttcatttcaattgttccagtataggttatagtgcatgggacctgttctgaggtaaatggttcaatatatttttggtacaaccttttgaagctgaatttgttgaaatctggaagaagcaaaacttcttagccattgagggaggcagaaacaatctgcataagagaggcaagtcatggttatgccagttgaaaaacatgagcagaaaacctgagaagggacagagcagcaggctgggtatcaagtctgtttttaatccattaggaaaaaaaaaaacaaggaatgttagacccctggaaaaactcaggtatccggggccccaggccacaacctcagtcactccaatcaccaggcagattcgagagcttgctgcaaacttcatgaggctttattgtaatttaacaagctaaccccatgttagctctggtcttttgtccacccaccatggtggttggctacaaaagacagctcctaggggctcccgagagatcttgtagggcagcgtaaggggcgtgtctaggtctatgcactggctcaggattggtgtgccctccaggcttggagggcttgccttgtgttgattggccaactggttgttatggcccataggccctcccagggtggttgatatgctctgtgcgtcattgctgggcacttgtctgtaaagtaccaccagggtcgtaaagcatagtgccaccagctaacttctgattggttccttgtcacgaggcaagcgtctgacctctaagtgaccaaggcaaggttagtgtcatggttgccaaaatggggagctggtcccttcaggaagaggggaacccatgtcctgcagagtggctttgcattgaagatttaaactttattttgttgttgttgttgttgttgctttcaccccatgcctcatatgtaggctgagaatccaggttgggcactgctaaataatgttttgaaacaacacatctaaatatcaccactattttttttttttttgcttatactttcctggttgttaagcacctataagaggtcacattttaaaccttcccccacaattaacttactaaaggcttgtcagatgttatttttagggacttaggtggaaatccttaatccctcattcttttaatttgttatctttaggattgggtccagatattactaatcttctggcttcctttggaagcaaaggagattccctatccctactctcctctttgcaatatgtactgtttaaaatctgagctttgagggtctctatggccttagtcattgagataatgggtcactttctggaatggtggaatctgttatcccctgggtcttgtatgacctgaacaggcaaagccaaacacattggctgtgtttttagcaccttatcttcatagcatcaggccaccagctctagctttaaagacaatttaaagacaacttcaaattcagggaggaattacaagattttagttcttttgtatacctttcaaataagtttaaataataattttcactttttaaaaatacacacttattaaaattcagcttgactttgtgttctctggcaacataaaaaggacaaaatgtaatcacatgtcaacaatcacatgtcaaaaatgccaagtgagtggcaagtagaaaagtgactttgctcttagttttcaaagtaagaagtgtctaactagagattcaaggaaattttgcatgaattgtgtgtgcgtgtgtgtgtgtgtgtgtgtgtgtgtgtgtgtgtgtatgtatgtatgtatgtatgtatgtatgtatgtatgtgcaagtatttgcagcatgcaagtgtctgaggcagatgcagaagtactgtgttaccattctccatcttaccccttgagagacaaacaatcttttactgaacctgtacctacaggctccagaagttgagccacctgcactcattggaagaagacagagtaagaacacacttgtgggggaccgaataattctgttatggaatattttggggcccagtctctagctcctgtaaaccagggcaccggaaagctctggctcaccattgtattgctaattgccagtagggctactattgtttaccatgacctcagggtaatatgcctcctaatttgcatttctgtagcttaagccttgagtaggcccatgcctgggctaaggactctgcctacatgaccaagagttgtttagataatagaatcacttgatgttacctatatacattataatagatgcttcctgatgttgtccctgcccttggagaactatttaaatggacttctcaataaactgtggctgctcagcatcagctgggagccctcctgagatgatatggtgtttcctttctcatcattaccttccttgggtaattaaacttccctagtccacacacctccactcagaattggactctgtccattcacagtcctgaagacattggtctggaacaattggcgccaaaatgtggggctgagtatgggggacagatgtgatggacaccgcagaaaactagaagagaagcacgtgcagaaagaagtgatcaagactgaatgacaccagatcaggagtaaaattgtatataactgtaaatatgggactaaaaagtagcaagcaggtgatggtgcagtcacttagcaagattttgaaaaataaaggatcagaagttgagcagcaacacatacaggattttgtagaatttgtaaagcagatatggcctgagtttcccaaacatgggaataaagattccaacttatggaatgaggttggattgagaatccgacagcattattatgaacagggtcctgaaagtgtatctacagatactctttgtttatggacaagcaacagaaaatatcttggggtaacactaaccaaaaaagtgaaagtcctgtacaataagaactttgatactttaaagaaagaaattaaaaagataccaggaaatgtaaagatctcccatgctcttggataggtagaatcaacataataaaaatgtcaatcctgccaaaagcaatctacagattcaatgcaatccccatcaaaatcccaacacagttcttcacagacactgaaagaacaatactcaactttgtatggaaatataaaaatacaggatagccaaaacaactctgtacaataaaggatcttctggaggcatcaccatccctgacttcaagctctaatatagagccacagttctgaaaacagcttggtgttggttcaaaaatagacagatagatgaatggaatcgaattgaaaaccctgatataaaccaacgcacctatgaacaccttatttttgacaaaggtgttaaatctatacaatggaaaaaagatagcatcttcaacaactagtgctggcacaattggatttggacatgcagaagattgcagatacatccatacctgtcaccatgcacaaaacttaagtgcaaatggatcaaagatctcaccataatcccagccacactgaatcttctagaagagaaagtgggaattacccttgaacaaattggcacaggagactgcttcctgaactttataccaatagcacagacattgaggtctgcaattaataaatggaacctcctgaaactgagaagcttctgcaaggcaaagaacacagtcagtaagacaaaacgaccacccacagaatgggaaaagatcttcaccaatcccacatctgacagagggctgatttccaaaatatataaggagctcaagaaccaagccacctaaacaccaaagaatgaaattaaaaagtggggtgcagaactaaatagagaattctcaacagaggaatctgaaatggctgaaagacacttaannnnnnnnnnnnnnnnnnnnnnnnnnnnnnnnnnnnnnnnnnnnnnnnnnnnnnnnnnnnnnnnnnnnnnnnnnnnnnnnnnnnnnnnnnnnnnnnnnnnnnnnnnnnnnnnnnnnnnnnnnnnnnnnnnnnnnctctctctctctctctctctctctctctctctctctctctctctctctgtgtgtgtgtgtgtgtgtgtgtgtgtgttatgtgtatatgtgtatatgtagaatctgtctacctaaagatctagccatacctctcttgactatttacccaaaaagtgcatgttcataaacaaggacatatgttcaaccacgttcatagcaacattgtttgtaatagctagaacctggaagcaacctagatgtccctcaactgaagaatggatagagaaaatccatttacatttatacaatggagcactactcagcagaaaaaagcaatggaatcttgaaaatcgcaggcaaatggatggaactagaagaaaccatcctgaatgaggtaacccagtcacaaaaagacaaacatggtatgtactcactcatatatgaattttagacatagaacaaaggattaccagcttctatcctcttcaccaaagaaactaggaaacatgaaggactctaagggataaatggaccccagaaatgggaagtggcatgaacttctgagctaattgggagcatgagggtagggaagagggagctgccacaataagagcaggagaagaggagaggagaggaaatggaggagcagaaatattgagttggggaagaatagaggagagagaccaggatgagagatatcatattagaaggagccactataggtctgagaagagatctggaactatggagatctccagagacttacaaggatgacaagatctgacaatccaggcaatggtggagaggataacctaaaagcccatcccctaaaatgagattgatgactactcttagtgccatcctagagccctcatccagtgctgatggaagcagagacagatatccgcagatatacactgagctgaaatctggaatttagttgaagagcaggaggaatgaagatggaataggtctgtaccaggttggagaaacccacagaaacagttggtctgaacaagggtaaaaaaaataaattaaaaaaagaagatacttcgagagcccatcccacgtgaagggatgcactcttgccctgggcacatagggaagggcctaggcccagcccaggatgatttggtggactttgtggagcccctgtttagggccctaccctgcctggtgggtggcgggtggatggggtggggcgtaggtcagggtgggttaggaggggtgagggtgaggggagggagaggaagaagggattgacatgtgaaacaaacttgttcctaatttgaactaataataataataaaaagactctggactcttcctagtttaacccagcaacccatgacaaaccccaaaaacataaattgaagaccccaaaatgaaaaaaaaaaaaaagcatttaccacttgggtcttctggcacagacctgtaactccaactacttaggaggctagcgtcagagtagcacaagttcaaggtcaacctgagaaaccagtttcttggaggacttactttcactcaccattatctgatgcctgcaaacctctgcattccccttctgttgttatttagcttgccacttcactcataccagctctgaactttcctttcactaaccacagtctcattgctctttcaatgaaagagttacataggcattttataacttttccttttgagtgctcaaaacagattaggatttatttgaactcaagtacctggcactagggctgaatgacactgtcttctggctttgtctacccagagatataaatctgcagacaggcttttgtagacagagaagtatgtttagaactctatattttataaaacgaaatgtttctattccacaaagtctatacagcatagaaataaaataggtacaggcataaatgcatgtgtgcaccacccagatccagcaattttcttgctttgactttgttgtgatttcttgatttcaaagacctaatgagaaatcatctccccagcacagctgctcaagtagtatgagaaaataaagcagaggtggtctaacatatggtgttcaacatgatgctggttcaatctgagctacaaaataggcaatcttactatccttaatggcaccactaaatagcaattacagaacacattcaggtcatttcaagactgtccctcctggagggctgtctatacacagtcccatctgtatccatcacaaatgtggagtatatgctgttttaattagttcataaataattcataacagggcaagtctctcattccttaaggaatgaaaaggaaaatatgacccaaaaggcaagtagtgaatgatttaggtaactagagggagtagtgtactctcaattttaatccaagttcatgattatgagtaagatctattaatgctctaaaaaagaaagttgcattaaccagtgtcatattaaaattaagttttatttgagtataatgggcttatttaaaccattgtttcaaagtctaaaatcctagcagcaaatatcattgtttactgcatctctctctctctctctctctctctctctctctctctctctgtgtgtgtgtgtgtgtgtgtgtgtgttatgtgtatatgtgtatatgtgtgtatgtgtgggtgggtatgtagatatttgaaagagcttcaaataaatttaacatatgccatgcaagatgcctataaaccattgcagaattttaaaatgctgtttatgagtttaattccacccacatacctatttgttttgcttgtatgatgttatctgtttctaaacttgtctttaaagtattcaaaatttgaaaagtaccagttgtcacataatatgtctcaattctgacttcacttgggaaatcaggtatcctcaatattttatctcactctaagtccctgtgaatttaccaaatatgaattactgcactccaacagtcactcatattatctctaactataatgagaaccaaattcgtttatgctggctgtctaatatttcaagatagtttgactgaacctttcttccaagaatcttcttgcttgtaacttccagttagataagccatttctcttatcggagatttggaagtaaacaagtaaacacatttgagctcacatagattaaaaaacattctcagtataaaggagtaccttattataataactctgtcttttcttggatttctagtttctccagcttctgttttcaggtgtatctttacctttgtagcagagggtgccaatttctgtggtatatactctgtggtaatgtattatttattatttactgaagcttgcctgaagattcagaaaacaaagtagtcacaaaccaaggaagccaggcactattgctggatttttcttgtcctgccaggtcttgtggcctcaactccaaatgaacacacagagacttacattagtcttataactgttggccgatggctaagccttcttactggctagctctgtcttaattattaacccatttctataaatctatgtatttaggggggatagggtgagggattggtgggggcagggaaggaggagagggagctgagattgacatgtgaagcaggcttgtttctaatttaaataaaaaagggaaaaataaacctatatatttccatatggcctgatcttactagagaatgcccggcacatcctatcctttccatcctttcatcatgtctcccttggtctacctctgcctacttttcccagaattctccttgtgtcctagccccacctatcttcctgcctcaattggccaaagagtgttttatgcatcaaccaataaagagaaacctatatacagaaggacatccttcatccagccacacaactttaatcccagcagccagaagttaggaggtggtagtaatcctttaatcctttaatcctagaactcaagattaagaggtagacagatctctgtgagttcagggcctcccagatctacacaatactgaatcagtctaaaagagaattatggctcacacatttaatcccagcactggaggggtatgcaatacagcagcaagtaattagtaggaggtattaattctccagccacactaaaatgaggcattggtacttcagtcacactgaatataagaagagtcagtatcaaagaggagaggaacacattgaaatctcaggattctccaagcgagctgaggagaggcatcagtttgaggcatagtgaagagcttgtgtgtggatcagccctttcagcctgagtttgtggttgagagctagtggttagctgctttgctttgctgatcttcaagttgaaccccaatatcagtctctgggtcttttatttttcatgttaccaaaaacagcaagcccagacagctttcagtctgccctgatgtcatttctgttcaaggcttctgtctggtcttttctgatgactagttttagttcctcttgttggtgcgctccttgtggtcatcacattctaacatcagatgggaagttaggaggacagtattcctggaactcagtggtgagtgagtcaacacaatagcataaatttaacctttgatatttgattttcatgattgttacttaactatactctgaaaacaggcaacaatgtatgagcatcaacagccatacagaaatattaaatatctttgttcttttaataactcataaatttgaaagcttgtattttcttatacattttacatttttgtttttttggaaatactgattttttagattatttataaattgtccaggctgtaatgataatcaataacaacaacaaccaattattgttcatcacagaaagcagagcaagcatatcataagaacttatttcaccctgtagacaactcttcttttatgctacaaggaaacatacagtatatagaaaggcagtgtgtatgaatgggtccaggtggtctacctgacttcacagatgacagaatgttttctgaggggatcatagtttgatctagtaggacttagaatattcatgcagttttttattctattttttccttgaacatgtgagcttttgatgtgtgataatgtattctttggctttattgtgaaatatctgttatagtaggaaaacagagatatttaattataatcatgttcactcttaagtctatacatgagattataaagagttcttatctctctggccacttttgtttactagataatgactgctaggtcataagagccacagagccattcctggaggtaaagtgttatcattcataatgcttgatgtctctgaagtccatggcacttggttgatggataaaccgcagcttcatgactcctacctcccagaattgtttctggactccccagttaaggcttgtcatttcttcttgtaatagtatacatctagtaaatgatgaaggatcattatacaaggtaaattatcatttgcaaatcaaaggtcctctccacgtgatctctggaaacagtatcatgtgtttgatatgtgacaaatcccactaatcagccctgtgtgcctattacctgaacttagcttaagtcacactacagaaattgcagggatttccactgatgaaactgtaaggagaacagtttagagttcatttagataaaataaaaaggtattacaatgatacctaatcaactgtgtagaatttggagaaacaaggacgatagacagagtctgaaaggaaatatagcaacacaccacgagctatgtgtgaaaagtcatggcaatcatgacttttaattagctcaggcaagaattttctattgttctaaaattattattgtattccaccttctctattgcacaaagctaacaatactttagtatatattgttctttgagcagaactggatgaatttggggtctagaaagaaaaattgccagaatgaccagaaagagagatattaaaaataaatcattcactgtctatctggcttttggatttatatgattatattaagaataaagctatgagggaagaaattagaagagagcaaatgacactttaagtctttgctggaaaccgtacttgaagtcagagtctattttttgaaaactgaaactaatttgatttaatcatatgatcccatcatttacagctaaaacctctgcacatgccatacatcccagaacatctcagtgcatctatttaattcactcagatgtttagttctctaaaatggaatcttgtaaaggttggaaatcataaaatacgtgaatattaatataaataaaagattgcccatatgtctagcacatttagctgaaatgccaccatattcaacatagtacttaatctctagaagagttcattttaaatattgtttagaaggatagtttcaggacaaattttagtagatgaaataaaaagacaaaatcacagaaaaataggtattgtagagaaccaagcccttgtatccttccccatgttctctagaaacaatcccctttgaggtcatggaaactcttatctaaactacttagataagatatactctctggatagttattcctttgggatacactacaggtaagttcaaatgtctgcccaaatattcatggttttgaattccacattaaaacttactgaactcaagttgggctatattaggtttttataaactaaaccagtaaaaatggctgtattgtttcatctttatgttcagtcattaaagttactcagagatgttcttagttcactctgagaaatctcactagagtttttgtactagtatacttcattcttcaattaattacctgagttaggctatattcctgaagaaattaggtttatttagttttgaggtctaaagtccatcagtatggaaaagtcagatgaggtttccaggttagatgacagaccacacacagaggaggctgttaaactttgagctacaaagtaaaagagactgggatggtggagaagcttagagttttacaacttataatcatgactcatttactgccagagaccaatattcttgcgtacaggcagcacctttaatagtctaaccatgtcagttcttaggcattctttctcatagtacttccacacagaaacccaagctttgtacattaggccactctgagaggcatttgaattattggagcaaactaggttttatcactccattaaaaaatagaaagtgaaactgatttgaaggaacccagaggcagaaagacaaactcagtatgtattcacccataagtggatattagatgtaaagcaaaggataaccagactacaatccacagctccagagaagctaggtaacaaggaggaccctaagacaggacacattgatcaccctaggaaggaaaattagatgagaaaattccctgggttaactggggaaaggtggggtaataaaggcaaggggaggagggagaaaaacatgatggaaaacgatgattgaaattgggagagatgaagagggagagcaataaaagagatatcttaatagagagagccactatggagttaagaagaaacctagtgctagagtaattcccaatgactccagctaagactcctagtaatggtgaaaaggataccccaaactggcctactactgtaatcagattggtgaatatcccaaatatcatcatagagcctcatccagtaattgatagaaccaaatgtagagattcacaaccaagtacaaggccagtcatggtttatattttgtgttccatggagcaacttatgtttagaaattgccttggcttttggcttcatccttctgtttttagagttttctttgcatggtatcatgataacagtgtctacctgtgcaatctaaggcaatgccttgaaattgcccttttatttagaaaacacattgaccttcaagtttcaagctggctgttgcttttgtgtgtcttcatttactcaccctgatccattgctctctgttgaagtctggactatgtctcccctgtcttctaatccctcttcttgcttctaattgcccctactctctgggatctgtacctggagcaacactttcatataaggattggattttatgcatctcgttatgcctttgcatgtggtgtttgtaatttaaactgcctgtgggctcagtgtgatatgaatacttcaccaggcagggaatgtctgcttttactggaaattcagcaccatggtccatcatggtagaaaaacaccctgctaagaaaataacagtctgctgtttgaactttatctggctgattctattcctgccatgctacttgcactgcccttatgtctaaaagaatgtctgattagtcatcttgattctggtgccaggtgctttgctattagatttgtgcacctggctgttccttccataatggaaaggaggatgagtgggttggtcagtgtctatgaggatcccacaagtcagtatttgtcgcatccacccttgaccagcaagaacgacgcaacaccgaggaatcttcttcacacagtttattcgggaaccttgatttacagggagtggtggccccgggtagaggaagacggggcctgatatagtctacatctaccaatcacctaaccctacgtagcacgccacaataggttgtctccaagcagaattaagaggatacgtggcctttaccaaattaggagttgtttaccacagagagcactcgccgtcgggctgggggaaggcagaaactggcaccatcttttgggcatggtactctgcagctcccaacaagtattgtggagaccattaggcatatgagattttgatgactgtgacctccatgctccttcaattaactgtagtggtagagatttgaaggtcaagaatgataactcagattaaggtcagtcttctgaaagactaatcttttctgactggagaaagtcattgttctaaaatgtttattttagtgtgttttaaattaggtgtacatatgtatgtctctgtatggatacatgcacatcagttcaggtgaccacacaaggcaaatgcatcatatcccctggatcaggagacctatgaacagctagctttaaatgcagggaaccatattggatgagcactgtgttcttaactgctcatttatctcctcaacacaactgatagcatgtatttttgttgctgttgttaacattttgtgtttttacatgtgtgtttgtgtgtgccacatgtttgccagtacttagggaagccagaagagggtgtcagataacccagaattggacagaggttataaactgtctgatgtttgttcacggaaacaaacccatgccatcttggagaaaagctaatgcttttaagtgtgaaatcatctctcactagagaaagtcttatttccctccaagatctttcaagtcacctatgtgtatgcatgttctaggctcagcattggcatttactgggaccaagtgcattttcattccttacactaattttcactgtttcactatttcatagctatccaaaaatataatttatatactactgcatagcttttgatactaaaattcttttattctggatttgggttggattttcttatcagtaaaaaatatgattttaaaattaatgctgaacaataaaagttggaaatgagcaatttggtaccagcacagcttgaactctatccaatttagttatcaatgaaataaaagcccgtattattgtagagttccaaccttcaggtcatccctattgaaaaggacttccaaatggcacagtgatgtgcgtcaaaaaccttgagaggctcacccccaacatctcttacactgaatcagaggaggagggagctggtgatctgggtgagtaacagagctctgccttcttagaaaagccttcagcactaccttcttgtcctttccctgtgaagccaggcagcacaggaacaaacataccctgtggcaaaatcttggttttattcacaagaggcctgcagctcccaagcacttaaacaccttcaaacaaagaggtttgtccttggccctttgaggaaagagtcatacagatggagatctcaggcttattagtgcaaataaagctgaattacaagcagcgtatctggtcattttgacattaaactttcagcaatgccaagagccatctgggcatcttcccagacaattacccccattatgtcaccactttccacatgaagggtattgctatcctgtgacattgactagcattggtgggcagtttggaaacacattctctgtagtgacgccctgtaggtttaaaccttggaacaacatggatatctttactctatcaataactaacttggataagttcaaaataaactgatatcaagctggttgcttgttttgaattgttaccatgtaaaacagatctgtggatgctacttttcattcttcttacatctgtatctgaattgagaatgtttaactgtctatccagaatcaaaacatgaaaagatcatgtgcagaggaggtgtaaactattttagttcaccttcattgtgtatctaccagaagttaaagtaggtgcctgacactgagaaaaactggaggtggtccaagaacacatgcccaaagttaaatgtcattagacttataggaagcctcagactgaaggaatctcaaagccatgttgtgatgctagcaatctgaatgttatttgtagttttaaatgaggtcaaccacaaaaatcacacttagattttgttgctattgagtccgtgcatttccataaaaggttgatttgggagctaaaggtaaagtcagagtaatgtcaacagtctgggacatttatattctgacttgagcccaaagcaggcacctttgagtttaacacaatgtttgaagaattgtattttttggtcatcttttaaaaaccttttgttaacttttattgtaatacccatgcctatgcaaacaaagagtactactggtatccaaatcctccactaggtgattaaaagctataaaataatacattcagggcaaaagtattctacgtaaagaaatgtagacacatagaagctatgaataaaacatcaacaaatattatgcaagtattgattgacagctttcttgttttgtgaatgaaacttttatgatgtcataaggatatcttttcacgcttgatatataaacatgctaagaaattaaaatttatatgaaagctatgcatagttggctttcctccagataactgacagtgttatgcttttttgctatgagagtcatgtgatatggagaacaataaaacaaaaggaaggagaaaagaaaaaagaaggtaccacttaggactaaattttgtctagtcagtagataattagtcaaaagaaatcttttagcctttaaaccacaaataatgtattggggattaattttaaatactgttaagtgttttggcattgtgttgtggcagtgtacctttgtgggcttctgtgactttgttccaagttcttaactgtcactgttgaaatgatgttgccatgccttgcacagtatataaatgggtgggtagggatgctttctaggtaaattactttttctgaagagcatctttcttgggtaccaaagcttgccaatttccagcataaatttcactttagtgaaaagctggcatgtgatatacaaggcaccttctccaagaggacaccaggcatttgaagactaaatatagtgtttattccaagttatccaatgtttagttgtataatattaacaagatacacagattttaatggttactccgctatagcttagtactcaaatttggcgtagtcatttctaaatggaagcatagatagggtaaaagagaccatgaaatatcaactagatgaaatatattgatccactaaatttttaatcacaaagtactgggttaacattgaaacatacttgaaatgtaaaatcaattataaagaactaaatgtaaagctatgggaggctgaggattgcattgtgtgcagaaacagcctgtgtctatgaggactgtcaagttgtaataagagagtcagaaaactttacttattcataaggacaacttgtaatactattgccatgattattaaaatattatttcctgaaattaaggagaaaacacaattttattacttgaaacccacatacttttatggaattttagccagtccttttaagtagacaaaataaaagaattggatgtttaggttgcattttattcagaaatccaacaatctcagaagactgcatctacatcctatatatccatcttctgggtcttatggctcatctttcaccagtgaattacagggcaggtggtgctggttgtgagactcagcccaaaatttttaagcttggccttctggtagggtgtcagtcttgtttgtgatttatgtcattggtactcatttccttgttgtctctctgcagcaggcaagggtttgcaaacacaaaggtactgagttttcctttcctctggaacctgccatgtagatgactggaggttaactcagaggagacagggctttatcaatgtttatgtgagattctttctttaaagtgaacaatgtcccacagatcccgggcacaacctgatcaacacctccactctctaaaggagggttaagaggtacagttggaggtaatcacaactactcaggttttatgacacaatggccatgcctagagtacagtagtccactgtaatagctgagaacccagcagtacttgagaggcatgtatggcttttgtactataactgaaaaggcagggaggaatgaggattctggaaaattacctttattctcttgtccagttttgatacatttaaaacttaaagatggtatgactgttaaagaaaaaaaggaaaagcttctatggaaatgagttaaaatgatttattctttagtttactcattttgaagagtaattgtgcattcttaaacaggaaaaaatacactttgaaaaacttcagtttgcttctggactattttgtcttctgaaataagtacaactgttactttccttttttcgggagaaactcagtcatttttaacaaactaaaaaattgtatgtggagcaaaaatgtattggcatctatataaatattctttatgctactttcaaattcttcacagttcacatattatcctgttaatttgggcagtgaacatagcatataaatatatttaatcagtgtccccaatcgatccatcagtcttttctcctgttcctgctcctctgctatgttttctgatactccctccttgacaccttccatttggcttttgtcatgctcatccaactgaaagagtaatgcctttcagcatcactgtggctgcatgcccaagtctacagcttaatcccccttcttatcctttctgaagtagtcagatgtacaacaggcaattctccttcaagctctaaaaaacaaacaaacaaatgaaaacaacaataaaaactatgtaagtaaaatgaaaatgaatttactggaaagttatgacatccgtaccactacttaatggcctttctggaagcattaggagtagctggaaaagtgatgagtgccttgaaaagatagtttcagaagattttaaaataaagacaatatgctttggaaatttctcttcagccattggtatattgggtgattattatctgtgatgtagtctattatttgtctaatgtaatcctttaaagcatgtttaattggctgtgtagatggctttgtagattgtggggaggtaagacacttaaaagtaacattttgggaagtgagtagatggcacagtggcccagagaacttgttgcttttatatggaacccaggttcatttctgagcaccaacatagtggtttacagctgttagtaatttcagttctgataccctgactcctgacatcctcttgtgtactcctccagcacctggcatacactcagggaatttacatatgcatacacagaacactcacttacttaaatttgattaagtaaatctaagctaatgtcttctctagatgctggtggatggcttccttggtgagatgcacaacaatggctaaataaagagagaatgaagcctgacagaccaaggagtggtcagcactaaagatggtgaatcaatgagactgttggggctacttagagatacatactgatcctggcaagttcatctccctaaggcccaccatggctgaagagaacacaaaactgcaccaaagagtattatacatcacatgaaaaaatgcagtgctccaccctatcccctgtctgcaccccgatgctccctaactttgggtgaactgtctctccagagggtgaggtgtcacttctcctttctagatgttttaattttagttttcatattacttgattcagatctgtgttaatcccatgtaagattcacctagcctgttgaatttgtaggtttttcaagaggttattatttggggggatctataggtttttgtctgatttgggggaataaatttatatggtttggacagatgagtgtccttacttgcctgaacacaatgtgtattctatgcttgtttctccttcaaggactccgagaataggaagttgcatccatttttaaatttctacatttccataatgtcttgctcatgttttccagcttatgttttgtcttgcttagtctgggtgaatcctattggaacattctcatgttaattcctaatttcatctttccatttttttcagttaggcatccttcctcctataaatttttgttgttattttattattaagacatttttccctttgtctttatggtcatgtcttctaacttaatggaagttctccattattatctattttcatgactattttaattttgatggaattttttagaatggaagctctaatatacttaccacatattcccaacagaaaagacatctcctgcttttcttctgtgtgtacactgagattgttgtgtaatctttttaagtgatgaatgattgagcagtacccagatctatgtgagtatgatattaaaaataaaaaaacccttgggccttatttaagtacacgttcactgatacttcttaggtaatcagggtattgttttgcctaagtcaaagttcagactcctcctcagacctttttgtatgctcttgtttagggagtgttgccttttttccctgacagacactacccctatagaagagagagaggccttctggattgctgactttagacaaactctaatgatacaaagaaggttgtcttctagatacagagtgctcagagggatttctggatgccccttagtatcttttggcatagtaagagggctcttttttctcattgacccacctctatcttttcagggagaagactgcaaagggtgcctgttatttgatagaaaaatacaaatataaattctacatctattgatgcagttatgataaggtaaacggttttcagtttttatctaaaacatttgttctgtcttagagtgtttcttctgtgcttgttacacacagatgttgactggactttttgctattgttcctgttagctatcacaggtgactcattgtgtcccataaagtcttcaatatgcaagacaaaaagagccctgatgcagtggtccatgtcacacatctttgtctatgtctacagtgtctttgtagaacatagatactgctctagtggtatgtcctaaaggggattaaagtataattaatttatacagagaacgaagcttatttttttgaaactagataatctgagagtggtttgttcaatcagatagaaagccttaaaagcaaaactaaggcttccacaaacaatgaattttgcctgtggctttgaggttcatctctagccagtctatgttagacttccttttctgatgggatggcctatagactttgaaattgccacatagtctttcaaaccacatgagccaatctcttgagattaatagtaataggaaattgtgtgatgctgtgatagagtctcccaaacatggaattgattcaggtagattatggaagaatttttcagaggcatgacaaaaaatctcatcccattgaccaggagttttgtcagttaatcagtaagactcacaagggagataactatgataaaggaggctcatattaatgtttgtatcaacacaaacaatcctggttgaaagtgacatttgaaagatcttctgataaagactcagaaggatattatcaaagttagatcagaagctagagagaataataatccttaacatatactctcaaaaatttggcttagttgagcatagtggctcatgcccatagtcctaatactcaagaagcaaacggaagatgatggccatgaattcaaagacagttcagtctatataacaatttccaggcagaaccagggctgcatagtaattatcttttgcagagagaggctgggcaggaaggaaggagggagaaaaatgaaggaagaaagaagagagcaagacaacaattatatgaagcctggtaagatggctcccctggtaaacattctggagcacaaacctgatgctgacttagatccctgtcccccacaatggaagaagagaactgactcatgaattgttctctgacctccacagagtgatctggtaagcattcatgtatgcatgtcttcacacacacacacacacacacacacacacacacacacacacacaggctcacacaatacatgtccatatagtaataatactaaatgaatacattttatgaaaacaactgaatttatctgggtctgtgtggatgaaacactttctgttggtgagctttcacattttgctgcaaatactcccagaataatataaagttgaaggtcaacatcctcaacccacttcctcggaatgtgacctcttcaccattagttttcttatgaatataataaattgagccatcaggatggaccctgacctagagtgacgagaatcttataaaggggagatgttgtgaagaggaatacatgcatacatgctgccatatgaatccccgcataggtatgcactcacccaggaagtctgtgtgggctcttctctcacaatgctcagaagcaaccatggatgccaccaccttgttttgcagttctggcttccataagtatgcaacgatgcatgtttggtccttacatcttccaaattttaatgctttgtggtggtttcatgtcctggtctgtttgaactgctgtaataaatgactgtctactaagtggctttagtgaaaaatatttgttctcacccttctgacaaataaatttctgaaactaggatgtggctctggctttcttctgtcaagcccatcctctaataaagagatgggaatgaaaattccattcatattaaattcatcaacctgaatcaagactcctaagagtttgatgcaaagcagttcatggacagcatcttaaaacacaatgcaatttggaaaaaaatagtttactgacataatacaatccttggtctacaaggaaccataattatattgaaacttgactcaggcagggtacatgtcatttcttccaagaagatggattttagagataggttacctgtactagcttcagggtctagggaaggctctggcctgttttcagtcatacagatagtgtatgactatatggtctattctagttctggttgtgggagcttgggggagcccctagctgtacaaataatataagggtcatttagactattagatgtctcctgccctggttgtaggagcttgggggaaccactagctatacaaataatggaaggctcatttagagtattagatatctcctatcctggttgtgacagcttggggagcccatagttatatactatgggctcatttaaatgggtcatttaaattcctatgacaaccagtcctggttataggagcttgatatgacctggcccaacagataatgcagatcaccaggatataaataacttccagttcccagctatctgggaaaacaggttatatatccctccttttaaaacaacagtcctgcacaaaagacctttgttacttcaaaactcaaagacacagaaagctggcttctggcatccacagaaggatgaggttttggggttcttgtgagagcacatttgccagtaataagggcttcatttcaaagcctaattatatcccatggagtccctccacaatatatgatcacaatgggaactggattgaataggtatatcttgtgcttatgggtgaggtgtatacacatatgtatgtattggtacatgcacccatttatacacatctagactaatgaagtatttctctaggcatctttctttatcaatccccaccatattttttgagatattttctcactgaacttaaagctgtctgtttccctaagctagctggatttgcctttcattgtatcccaacctctccatcaatgctgaagttacaaaaatacacagatatgctggggttggccttggctttacctgggtcctaaggatttgaactcaggtttatttgctttcacatcaagttctcttacccatgaacacaatttccaggcccctcaacacatgaaatttgagaagatagtaaaattcaggctataatattgccccaggaagtggttatatgaatggaaacaatactccaagtggactggtagagaggaggatatagttgctaagtatctcaaccctctaacacactttgaagccacaactacgtgcatcatgtcttttcttctcccaaacctgtcatgtctgagccagaatagcatttaggagacaactgaggactcaatgtttaaattaaggcaagtataagtaggctgtggagtcccacctgctggtcttgcatcttattttgacggtgtctgcaggattcctttggcatgcctgactgcattatgcatctgtcttcacattttaaagatgctcacattgtccaactcctaacaatctatggagtatataaatgccaaacatacatttcttcaatcttaaaggcccctgtattacttcagattttaaggtcccagtttttaaacgtacctgtcctggaaagaatcgaatctatcttctgtggcttctacaaccttgaaagttaaaaactacactttgtagcctggtggtattggcaaacgccattaatcccagcacttgggaggcagaggcaggtgaatctctgtgagttcgagaccagactggtctacaagagctagttccaggacagcctccaaagccacagacaaaccctgtctcaaatgccccctccaaaaaaagagaaaaagaaaaaaagaacctacactttctaagtgtgtaggtttttttgtgaaacaactcttaagtgtagatgctaacatttttcttgatgtgtaatcaagagtagattactgaatcttagatatgtttttggattcaacacaaataatggctataaactactgaattgcataggtggcaatattgtttaggcaatagtttataggtaatattatgagcctctcgcaagcctttgctccaaagtcaattatttcttagatgcggtatcaccagacagagctgaacagtcagctccttgtgctgcctccatttttgatatcttccttccaatacggatcatttaattcaagccttccctcctgagtgtctgacttatgtgttcaatgctacatgagccctgttttatgcatatctctgttactaacagagatatacctctgattttctggtttaatttcattctttaaggagtcggaacttgtaacattctgttctttttaactttcttctggatagacctgtagtggcatcttgccttgccagtgaacttgtagtgatggccacaccctttgagcctgatttttggtggagatgtgacctattgttaggtagaggaggggctggcttgctctgtcttgggtttcacagagcagcagaagagttcactattgaggcaagatgtcactacatatacccttctttgttaattgttatacttaaaataactacaaatacaaggttgaaattcaattttgaactaatgtacatgtttagctatgcattgaattatgtaagcccctccatatgctgatgtcctaaagtgaataggtttgattataattacaacttcatgattgtagttagggaacaacaacaccatgcatatgaatcctacactactgtgcctgtgtcctcatcacaggaggttatgaagaaaaaacagtaatagagaaaagaccatgtaaatattcagggtaaatggaatccctacaatccaaggagaaattccacagaagaaactactgctatcaatgccttgaacttctaaccttcaaaactgaacttgatgatttgtattgattaccaacttgacaggctacagaacagccttagagggaagcctctgggcatgactgtgggaagctttctagactgttttaattgagattggaagatcctccctgactggaggactgcatgagaataataccagccctttcccccgactctgcttctgtaacctagaagcaggtgctgtatcctgaaccacagacaggtcatgagagaatatactcttgaagcatgattcaaactaaagtttgaattaaacctataatggctccctctattatggtatctggcactaggggaatgtccagagatgtacaaagatgaccccacctaataatctaagcaatagtcaagagactaccttaaatgttctactccgataatgagattgattacattgatggcataccttgtatgccatcctaaagccttcatccagcagctgatggaagtagatgaaggcatccacagctaagcattgagctgaactttggaatccagttgcagagagggaggagtgatgagcaaaggggtcaagaccaggctggaaaaacccacagaaacagctgacctgaacaagggggagctcatggaccccagactgatagctaggaaaccagcatgggacttttccaaatccccagagggaagatgtcaatttggagttctggttaatctgtgggacctctggtagtggatcattacttatccctaggatacaaatggactttgggaggccacttaacatagagggatactctctcagcctagacacactgtggagtgtctaggccctgttccatatgatatgacagactctgaagatccccgtggaaggcctcacccctggggaacagaaaggggattggatgagggattggtgggggacaggggaggaggggagggagaaagaactgggattgacatgtgaagcaagcttgtttctaatttaaatttaaaaagaaaagaaaaaaagaagtaaaaaaaaaaaccactttgttttcattctctttagttagatattgtatcccagaaataatacaagtaattaacacactgcaaaaattaatttgtttaacactcactccaggatatatgttagggaagccccagaaaactgatatggacttctaaataatttccaagcagtaaatattataagttttgctgtttaattttgaagaaagggccatttggtgtcatggttgaaattttgtgcctcattcactaggctatatgtataggaattcataaaaatgatattgatttcaacattcttggtcttttctgaatctaattttacgtggaagcttatgattaatggcttatccctttaaatattgggtctattcttattgttaatggaagctaagctccaggtagtcaatctaaaaccttaggcagttggtacggctgtaaagtaaattatagaatgggaagtacttcatcttcaattcctatatgtgcagctgttgtgggcatacgattttataaaacgtatacgatttcacttttagcttacccaccataccgttagcttcttgaagacaatggccatatttatttttttgtatctctagtgtctagtatgactcatatatgatattggtatttagtaaatctatgtttgaaaggagaaaattattttttaaatgatgtcatatagatccccatacttttacacataattttttatcattttaaaagctgtcttcttcacatggataacataacagtaatccaagtgtttgtgttaagatcccaggattgtaacgagatatattttttaaattttaaagcatttgctcaactaactcaaaggaaatgacttatggaataaaaattcatatccactcattagaaaatagtccaaagttttcaattcatggtaagagagctgaaaaatgacctatttctgaacataaacagagaatttattgttacactcctattactcacctaaaaaatgggcccaataacatgctaggcatcctgttctccagcaaaatatcctgggatgccaattaactataagtgctcaggacctccacattatgcctcatccaataagatctcctgtctcttaatacattaaaacaaagagtgagtcacaaggagatcaatactgttaaactccagcaagactacttggaccaaagcacattccatttcctcattagccatgaagccagagacagaagggggaggttccagctgagattacaggcaaatggagcctccaaagagcacagaatcaaatgtattttatcaaaactaactttaaaaatgcatgctgtttcctcctacttattccataatttattaattgcaggctactttcttttcccaatgacatttccattttgtttttcctttccaattttgtcagcttcaggaatagtattttaaatgaatttttgaaagatttgaggaaatttcatttttgtttttataaaaaggacaatgagtaagttctctaaattttaaaattgggacgtggattttattctcgtttttatgctttacagcagaatccatgtatcacaaaaggtatttctatttttccctatgccttagagacttattcacactttaactgtatgctgtataatgcacatataaactgagactcattatttttaaagttttaatagtgatagcataaactataaataaaactagggatattagttttttattgcgtcttattaaattagcatattcaaaacaacatttcaagaaagagtaaatatataaattaacaaggggctgttttacatccttagtactcagtaggacagattcacagccactcaataggatatttcacagcattaagtaggacaagctgctggtgttgtatcagttcttctgtcttgagcttctctagtcttcagtgattgtgaaagcacatgccaatgcttgcaaaatgaaaacacaagctggcacagacaaaagctcacttgtattgaaatgacctcacgaacagagaagcagtgcttctttatgtaataaaaatgttcagtatcctgaaaacaagacttgttaaaagaaattaagttgaggaaggcaaacacacacacacacacacacacacacacacacacacacacactgtgtgtgtgtgtgtgtgtgtgatctttgtgtagtatacatattctttacacaggtggctgtgtatgcaggagtgctcatatgagcatttatatgtcaaggccaattatccaagtcaaatgccttccacaacttctggctttactttttcagacaaggtctcttactgaacttggagcacttggttcctcccatctctacagtcactccccatagcagcagtgacaaggtaccatatccagctattgttacctgaatctggaaaatctgaattcagacgatcatggttgtacagtagccacttgaatttctgagcctgctcccgaccctgccaagcataagatttagtaggtaaaaccataaacttgtcttcttcagaactctcagcctaacaagaaacaggtctatcaaaatatgatcatggacagaaataaagttctccactgatgttcacttacaggaagacctgagtgaagtacagtctaacattctgctatcccagacatgtggctgaagaaccatcaggttaaatatacttactgttcttgctgaggaccaagttcagttctgagcacctgtgaggcagcccacaacatccataactgcttctgatatggtggatctatttgaacattcctggaacaccaatttccatgatggtgatccttggatttcttcccacagtttacacttatttgtctcatgtccttaacagcactttatgaacttataatttgttgttgttgttgttatttttattttcaataacaattcccagtgatgagtgaagacatactgtgctttcatttacatttgtatgatcattaatgacagtgaacatttttattttgattattttttttttagaaatttgatcatctggtgttggagagttggcttagagattaagaatactgagattctgcgttcaattcccagcaccctaggtcaacttacaactctctgtaaattcaattccagagaatctgacaccctcacacagaaatacatgcagacaaaatgtcaatgtgtataaaataaaaatacatctttaagaaatttcactatctgttatactattgagttgattttgtcatatattctggctgttaaattttaccatatagctactatttgaaaatagtccttataaaatggttgtgttttcaattcaattattttgtttcttttgctaagcattaacttgtatataatcccatttgttattacttttgtgtcttgtgatttgatgtcttttacagaatgtccctattttagagttcatcagtgggttccctatattatctttgagctgtttgttttctgtcttgcatttaagttgtcagttaattttgagttgattttgagttggtctttataactcatcagagaaagtattgtacttttattttttcatatgtgaaaacctggtttcacaagaacaatatattgaaaatgttgctttccaattcctgatctttgctcctttattggaagaacagagagttgtggatgtgtgtggttacctctaagttgtctattgggttccattagtctgtgtgccaaaatatatgtaaataccatgctccttttattactgtaattttagggtacattttaatgttagatcataagttattctcacttcactgtttttgcccaagtttgacatgaatatttgtgatgtattttgctgttgttattgttgttcctatagattccagatgtttttccctaggactatgaaaaatatcattggtgttttggtagggatagagtctttaagtcatgatgagtggtgtaaacagttatacagcattgattcctttagtttctgaccagatgtctttctcttagccttgtcaaaatttttctgcagtgttctatagttttaactttgtggagccannnnnnnnnntacaatttagaggggctagtgcacttttctatatataggaagaggttatgataatcccaaaactgtaaggagaaatagctcccgtcacggccaaataaattaaaatcagctttttaatttgtgtgcaggggctgtctctcccaaaggtggggtttaagtgatcaccattaggtatggagaagataagggtttttatagtttagtagtaggcagtttcaaaatgggggatttggtagataaataggtggggttacagaagcagaacataaatataacaagttggtcaaaacaaccttctgaaacaaagacatgattggaagatggtcataacaagtggctataacaaattagtcacagctaagttttcacaataaggctatcataataatcttctgaaatagaagacattgtggctgtttgctggaacagtcagtacagatccatttgtaggtaaggatagatgttgggcacagtccaagttttgattatcaggttcattcacaaacaggactgaatctagtttgttcttttttttttttttttttttttttttttttttggagattataatattccagggtgcactgtatcttgatatcagtttacaacctgcctcctggctgatgctgacagttgatgattgtactccctcttcttctgtttctcccttctgttaccatcattctttcactgttactggatggcttacattaccatgtccagtcttttggttggcttttttcttatcttagaatggttttaaatgtttcctgatttcttccttttttgttgttgttgttgttttgccttttgtttttcaagacagggtttctctctgtagctttggagcctatcctggcactcactctgaagacaaggctgagctcgaactcatagagaacagcctgtctctgccaccccagcactgagattaaaggcgtgtgccacgaaaacctgcctcctccttgatattttgatttgtacatttgcataattaccaaatcctcttccttgtgtttgaaatctcttattgcatgcttgtttctaaagaaatttgatgtaatcatactctctacatggctggtcacagtataattcccagaaagtgctctacatgcatactgcaagactgtcccattaagttggatcaacaatttgtaggggtatagtccttaactggctgcaggtatgttaaaattcatgtgtttgctggctttctgtatgaataattcaccatcaatgcaaggcaagtaccaatggccctgacagagactatactagagtcgtctccttttgtacttgctgcagatgtttccattttctaatagtagaatatccatatttacaataaacttttacatacaaaaactatgaataaaatctttggagagtacactgtagcatcataccaccatgctaataatgttcacaggtaagaaaaagaataattttaacttacaataatagttttaaaaaatgcaatggtgacaggctaaaatgaaatgggggaataaataattttaatatcttttgttataatcatctaaacatagttttaaaaataaatttgttttgttatgtgacactatccttggaagatttgagcaaatatctgctcactccaaacagggaactaatgtaagattaaaatatagctataaaacagtccaacttgatgaactgactaattttattgacattatttacagaaatatgggtgaggggtgttgatatcctagcaatattctgactccactccctgtaaactggcaagatatgcacatggcattaaacagatacttggcccagttcaagggccctgcaaccacttgtggctacatcttgtgttgtgtgtcacaagttgcttggctgtataaggactcttttatgcatttgcaagcttttggttttaagcaagcaccaccaacctgccccttcctttcacttcttctcctagttgaccaacaccaacttccattacccctttgctccccttcctaataaactccatgtgggttttgttgaattcggtggttctttcctcaccactgtggctgcagcaaaatattttgtgacatgtgactctccaggctctctccatggttcctcctgctgcatgtgggtgggtggtctgagacacatggagaccctgacctgaactgagagcccaatttccatctactggtccactgggatcctacacaatgctggttacaattcttaatgcccccttttcccagttggagtaaatgtttccttgaacttgttggtatgactgttgagcatctgccacccttctggaggtactggaaatggaggcacacccagtcatgttcttcaaggctatggctggtccctatcactgacaatcatctctagtaaatttcccatgaggaaggccttcaagcatttgattggcctccctagcactgccctcactgggcaacaccttcttcttttgacatcacacccttggcttagtgccttcccttggactctgtgtcctcatgggcttcttagcccccagccccagttttgtttggttgaaatgttgtaaaactgacctgagccaggatagggatcctctgtttaaaagccattggatctctctgcctcccttaagggaaacaaattgacaaatagtattagcccacccactcctctgggttgcctattagagaacctaaaaccccttcacttaatgccatttgtgaagttctccagtctcactcacctctgtactaagaaatagcccaaaaaacatgaccctagataccaacttaaattggccacctaactctctgctaaacattctccttcctcttcctcatctccatttcatgtccttctatctatgaaagctgaaccactaacttagatcctgctaacaaacctccccctaacatccaactgcttctttctaccccttctgcccagcccctcttcttcttcctctctagcaacagcctgccccaaccactcaacaacctcacctactttaacccaccctagtaactcattctcaagcagctatgtgcccacactctaccaagtccaatccagttacagttttccctgtgtgagagattgtcagagtgggtggactggttaagattcatgtccccttctcactatcagaactttctcagagagaaaagaaactgggtgcttatacctctagttttgctgccttcataaaagaattccaatataagtttgggattagcacagaacccatacaaactaagttgaagttcataagactaatgcagctcatctggtcagggtagaggctgtctcaaataagaaccattgctgggattataatattccagggtgcactgtatcttgatatcagtttacaacctgcctcctggctggtctccttaaagctgccctcaagccagtaaactacaaaaaagacttctgaaaatagatcaagacagaaaggaaaatccatctctattcctagaatgcctcacaaaacccttcttacagtatacttacctagactccaaaaatccagagggcagacaactcattatgacctattttttcccagatctttcctcacattaaggctaagcttaggattctggaaagaggacctgtaacaccgcaggcagaattcttaagtctggcctttaaggtatagcatgagagatatgagaaagcacataaacataaatactaaattgtggccaagtgcatctgacaggccttagagtctgtcagggctccttcaccccctggggctggaggactaccagacccatgttttattttttaaccaggtccatgttttaaatgtggttaaaatcagcagtgggcctgtgtatccctgtgggccacacagacaacatccaaagtgtcagcaagagggacactggtcagatgattacccctgtgcatgtcctggcatggggacatcagacatagatggctctccagcttattttctaggcctagccatggacagtgactgaaggggtccaggctctcttgacctgaccactgtcatctctgacaggaaactctcattgaacatcagggtgatccccatattcttcctcttggacatagatgtcacctattccatccttgagtgagttttgggaacccacctctccttcttgtctccccattgttggggcagggggacagctttacctacttcatcagaccccaccagtcaattgcattttcaggggaattcccctcactccttcatttttggttgtgccaaactgccctgtgcccttacttggaagggatcttttagtcaaagtaggagcttctatttcttttgctctccccatatgcctgaccccagactcaccaatggcttctcccctcctccttctggtcacctaccctattggttccaatatgccatttcctttatcagcctctcaggtagacctgcaagtctgggacaccccaaacccttctgtagctagacaccattcccccattgccattcagttacagggcccctcctcgtatatcacccaagcccagtacctactttcactcctctagagctttaggggacttaaaccaatcacccctgacttcctaaggaaaaaaaagactatttcatcctacatcctctgccttcagtatccctatacttgcagctaagaaacctaaaggaacctaccacctagtcaaagacctctggatcattaattctgcagaagtgcccccctctcctgtggtgtctaaatcctacacccttctctccactatcccctcagggacctctcatttctcagttctggatctcaaggatacctttttcactatccctctcaggtctaagtccccaaatatttttgctttaaactggactgaccctgatactcacctctccacacagctcatttggaccatcctacctcagggattctgggacagcccacatctttttggccagactctagcttagacctactctctctgtctctccctaaatctaaactcatacaatatgtagatgatattttactttgcatcccatccttagaaattagccaaactatcacctctgctcttctaaatttcccatccagcaggggctgtagagtcccagcttccaaggtctaactgcactcctcaggtcacctacttgggactaaccattaccccaactcataaagctattactttagactgccaaaaaaataatccagtctcttgcagtcacttctgataaagaggaaattttatcattcctaggcttcttgtgttcttggatcccctctttttcccttctggtacaaccttatttgaggagtctgtgggccccccatatgaacctctccttaatcctttgactaagccatttcagaagctccaacaagctatcctccagactccagccattcatctcacagacctaactcctctttccttcctttatggaacagaaaaggagggatatgcacttggggttataggccaccagctagcccttcctttgcacctgaagcatacctgtcaacaaaactagacctaactacccagggatgaactagccagggatgggcacgctgcatacttgctttagcagctgctgagctccttattcatgaatcaaagaaacaacctttgggtcacccatcactgtcttctcccaccataacctatcccatctcttaatttacaaagacttaagaactctacctccttcccaagttctttctctccaagtggcactagcagatgccacacttactctctaattgtgcctaccccttattttctcaaatcttcctcaacctaatactgaatatttcccatcttattcttgcattgaaaccctagaggaggtagtgccccattattcacaggtacaggggagcatactacctcggggtatttatacctagtacacagacagtagctttttcttacataagatctgaagagcaggctattccatagtgtcagatactgtggttgtggaggaacaggaacccttcccacactaataaccaataggcaaattaatagcactcacccatgcctctcagttggcatagggacaatccctaaatgtttacacaaacttcaaatatgctttcagatcctcctgtgccatgctgctttttgaaaacagcatgggctacttactacaaaaggaggatctataactatttcaggtcaaattatggccacgctaaaggcctcccatctccccaaagctataaggattattcactgactgtctcatcagactgacagctccattatctctagggtaaacaatcaggctgacaaagcagctagggcagcagccctcctagacccagactcacctcacccattcaccgcagggagttcatacactacagcccacatcttcacagtcacctcctgacacttgacaaattctgtcctatttataccagtgctttcatcctaatagtcaagctctatcttattttgtcaaagctcacctccagcccactcatgaggacctgtgtttcttaagaactatcactgccacttgtaaaacctgtcagatgtcagaccctaactccaggtattgtggtctcccttttcctacccacaagaccagggactttcacccacagactcactggcaacttgactttacccacatatccacagccagacaagtcaaagatatcctggcattagtatataccttttcaaagtagactgaagcatttcccacctccaacatgagggcctggactttctttgatgtctgtctctgggagattatcccccaatttggaattccaccctcacatcactcagacaataatcctgaattcacctctcatatctctcaaagcctatctaaacctcccaacatcccttggcattttcatatctcatacctcccccagccctcagggaaggtggaatgaactaaccattccttaaaaatattcttgttaaaaattcacaggaacttcactttgactggataaagctcttgcctctatctcttttcatgctctgggttccccctgttagacccccagaaaaactcaggtgtctggggtcccaggccacaactttggtctccccaatcaccaggtagattcaggagcttgatgcaaactgcattaggctttattgtttttttaacaataaccccatgttagctccggtctttccctcacccgccatggcggatggctcacaaagacaccttgaaccggctgcccatcggtattgtagggcagtgtaaggggagtatctaggggtacgaacagactcaggattggtgtgcctccaggcttggagggcttgccctgtgttgattggacaattggttgttatggcccatagcccctcccagggtggttgctatgctctgcgcatcattgctgtgtgcttgtccataaagtacacccagagtcgtaaagcatagcaccaccagctaacttctgattggttccttgtcatgaggcaggcacctaacctctagtgactaagacaaggtcatagctagcaagtgttactgtcatggctgcttaaatgggtggctggtcccttcaccaccaaatgacccctttccattttgccctttgaactcatatatgggtggtctctcacctaaaccctcacatctctctcatcccctgcttacacccttacttcatcatctctgttccctcctatgcaactttactgaccactccttagctctaccatgtaccaacccctgtccatatccactcaacattgtggtcaggtccttctgtctcttctagaccaacactctcaccatttcccctaaatagcagggtccctacaaagtaattcatgtaaccccaacagcagctaagcttgagggccttcttcagtggattcacttacctcatctcaaaccctttaattctccacctgaagctcacacctcatacacagcaaatgcaatgggacccttattccttaggctttggaggagacagacatcatctgccttgtccccaatgcacgaggcttcaccctacaactgttctctgccagatttgaaccacatatgctttccatcctgacccctcttcctctcccaaggctgacccagtcctatttgtaataattataccctgctggatcaatctcatctctatgtatccccagtgactcattgaaaagttctaatctaaccaattagctattgttactggactacaggccactttgttagacacaaagaccatctatcgtgtccaagtaacctaaaaatcaaccacctgtgcctcctgagtgaatgaatgataatggaaaaaaaaaaaaaaaaaacaggtactttaaggtttgcttatgtaaaaagaaaagctaaaagttgacctggattcacttcaaacaggtcagataccccttcccacacatgcccaagacctaagaaaattgttttcctaaatttaactttatcctatgctctgacagcatcttgtcggattcaagaaacatcagatggccccacatagccttaatagcagtgaaatgaccagctacctgcaccccagctttctcaggtcctcctcatataaagatggtcaacaccccttatgtctgctggaagcagtgttgaggatttggtgcccctattcctaccctactggacacttccttttaatccttcaccttttaataaaaaagaggtgggggtattaagatcctggcattatgctgaccctaacccctgtcaacaggcaggaaatgtacacagcattcaggcagatacttggcctgctcaagggtcctgtgaccattctagctcttcatgcatttctcctgcattgtgtggctgtaaagggactctgtacacatatgaaaggtttctctttcaagcaagcaccatctgcctgcaccttccattcacttcctctcctggtctgatgacatcaacttccctcttcccttactcccttgcccccttccttagaaaccacacgtgggatttgttgagttctgtggttcattcctcattgctgttgctgcagcaaaacaaggggttatttagaagagcagaaatgatgtaaagacagctgtgtcaccaaaggccacccctgaatgggtgacggctcaccaaagctggaaatctgaagcaaaccagactcccttcatatgtgccttttagaggcagctcagcttgtgtgagaaggcctctaagtccttcttgctcacacacagatggggtagaggggtttagtgaacatggtgagtttcaaagacttcctgatggatgttgttttcagttagttacttcctgaggttaatgagcctttctgcaggacaatgcatttcccctccccttagaagtccctgtagacatcctgtgcttaaggggcttcctgctttgatgggatattttgatctctaagtaaactgtgctgtacaagaattttataaaccacgattgtaatgtcagtattttcataagttcacatttttatacaataggggtgatttacagataaacacagagaaacagtctcagaactttaaaacatctacaaaaccatttcatttgtaagtaatttaatatagaggaaagttgagatttgtacatgtgagttcaggcacaaggtacagtccatcctgaggccagttgttcctccttaaattcctccactgctgtggttctctggagctccttctcctgatatgcacgctatcatttctcctgagccttctcccacactttctctattcttcctcatcctgataaagcacagcacactgtctacacttgctttccagcagattatctcaaagcaaatactgtctctgtcccttcctagttgcaggactatggagaagctgcctgagccacatgctgccttactctgcatcttcacagaagggtcattagcatctgactcaagaaaaagaaggaaaacattcaagtgtattatggtctggcacagagaatttatcagccgtgattgctgttttcaccttcatgaaacagtttcttgattagaaattagtacctctttacatgtgcaagtgctgatgtacatcatattcatatatgtacatatgtccacacacctgtctgcccgtccacacacattggactgttgcatataaatggtctatttacattttcattttctatttcattccaataaacctgacagagtcagtttaagagaacctgataggctggcttcccacagagaacatgtattcaagataatgttcacagcttgctataaatactagcctacgatcacaacctgacacaaccataaaatgtactttaaaaagaaatataggaaatggaaggaataatggtggctgtaagtttattctaataccttctgcaaagagggaagcgcgtgcatgaaataccattgaactgaatgctgatacacaatctgtcaaaacgtatttccaattctcatctgaggttcaaataacattctattcttggaaataccttttgttcaaggtgtctcctcttcccacacagttcagtgaaatcacttttcttttgttaaaataaactgtgctgtctagagatcatatgcccgctatcatttattttaattagccggtgcaattcaaattaaaattaaagtatgtgccaaacaaactcctcttctctcctattgctttcagggtgatttacctttgccatgttttcaacactgttttcctgtccatgcctcttcccatgatactaggagagtatatgtacataagaccatgactttgaacttctatttttcttaatgattatgctattctgtagtttaaacttcatgtttgaagaatataaacagatgacatgaggaataaggaagttgatttggaatattgtcttgtcctgaaaaaaaaatatccttttatatagctctgacaaagactgaaaacttttctatctggaagagaatctcactatcagttggtctgcatatacattcattcattgaggtctctaatcaagggaggggatacttggggtttctcagtcatgtgtaagcagcacattgcacagaagtcattggcatcagaactgttgagaaagagagacccagtatcctgtaactacaaaacatgtattccatctgtctcctgatcatcccccagattctattacttcccttgtgcatcagtagtaacattcctagatgctcacttatgttgctcagccctgaaaattctgagaagtactgcaccaagactctgtattcagacacacagggaagaaatcaaatgtgttgggagcttatgcacaaaaggcaattctcattctgagaattgttactaagacctttctctttgcaaatatgtgccagatgacatgctcaactttgtgcccaaatttggataacacgtgagaactatttatgtaaaaccttgtgatggaaacttggtttatattttagtggtgcttttgaaaattaattccaaatataaagttctaagtctggtagcactggtgcttcgatgcttaatgatttgttctggactcaacaaaagttattttccacagtagcttcaggaaaagataactaaaaaataaatttatttggtctctttttgtctgatttcttattagcctacgtggaaaagccaatggcatatactgctcaaaggtatgtcaaatacatgacctaattgtacttcaaaactccttattaatgtctaatatctatttcaaattgaatggaaagtctcatataaatctttattaaaatgtgagataataaagaagatgtctttatgaagcctatatcccacgatcagaagatctattatttcaatgtgccctgtatgtgattgtttcaatgagatggtatttctcagtcccgtcagtccgaagtctttcatctgaagcacaattgatatgagcatagtcaattatttacttaccatatgaacatgtgttttacatgacttcagtactgtgacacctgccagaactttaagttacatgtggaccatcagagcctcctttgagcaaatgaaagagagagagagagagagagagagagagagagagagagagaaaatgaaatataggaagagagagcagagagagagagagggagacagagacagagacagagagagagacagagagagaccaagatggggagagacagagagagagagagagagagagagagagagagagagagagaggtgtttatgcatgcgaagggtaagtgctcacatacttgagcctgaatgagctagtcagactaaggaggacattgtgtgctccctctaacacatggttcttcaaccttcctaaagcctcaaccctttaacatagtttctcatgttgtggtgaacctcaaccataaaattatttcactgttacttcataactgcaatcttgctactattgtgaataataatgtaaatatctgcttttgtgatggtctcaggttgacctctgtaaaatggtcattccatccacccccaaaggcaacaagacccacctgctcagaaccactgctccagccatgtttttctccacttattgtcatgagacctaatttctcatagcatctgatggttagccagcaggctcccagcatctgcctgtcttcattccctagtgttgaagctacagagacacagacatgcctggatctctctctctctctctctctctctctctctctctctctctctctctctctctctctttctctatccctccctcccttctttctctctctctgctctcttcctatatttcattctctctctctctctctttctctctctctctctctttctttaatttgtttgtttcaatttgtttttcaagacaaggattctcccaattagctcaggagattatagccatgcacataacttaagtccaaatggatctaagacctcaacataaatccagccacactgagcctcttagaaaagaaagtaggtggtaccctcaaatgaattggtaggggagacaacttcctcaacataacaccagtagcacagacactgagatgaacaattaacaaatgggacctcctgaaactgaaaagcttttatagggcaaaagacacaaaagatatttaccaaccccacatctgacagagggctgatttacaaaatatacaaagaactcaagaagctagtcaccaaaacaccaactaacccaatgaaaaagggggtacagatctaaatagagaattctcaatagaggaatttaaatgactgaaagacacttatgaaagtgctcaacatacttagctatcagagaaatgcaaatctaaatcacttttttttttaaaaaaaatttacatttgctgaattgcagtcaggcagactggtaactttccatgtctgaggagatatgacagctccaataaaaacacacttaccacagaaagtctttgctttaactttcttttcttttcctttcttctaccatactggccctttcctgccacattgaaaaaatttttccagaaaagcttaggaaaatctaaacacagcaactcaatcccttgaaaaaattctagcaaaaacaacaacaaaacctgctctcagcaacatgatggacatccttttcaaaggaaccatatgtaaaatattcatgtgttgcttccaaagttagtcatacaggagggatgatgagagtgtaggctctagtataaaagctgacactgttcaagtcatcttgatgagacattgggtgacactaaatgttacattagtggtaagaaagaaaaatcaacatcctactggtcagtttctgagtgaaaatcaatgaaagtagagacatgagatcaatgaggcccatctgatcttaaataggctgaccttgaattaggagatagagtctgtacaattcaatgagagaatgtactagaaagtacaatggtccaaaagcatgcaaaacctattaatagaagatcactaatattaaacaaaattgtgtgacaagaagaaagtctggtcaaatatttaattccccatcatttctctgtcttcatccattgaagagattttaatggtctttgatagtcagatgatggatggaaggtactcagcaaaggtatgctgtatattatatatgtaatattatatacagtatacatacatatatatgagctctaaaacattgtaagaaatagcatatttctaaagactatctcactgttggatgcttctgagcatgtggaagctgtatggggataaattggtccacaattgaacaagacaagaaactaaggtgcattcttctgggaaaagaatatcgactttctgatattattagattaaggtgtctgtttcttatttccagttatatggttctctttatcaagcaaataatgttcgatgtagtaattctttgaaagttaattttaaaatcactgtctagcctctttccatagttaatgtaatatatgcatcttttctaagtcaaattagcaatcatagtattagataaagcctgaatataagaacctaattatttcaaactaattatctaatagtggtcactttcaaagtaacaggtaggcttatgcaatagaaaggatatggctgaatacttcactttaagatatcatcttgtggagcattggaggatcccctgtgaaggcttgattcagaatataaaactatacaattgtacaaaaataaaggactttacaagaatgctttatttataatttatagtaaaacttctaattatttcattctgctgtcctgtattaaatatttctacgttcaggggtttagattcatatatccagaccacacataccccattgtgtcaatgaatatcttgcaaaacttcctcttcattcaggaaaatatattaaaagtcaaacaaataaattgtctaattttatcaaaagaaccttcaaacattactcaacattaatcaagtggtattttctttttctgtgttcattttcctaagaattttaatgaaattggtctttgacaattttgtatttatgtaaagtacgttctgttactataacctcttcccctctctgaaatccctttaacacctattattccccccctaaaagcatgttatccacaatcatgattttttgtttctacactagcaataactacctgggacatgtttgacagttgttctcttagtatagatataatcctaagatattgttgtatataatgatttcctagggaatttggatttaaagagtcttgttcaaggacttaaagaggcaaacctactcaacagtttctcagtagatgaagatgccttcataatcaggaaatatgtttctatttcaaattctttgaagagttacataactaggcgagaggtcagttactaagtggagttgtaggtagttaataattgagaagttaaattaagcactggaagggttggtcacagtaaataccagggccaaaggaatccaagagttttccctgaggtattaccaactgcattgtggggagaatagtggaggatgaaatcatgtgtccagacaagtcaacaaaagagtgtgaactcattcagaccccaaggctgtgtattcttgtattttttttcttggaaacagaaaattaatggaaatttgttatcctaacccttttactctgcctcaactaatagaaatacctaaatttaattcactgggacaatatatcaatttttaaaagaaaaaattctgaactacttttcatggatactttcctgatctctaactgttatgatgttggtgctcagtgctcatagcattggagtttttgtccttaaggatttgaatgttgctacagaattgacttgtttaacctagtactataaatcttgtttcatggaaaactaactcctccctttacatgcttttctcttttggcccttactattttctgtaattagcaacaactaatacagaacagcatcatactttgccccatcctcgggctttcatatactgtatgctgaacttttcagctccatgagagaactattaacttgcctctgagggttggtactgaaaagtaacattctactggtgtttctgctggataaagatagtgataattgtgatgatgatgatgatggtggtattaatgatgatggtaatggtggtgatgaagatgatgacaatgaaaataactatgagagtttcaagggaatattttctctagtgaaggataaaattgtggggatacgttgaatgtttggttctttgctaattgttcatattgatgaataattgaagataattgtcttatctcttttctttcccttgtaatatatcatcaagatcacaaattttctcaactttttcatgtcataggttgacaaacagatatacctatttaattttgttacttttagactccatctgactcatagcccattaaaatccatgtcttatttctatgtagcctcctgtaatttatacagtgtattaacttaattcttattgtccaaatgaaatgctatgtattggaggttttttgtaaggcacccatcatgattatgatgttgaataattctccaggaagaaaatggtcattgagcaaaatggctcagcagtgtagagcttgtatttctcttccagagggactgagttcaattcctggcaagcttacagttaccatacagttctagagggttgatgaatcacactcatacacataggcatgtaagcacacacagatacagacacatatgagtttttattgttatcaaaaacttgggttattgaaacatccaacctaagcttctgtttgttgagagtgaactgcatccagcacatgaagatttaagcaacagaaacagctgggcaattattctaagcaaataaaatggttggtaggaaaacttccagccagagtgagtgcactgcatccatgtcagatttcaggcttctcttgctgttgttagtcataagcacaaaaccatcacagactagtggaccagaagtcacaaacatgaattacctttcagactagaaacactcagccctaaagtgaagctgtgtccattggagatattcctatgcttcccccatcctctagagcgcatctaaattctttccttcatagattccatcttaatgaaaaccaagcttcaaataccaccccctacttctgttttttcagttcactccttttaatgaattcttaatactttggaccatccacacaatctagagtaaattctctatttaaagatccttaatgattcatacctgaaaatgatcttttatgctgtaaatattcaaaattttcagaaagtaatattccatctttgaaggactatgaaaatgactgccacactctttttaagatgttaaataatctaagtaattttattttactttttacaaatagactttaaaattaatggcaactgaaagaaaaatatacacaaaatttgctttcatctttaatttctttatgtaatgctttatttgaaattacttgtcagctttaagaacattcaaaatataaatacaaatttcctatatgcttttatgtggcttccctacctcacttcatccttccactgcaattattgtcatgtctcattagcatctatgatctccagccttagttttcatgactttgacattttgaaagatttaccaattagtttgtagactatttctcagtcagatttgtgtgatatttcataattaaattcataggtaatgctgaacctttctcagtacataacaccagacagtaaatggtctcagagtaccttgcattaatgatgtccttttgatcagtagtctaagtagtttctaaaagtttctataggtgaaagtttctatgtcccacttttgatgaatacttacaagtgagatgaaaggtacttgggtcattaacaactagctacctgaaggaataataacttcactttttctttaaaataaaattcacaattttatttaatactaatacctaattatactttaatctgggtaggaagaaaatatttaagaatggggaaatgtttgttaaacatttatattatattgtaatctttaaggtggagatatatatacttatatacttaaaaaagagatatctagcaaaataccgactaaaaaatattacaggagaatttctccaaaaatttttacaacttaagttgataataggtttatattcatccagtatttttattctcattttcaaaacatctgattaatccccatcttccccaggtctttaactatcatttcctatatgtcctattaaaacacaaagctttgtagtatttcattattcggtatttcatattcatatatcataccatctaatcagtggattaagttattaaaatcaggatgcattacccataacatgcatatgcattaaaaaccagggattcacaaattctcctaaaacacaggaaagggaacactgtcctttgagcacattctacatgtgctaatactgaaataatataaatttgaagaatgtacctcagtggttcttaggaatatgggtatagcagtatgaacgaactatttaatgtaatataggaatgcataaaaattacgatggttcataacaaggtagaatttttacctacaacagtttaaaaagcatttaaaatatcacattatctcaaaagtgaaagggaaaatacatagctatttgaatacagagaaaagtttttagttgactatatcaagattaaaactctcaatgaagtaagacaagaaggaatgttcctgtgattggtaagggacatgcacaaaatccctgctggcattttgcttactgaaaggagactggagtcttctgactaagctgcagaagaggaggaggctgtcccttcttcctcctttaccccatatggaacaggaaatccttaccagggaaattatgcaaaagcacatgaattacaggcatctatatagtgatgggcatttgcaatcatctcttttagcaaatgatgtgcccccccaacttctcttacaatacatttatctaactgatctaattgtgctcacgttttggagtatcatttggtgctttgatatgtgtgcactctgcatttatttcaggaaaggtatttatatgtgtctcctcaaacacttgtcagttctattagtaaagcaattgggatcctctatcccacctgtcttgaatgtcttgaacactattgtagggagacaccctggccccacccaatagtcctgggacaggtgccaggtggacccgggactcacccataacgtgtggtgaaggaaagccagggtgacgtaagagaagcttcttaagggctgcatatggagaccctggccccttctctctagccacgctaggtgggttcctgtgacctcgctctggcctgcgttttgccctggtgctttcttgaataaagaaatcttaccatcacggactacagttcatctttgagcgcacgctgcacacaataatcttcacactatcatacaaggcattaacctgactgccctactctatggtgacatcagaactcatttcccccatgtaactggagcttagcaccctttaattagcatttcccaatccatttcctcattctcccatcttctaggaggcattactccattctcaactgctgtaaagtcaacccctgagattacttgtaaactaagagaacaggatactcttgtcaatagctgaccttttgtgttgtgttgggacatgctgtgactgaagagaatgtttcctggacatctgtagggtgtaggtaggctactcctgcactgattttttttttttttctggatgatctgtccatcatttaaagagagattttaaagttctttgctcttattgatttggcatctctccccacttaaggtctttttaatactggagaatgcacatcaacaacaaacatacatatgcatatatatgcacatatataatcataaattattgtgattgaatctgtccctttgttgctatatgacaatcattccttcttattctttctactggccttaggtttccttaccatgaaatgtcttttttttttttccatctatgtgagtttatatttgattacgacaaaatatctgagctagggattatagctatagaaaagaagtttgtgtaaactcagttttggaagctaagcatccaaatagcagagttgtttcctgatgaggacttgcctggctgagtcccatcataatggcacaactcaggccagtgtgaaagaggctgatcacctgggaatgacaggaagccaaacatacaacagagggcacactgctgtcatgtgagatcttttaaaagattttccaagtcatgctttcagtaggttaaagactgcccaaaccctcactccagaggtcctggcacctctgcaaatctccatgctgagggccaagcttccaatatgggattcttgaaaaagcactggcctgacatatttgttctatgattgacgtagataccaactgaatttattgcctttggtacataatttttctataatttaaaacaaatatagtttaaatatcatatgatattgatttcaaaacttatatagtttttaatcttgattttaatatatagcatccctgataaatgcagtaatataaattctgtgagcaatgtttggtgaaatactttgaccaggaaaatctgaatttttaggcatgaaaatcacttcactaccatctttgttgatctaattaaaaatgaactgaagctatgcatcttcaaagttggcaaaattgcagtttttgttgaggaagaaaaattagaccatatttcaagaaaattggttagttatatctgaaatagaaggtttgaaaattctgcactagaatatctataagaagtgatttcttatttctgttcacttgccacctcaactagcttctctttgaaggaatcaaaaattcctcatatgaggtaattatacgggaatatatactgtagctaaaatgaatctatatggataaatatataatatcaatgaggaaacataaacagactgttataagaggctatgtgtagtgcattttaaatgtgtaaatgttgcctaaaggtttctattaggaaatgaacgactgctacacgtacttcttacttctggccagtgtgcccttgtaatgcattctttcagggggaagttttaaagaagcttttctcattgagccaatttggcagtaggcatgtgcactcagcattcttccaaccagcctactgtactggtaaaggatagaggtttatttagaacatgtaacttggctttaatagctaaggtaaatatggtggagcaacatcaaagaaaaacaaaagcctttttaaggggtactgtggaaaaagagcaaacccaaatttgaatcaagcacttctctctctgtcttccatttatccccagcaaagaacaagaaaacatattatgtgaaagcagtgagccccatgttttagggagagaccctttgacaaaaatcagtagtggattgctcctgagaaacatctgtgcttgattttggtctccacattcacgttcatacatgtgtacccatgcatatatgtatacaaacaataaatgatcaaattgtatcaaattttacaaggaaaaatggattttactgaccctttatgacccagaaaagcactcaaaaacatgaacataagtaagaagcctatgtggtttctaacattaatgttaggtaattatacaattgtgtttaatgcctctgcttttagtaaatatttaactatatttatatttgactaactcatacacacacacacacacactcacacacacacacacacacacacacacacacacacacacacacacgtacccttctgggacagaggcatagaaggagggccaaaatgcacagattgagaatatagtatgaggttaaggttaatatgcatttggtttagcttgtagaagctgattacacgagaattccaatgtatagttaatatcaatttcattgtttcctaaaggcaagttaagcaggctgaatacagagtagggagacacatttataacaaagttttaaatagtatcaaggcaaatcattaatttgtttgcaagtttgggaaagctatggtttctgaaagcaaaaggtacttccctcaaaagcttttcccacaatcaaaaataaatgtggcctagatccaaatgcaagtctctatagtaatgtagatgggttctttcctggactcacagcatggggaaaactattatgcaccgtggtttggtaaatatcgcaatttatttaggtgaaaaatcatctcattctatgaactgtaagatgaaagagtgccttggccaagtagatacctggcatgagattgctactttgaataaatgtatctcaaaagaacataatccaactgacaaatggattccaaactgacatgaaaataaagttaatgatctgcaaatttagaagtgcaagttgctaatgaatattttaacatgttcaacattcttagctatcggggaaattgtaacacatgtagagtcttgtggtgtgtgcttgtgtgtgttacatgtgagtgaggtgtacatgtatgcacattcatatgcagggcagagagaaagaagtgagcaaaaatgtggtcaaaattgtcagtgtgagtattccaggaaaaatatgaaacaaagacttaaagtctgaagcaaataaacctgaaatactttcaaaaatttgatgatttctactaacacacatattcaataatgtttgggaatacctggagaaaataaaaaaaagaaacagaagcaaccacaaaaatttcttggaaatcaaaaccaagaacatgtgtactgaaggaaaggaagagagaagagaaacccacacatcaaaacagaaaaactacaattgacttctcatttgaaaaaaagttattcattctttttttttaaaaaaaagaaaatggaataaatggaatcttataatggcaagcagaaataactggaataaatcatcaactctcagaattacaaacatgtcaatgatcttcctaaagtgagggaaatgaaaacttgctgaaaatggtgtgtgtttaccggttcatagatccaaattcaaaataaccacaagaagtcagggcatagcaaggtagagttattagcctcagaaatcaaggaaagtatgcaatgctgttctgaaaaagtaagaatatgcagatttattcagggagcctagacatatttatataggcaggagtccacccattcctggcaaggtcagttcaaaatcgtaattgaaaggggaaagaggatagaagtgtatatgtgtatgtttagctcgtggtcatggcacacaaacataaaagattaaagtgctgacagaaatgcttcagagaatactctgctaacatgggaaagatttgttgaaattaaaggacagggaactttcaggcactttccagggaattaatcctggaattcccctcatgattgtgagtgccttgcttagtgggtcacaaaactaatctaaaagatgaaaattttaattcaacatattagatattcagatagcaaaaccaccagtcaatcaacttaaaaagcaattctgtttaacaataatcctgctactgtttcagggtagaaggacaggaagaaaaggtggaagcacaaaaggaaagattctgtgatttcttgtaaatgtagagttctcagtaaaagtctataactccatcaggggtttctcagaagccatgaccacatccacaaatcagtcttgtaacagtggccctgatttaagcagctttggctatcagaacagggtaaacaaaactgttgactttaacaacagcacctccaacctcacagtgttgccatctgagaaaggcaggatgaatgctgttgatgattaccctgggaggaaatgatcctgacttatattagtttctctcttactgtgtctttacaagactaggcacagagctctccagtctctgctcttcacaaagacattcctcctacctcggtgagtgtgtgtgtgtgtgtgtgtgtgtgtgtgtgtgtgtgtgtgtatgtgtgtgtgtgtgtgtgtgtcatatatacatgtttatgtatatatgtgagtgtatatatacatattattctgttattaatgctgggatatcctaaagtcatatgttgaacttcaaagtctattatcaacacacacacacacacacacacacacacacacacacacacaaagaatgaggaagggaggaagaaggagaagatagaattcattatataagtaatgaaagtaaatgcagtattataatctgtctccccgtctctcttcctctatgagcccatcacccccatacacacacaactaatttctgaggatggaagtaaacatcctggtcaagaaaaacattgtcattgatctactgaactgccattaagtgtttaagtgcctggaaattcaggcttccagcgagaatgtatggaatatttcaaagtacagtaaatatttgcacctgtgtgttggacatctcttctgaaaccattgttgactaactacacatagtgacttactgagaaagggttaatctcatacaataatgtgacactgtgttacataaacatgcaaaattaaaatatatttcaaaatatatgaaattattaaccctttattaaagctttagtttcattttcactaaacttcacttccgggttgatgaaagcagttaaagtttgtgcaacttgtgcatatttctctttggaatagaatgattcttagatgtttataatactttttagctgtgaaaattttgtcttgtactttttttctccctctaatcactgtagtcttaattaggtaaaccttaacaactgacattgtttgctacccacttaattatgataaataaaagctacaggaaagaatatactgtattctcaaagaaataaggctctttaatgagtaaacaatggccactaaacagcgcaaactgttgtagtatgaccacttatttaaaaaatgtcacagagagtttacagagaatacaatttaatagattaacttcaatagcatattcaagtgacaacatatttagcaagggcacacaaagaaacacaagaagtatatagcttttctatattttggaagaaagtaaaagttttcagtttagattttccacatctcaaagacagataattaaagttaactaatactgaacagaaacattgtatagtatgcatagtaatttcctaatttggggttagctattttcccatgaatacatataatatttggcgtgtcctaggtgttctagataacatatgcatatagtcaccacatagtgagcctaatggcagtctcctctccactacagaatactgacatgtctgctgagttgaaatgaaagtgaaggacaagacttcagttacaagataaaagggtttgtttcctaaaacgcaggcatagtcactattccagctccagcttaccaccaaaaaataaggccactatgaaaaaccaactgatgcaatgtcttaaaaatgcaccaatttcctacaagtcatttaaaaacatgataatgaaagtacatctcagcagagatggtcccagtactcctggattatatccctgatatttttgctatttggatcttaacttttaagccatctttcacacaaacatgtgcatataaatttcagataattattctgagattgtgctgttactagaaaatgtaaatactaattccacagttcacagtttcatatcgtgatgatctattttgttcttagctgccaattacagactccagtagattaaaaaaaagtagaacttaaaatttgcatacctttcatcagtctcagttgatcatgaatttcatcttatttcataaagtttataaatagaagaaaatctgcaataaaaacaggttctaaaaaatccacattaaaatattgaaatgaaaataattttgagtgaaaattgagactgtcttagggttttattgctttaaagagtcatcattccaatgataactcttacaagagaaaacatttaattgtttcctggtttataatttagagggttagtccattatctgttgtgggatatttgtatactgtgtgacaatgtattcttactacagttttctattcactaggtcttcctagagccttctcacttaaccacctacacaaacaaacatccttccctgctctcttattagaaaatatatacctaatgaaaggaataatacagtaataataaaacaaaagcaaacaaatcagaataggatgaaacaaacagataaacaacaacaaaaataacagacaaaatggagctggagcaaaagcataagaaacacataaatgcggagacacagcaatcccacaaaaacacaaaactggaaagcataatatataagcaaaagacctgtaaggtgaaaaaccaaaatactcagacaaagcactatgagacaaaatactcccaaaatagcactgaatgtatttggtgcaggccatcaactgctcagtatggacataccctgaagtgtggtttgtatacccaatgaaactccactggagaaaactaatttttcccttaagagtgcttgttaattggtgctagtagttaggtactctcgcaacatttttcgtcacttttgcactagtgtatattgcagagaggttatatttgtagttggatatgtgtttgcctttctcctctggtaacatgtagacaacttttagtacatgaacactagtcagtaggctgaagattctaggtaggtaccagctcaacttctctatgataagtgagttatgtaggtgctatcttcagcaatggggcattaccattacattttggataacatccaacagccttggcaatagcctgaattgtttaggattttccatggagccccttcagccaacaactcaattagatataattcatgtctcacactagaggtttcatttagtggcaaaagatgttcagtcagggctttgtctccccattatctggtgatacaatttaggtttatttcattcatgaatatctaatctttttagaaaattctactgtagtaagtttccaatgaagtcctcaaattactctttgttttagatgtccttctccatattacttcttagccccctttttactctgcctccattttgatcctcccttcccagccttttctctgtcaatccctaattattcattctatttcactttcctaggaaggtccttcctctcctcttagtccttactctgttcctaacttctgtgattatatagattatagcaaatgatcaaagaaaaggggtgtccttccagaccaggctgactttgctttcaaggaaaccctttcatctttgcttgtcagcttacaggtttttaaatatgaaccacaatacccaacttagattttgtttaattttagaaaagttacattttctaagcttaattttctatgcttgttataatctatgtactttattaattaataaaattaatgattatttgaaatgcctttcattgtctaggcattctttggatggtgttttcccacagtgtgtttctgcttcctcattagtttctctagcacatcccataatacttcacatatttgaacaaagttttcaagagtcactcttatacttatgtagcatagttgaggcaaatccctggcaaattgtttcctttcctttcagttatgttactctagatcctcgtcaggtactggggtgtgcaggggaggtgagaggaaatacacatcgtaagtaatatgacttaccttacaacatttttattctgagacagggtttctctctgtaacatccctgactgttctggaacttactccatcaggagggcagagatccaccctccaccactgctagcttgtaccaccaacaccaggcacaacattttcatattaaacaaattcctagaccttgatacatgtcctgggtgatacacagttatctttcttgtgaggtctgtggagttactaccacacccatgtagtctgacaatagacataaaaggattagttcatgcctaccactatcctattttagaaattataggttaggtcatatttcatgtgttcatctgatagaggcatgtgaaaaccgtccattttctatgacagtaaaagaccttttagtcaaaatttggcaacagggatcaactgatggggaatgcagaatactgccttgtttgccagaggctgagcttgaaaaaaaaaatggatccctcaaagctcttccccaaattgtcatattacctatattttgggtttttttttttttttttttttttttttttttttttgcttgtttttttgagacagggtttctctgtggcttccgaggctgttctggaactagatcttgtggatcagctggtctcaaactcacagggatccactctgcttcctgagggctggatattacccatattttaatacccttttggttttccttctctcctttctctattgctttcctcatttattcacatacaaatgtacattataaaatttattacattaccatattagtttatttaataatttttcctaaatatgagcaaagcatgactcatgactaattgtagcagaatcattattgaattttccaattctaggggtacatttgcaggaagatgctgtttactggatgacatttggagcctggagataggctttctcttgtccctaatttttcttcctctagcatctctggttatgatgtagtagcttgggcagtgtggctgatctgggatcattaagattaaaaatataccatgtaagcaaaagaactcacacactgatagaacagcaggtgcctggagggttattaaaggtaggcaaaacgttcaaaatatctgcccttgccttttatgtagataaaaaggcaaacttccaaaggcagaatttgatctaaatctgtaacaagttgggaaaataacaaattaaaaaaagcaaataccttgggctcacaagaggtcatttaaaattgctcaagaattaaagtaacttataagccaaaaatttttaaaagaaatatgactagaattaggaagagcacattgatagtaaatatgtttcatcacctctaagcaattagtaattgtttataaagactcgagtatgaacttacagcttatgaataaatgagtaggggtgtctctcatatgcagccagaatcaatatataactttatggaaatgccatggaagtaggaacagatgtgaactctgagacaaagtgagtcctccaagtacctcactttgcaaaacagatgttggtacatgatcttggtgtttcttctatgaaacatgtgcaatccagataacttattaaaaaaaagttcttagaagtaaacaagaacaatggtcatcactaaaagaaccttttgctcaaaataataataaaattaggatgataatgttgatgctgtcaggtgctgaacccaatatcatttcagtggtgtgtgtgtgtgtgtgtgtgtgtgtgtgtgtgtgtgcgcgcgcgcgcacacacacacgcgagcacgcaaacagtatttagtatttatatgtgaactattaattactattactctatctatatatagatatacatatatatttaaccctgttgttcctattgctacatggggcacataattgttaattctataaaagatattgctgtattataagatattttacaagttgaactctgttaaactatgtaatatgaattctggcatagatcctgataaattccaaggccctggaaaaaataacacattaactgttgggataccatacctttctattcagttttcttcctttggaaaatctctagaacttaattaaattcttaaatctcttttcattcccttactttctcccacacaccattgaaataagcattaaacctagggtctagctaggcaagcgttttactgctttttttttttctttgttttatttgagacaaagtattgcatggtttagcttggggaatgtgaaaagtgcctatccatgtaatgtaggagaccaaacttagatcacaatattaatatcactgtggtcaaacatgaagagtagtgctttactgcgcttgcttacaggggtgtaatgggagaactatgtacaagagaatggagggctcagatgcacccacatcaccaaagatcctgcaccagcatgagtggaatctcctgaaatcacccttggaagctttatatgccatccacacaagtaaacaagacacaggtttccttctggaatcttggctgctctggggatttcctctctgcacaatgattattactgcttatataagctaggggaaggagggacctagtgaacctggtaaatttcagggatttctctagtctagtagattgtttcctcccagactctaaacaagtttctcttctgaatgtaatattacggtttcagagaaattactacataatatacagtaagacaaagtttctcagactgtcttcgaacttgtgattctggaagcttcagctttcagagttattggagttacatatctacacaatttggtcattaagtggggataaggaacactactgtagcttaaatagtgacttgatcttaacatactaataatgggaggcttcaagatcccactacatccagaagacatgttatctagacaaaaactaaacagaaaagagctgaagctacctgaagtcctaaatcaaatagaaataatagatatttacagaacattcactcaaacacaaaataatatacttcttctctggacattgtggaactttctccaaaatcgaccatatacccagatacaaagcaagtctcaacagatacaagaaagtcaaaacgacaccctgaatcttctctaactaccatggattagagctggatatcaagaaaacagaaacaacagaaagcatacacatatacacattcttggaaattaaacaactcaaaacagaatgaaaaatgggccaaggcagaaattatgaaagaaattaatgatgtttcagaaagaatgaaaatgaatagacaacatacttaaaattatgggaaaaaatgatgaaagtctaagaggcaagttcatagtactaagtgcctaaaaggagaaattagtgaactctcatactattaacttaacagtacacctgaaaagctctataacaaaaagaagaatgcacacataaaatgagtaaactgcaagaagtaatcaatcttagggcagaaataaaatagagataaacataaaaacacaaaacaaataatcaatgaaaggtttgttttttgaaaaaattaatattattgaaaaacattcaaattaacttaaaggcatagagagattatcaaaattcacaaaattagaaatgaaagacaggatataacaacagacccagaggaaattcagagaatcataaagacagactttaaaaaccagtattccatcaaattggaaaatctaaaagaaataggtaattttccttacttatatcacctatcaaatttaaattaacatcggataaacaattaaaacagacctacaatacttagtgaaatacagcaggcattaaaattctattaacaaaaataatttacaggacccaatggttttagcaaagaattctatgaaacttctgaggaatagttaatgtcaatattcctcaaattattccacaaaatagaaacagaaagagcatttaaaaattcattttatcatgccacaattaccctgatttttgaagcaaatatagatgcaaaaaagaaaaagaataataaacaaaatttcctaaagaacacagatataaaaaaacaaatcaataaaatatttgcaaactaaattacctgccagtaacataaaaacttggcttttaggtcatatctggattgaattcactgagtcctgtgtctcaattgtgtggtgtctttagctatagagacttaccttccacctgtgaggcatttaaaaaaaaaaaaaaacaacaacaacagtgtatattgttttgggagtctcttgaactctccataccaacagctttttattaatattttttcatttattctatatcccaaccacaatatcccttccatgctctcctcccattccctctgcccacctcccctccgtaccttccccttctactccttctctgtttctgttcagaaaggggcaggcctcctatgagtatcaccaaagcatggcatatcatgttgagatagtactaagttactccctttatgaagactgggtgaggcaacccagtatgaagaacaggtttccaaagccaaacttaagcaatagggataggccctgatcacactgctaagagtcccacaaatagatcaagctacacaactgtcacacatatatagagctgctaggtcagttccatgcaggatccctagctgtcaacttgaccaataattttaaaagagggaaggtacatgggatggaggggaaccaggtataccaggtaggaactcaaagttatgaaagggacaggtaatcaaaatgtctggattagacaaggaagagcctctgccaggaagggctgcccagcttctggtatggaatgttcaaggtagagggctgggtatgccaggcatactctgtcacaggtaaggactgagggatgctggaataatctggtggccaggttcagtttaatatgttaaataggcacctcaaccattttctctgggtttgaaacataacactattaattaatgttgacttactaaatgattcatagagaatcttcaagtcctggaggcactcagaagtagggagataattcaccaaatttgatttactcttccctgggcttcttatctacaatctttaagaaagaacaagcaaatgagaacctggaaatgcaagacagtggtagaattcttctctactgtacaggaaatctgtgtttgatccctggtgacacaggaataattattataattatcaaaatacaccaatttaatgtggattccaattgtaactctgtttcatcttctttaaataaatttataattggtgttgctcactgaaaaaaaaatttgcaaactgaatccaagaaaatatcaaatagttcatccaccaggataaagtaggtcttatcctagagatatatatatcatatatgagacatatatgaatacaagtgatacacctcagcataataaagtcaatttaaaacaagcctatagccaacaccaagttttggagagaaacccaaagaaattccattaaaataagaaaccagacaagattatccactctctccataccttttcagtatagtacttgaactcttagtgagagcaataacaatgagatcaagggaatacaaattgaaaatgaagaactcaaagtatccttatttgcagatcatatgatagtaaacataagtaatcccaaacattaccaccaggaatcttccacagataataaacactttaaaccatgtaggtgtatacagcattaactcataatagtcagtagctcttgtatacaaataacaaatggattgagaaagaagtcagggaaacaacaactttcacaatagctacagataatacaaaatatcttgggataactctaaccaagcaagtgaatgacttgtaagataagaatcttacaagtgaatgaataaaaaattggagaagatatcagaaaatagatagatctcccattctcagggatcagtagggttaacataataaaaatgttcattctaccaaaaggaacctacagaatgaatgcaattcccatcagaattctaacacaattctttacagttcttgaaaggacaattttcagctataggtggaatcacaataaatctaggatgactaaaagaatcctaaatattaaaaaaaacaaattactggagttttcactatccttaacttcaaatgatactatagacctataataataaaaacagcatcgcattagcacaaaacagatatgttgatcaatgaactagaactgaatgatcaatagaatagaatcaaagacctagacataaatctaaaaacctatggacaccagattttcataaataagccaaaaatgtgtagtggaaaaaaccaacatcttcaacacatggtgcttgtcaaactggatgactgcatgtataataatccaaatagatccatatctatctccctgaacaaacctcaaatccaagtgaatcaaatacctcaacataaaacctgatacactgaacctgatagaagaaaaattgggaatcacactgaaagcattggcacaggagacagtttctctacataacacctctaatacaggcacttcaagaattcaaggtcatccaacactgagatcaactctaaattaatgggattttgaaaaactaaaatgcatcatatggcaaagacattatcattcagacatagcagcagcctacttaatgggaaaatatttttaccaaccacatagtatcaaaaataaataaaaaacttagaaacatagatatcaaaaccccacaagttatccacttaaaacatacagataattctcaaaagaggacattaaaatggctgagaagcacttaaagtagtattcaacatctttagtcatcagggaaatgcaaatcaaaactactttgaaatttcatctttcacatgtcaaaatggttactatcaaaaatacaagtggcagctcatactggcaggatgtggatctaggggaacattccttcactgctggtgggagtacagacttattcagccactatggaaatcagcttggtggttcttcaggaaatgggaattgtttttccttaaaaaaaggctgtactgctcctggtcatatgcaaaagaacggttaatcctgccctagaaacacttgctcaatcatgcttattgatgcactattcacaagagacaaactggaaacaacctagatgtttctcaactgaagaatagacaaagcaaatgtggcacatttcctcatggaatattattcagatattaaaaaattttcatgaaattcttaggtaaatggagagaactagaaaaaaatcatcctgagaggtaacacaaacccagaaagacaaatgcagtattattctcttatatgtggatattagttattaatcaataataagcaattttctatccctagagttacaaaattaggttagggactggggtgtgggaatagagaaatctccctagaaaggggaactagaatacttatggatggaagagtctggattgggaagaaagagggggacaacagagagacatctgaagttcagggacatttatggggtagtatgtaaacttaatgcagaagaaatttcctaatatatgtatatatacacataggaaggcaatctaaattaaatctcctgataactggtgagacatagctccaactggatatctctttctaaacaaatgaagctactagtaccagtaacacggtacatctaattgattttttggccaaagttgttcaacttacaccaccaaacaaccttggctgttaaaaaaaactgcatatagttctacacaactgatgacaaggccctgttgctgaagacaacacctacacaagtcactaaacctggagaaattgagcaggtactcacataaacccttcattcccaatgctagactctttggtacagaaagtattctgaatcttaccaaaggagaaacataaacaccttgccaggtataaacactttggtctatactagtgaaatggtgtcacaaattttgtgagcttaattaaccaatatcttatttgacctaaggcccactgcacaagatggaacacatacctgacactacatggttgggcaaaagcctgagactagatagcccagagatctaagataaaaccaaatactactgtattttttttaatttttattttcttaatccatagcaaaaaaaaaaaatgactcaaaatgacatcctatactcagattagtgccttgcacagccataatcagagaagcttcctcttgcagctgatggtaataaatgcagagactcacagccagaaaataggcagagaatgagagatcttagaacactcagccctaaatgggaactttccatcaaatactccacctcagggttcagggaactaaccctggggaagaggaggcagatgaagtgtaagagccaggaagagtggaacaccccaagaatccaatgccctctaaatcaataggatcaacacacatatgaattcatagagactgaggcagcatgaacaggtcatgcacaggtatgtatcagatagagtccatgagctgaaagaagtggaaacacattcccatcccttacttagaagctattttcaactgataatcactttcaaatgaaaattttgttttcttcaaggaagtcgtactaggaaaacaaactccacttacatgtaggctgtgggctcagcagtatatagacaacagaaaatgagctcaatggcatctttagagctttcttgtgcctgtataatgttgtatcagagcttttctttctcaaaaatttttcttatttttattacacacagacacacacagacacacacagacacacacacacacacacacacacacacacacacacacacacacacacacagagacacacacacataccccaacaggtcctttgcatataatatgtcttccagataatcatttaattttattatttttttttcattgtacataccaaccatagttcccctccctcaccttgtcccatccaccagcctcccccttcccatgccccatccattcctcaggggggtaaggccttccttggggagtcaagaaagtctggcataccaagttgagacaggaccaagcccatctcccctgtgtcaaggctgagcaagatatcccatcatagggactggtctccaaaaagccagttcatgcagccaggatagatcttggtcccagtgccagctcttccccccacccacacatacaaatcaagccatataactttcacccacattcaaagggcctaattcactcccttgcagaatccccagctgtcagtacagtccatgagctcccaccagctagggtcaactgtctctttagttttccccatcatgctcgtgagccccccttgttcataaaatccctcctcctcctcttcaaccgaactctaggagctcaacccagtgcttggctgtgagtcactgtatctgcttccatcagttactggatgtaggttctatgatgagaacaagggcagtcactaatctgatgacaggggaaggccccattcaggtacctttgccagtactgctaggagtcttagctgggattatccttagctgtgcattgctgggaatttgtctatcgccaggcttctctctaaccccataatggcttcctccatcaagataactttatcattgctctctccctctgtccctccccgaacttggcctaattgatccctcatgttcccatcccctatctcctccctttaccccctccccagtttacccagaagatcttaactgttttccatgcctgagataattgtttttatgagattcctgcgtataagaacaaatggctcagtgtttgtaagtatttcctgtgcctcctcatggactcttttccttctgtgtgtttgttatgttccattctgatgtgctaggctattttttttgtttgattgttttttgttttgttttgtttttcaagacagggtttctctgcagctttggaggctgtcctggaactagctcttgtagatcaggctggtcttaaactcacagagatccacctgcctctgccttctgagttctgggattaaaggtattggccaccactgcctgactgtttgttttttaatcttactttattttaagctattttatcattatcatccttagaaaccttttctttctctcattctttctttcttcctttctttctttttgataacacacagaaagagggtggatctggaaaggaagggaaatgagtaggaactgcaagtatagagggagggtaaaccataatcatgatatattatgtgaggaaaaaccagctattttcaataaaagaaaagcaacaacaataaaacaaaacaatcaaaacccaagaaatctgttaagcaagttaggtttgcttccttttcctgaacttccaatactgattcttcatcattttctcactttgagcagaataggatatagtgtaggataacaatttaacagtaaggaagcaataacaagactttctcttttgtggtcttgctttctaccttccttacacagctctttaatggcaaactcatattccttcccttgtgctctgtggtaatattcattgcagacatcaccacggatgtgaggtctctcccttaattaagtactaaaaggcttcatttcctaaaacaaaagcatgtggcaggttttattgatcaagtctgtgtcgccagctgcacacattagtggtggttattgatcactttggcggtaatgacttgggttccctgtcaggtggagtacacattcctgggaaatattttcttacaactctctaatatggaagtccatgcttcccatgatatacactatagcatctttgaaagcttttttgccaatgaatcattctttaaaaatatagcagccatcatttgaaaggttattgtctctcatcattgtctttttaaaaattcctcctgaatgctaatgatgtacttaggaacttagcagggtgaaggcagcctaaagaaccacaatctcgtatggattaccatggtcttgaaatgttctcaagcaatcatcatcattagcttctgaagaccaagctgagggagctaacgaggtcagcttacccatgttcaatagccaggatctccctgtgtggtttattgatgagttgatgaaaataaaataacttgtgtgttagtaagaaaaggtaatctgggaaaaaatgagttaatacatgacatttaataagaaaaatgatggtgacttcttcaccaatagaatgtatttctaaatattgctgaaatgtaccttgtcttgagaattctcctgcagaaatgaccaattgttgctctttctaatccacagccatgagatgtgacccattagaaggatgaagtcaagtgtctcctctcaatatgaaaacataaaagctgctacttaaccatccaggtttattacaagtgtactctaggctttaatgtattgaataacctcaaaagaatgcttttaagcatacctttaaaatagtatcagatcatataggttttaattgttctgtttgcatttggaaaattaagcattccttgttaataacagctctgccctggtaaatggaacaaagagatcctggtgaaaatgtacatggtggctcagttcagtaggaaaaacatccaagagaacattaacagatggctttggaagccacacacatacaacatcatttataaacacacacagcaaacacaaacacatgcagtaataaggcatatgacggaaagaccatcaaactgccactgttatagtaaagaaagcatcttagctacttaatgcatgtctgcttctatgtgtgtcatgctagacaaagtgggatttctgtctatagatctctggccaggctttggttcaccagggtccacagaatcatgtataaattcctcttcatagaacctcagtgactcaataatagtgtccgatctttaatccataagtgtgcctctgtaacactgccaccctgtcccccccacccccgttagatacacatacattagcaggatagcaagtggcttctccacaccctctttgctctgtcccagttgtatttgaccttttctccttgtggaattctcatgatctcatcgacctttgttaaaattgtccatgtggttaatcagatccaatacaattttcattgacactgaacatctattatcatctgatgtttggacatctacagatacaagccaagaaacacacccacctctacatcttccctaaacacttggagtagcaccttcatgtgatactccttttaacctaagagcaataaaggtgatagtctagaatgttcattctatctaaatacattgcagctctagtactttaacatttgctctctctcatacaacatcaactgagtgagctattcatgttcttttaccttatacagtccacacttcaagttgctctttcctaagctacagagttgaggagtggctgccttcattacttttaatatcttttcaaagcattatgcatgtcttctctgtatcaggtcctgccttctctcacagtcctaattctctatgcagcacggaagactaaaatgtagatacaattgcttcttcttaaaatagaaatactgttaccacagtcagatttctttcatgctttgtaaatttcctgtggacagtttttaacactatgagttatatgcatttgagttgttctgagcattggaaggaagtctgatatctttaaatgactattaatcttgtgtcttccatactaaaaagattaaattggagatcccataggccacaatcctgccaatgcaactacttttttgtactcacccagatatacccagtttgtacaatcaagggctataaaatcacaagaatcatttctttctttcaaaacagtttttagactaatgtgtcctgaaacaaactgaattatctgttcatctgatgacattcttttattcccaagtcaaaacactcatttgatcttttcatggccaagttttttcacaatttgcaatcgcagactcatttttcttgcacacttttcactgctccctgggtaaagaacctcaacatgtcagagttacagaaacactacagatagcaagttctgctcccatatgccagtatatcatcagtgctccacatggccctctgtccttttcgaaatattcttgctatgttctttgatgtgtgttatcacacaggtttcactgaagtacagccacagtgacaagagtactcgactctcatttgctgatttctttgaatacaagcaatcatccaccattgaacatgtccacactgtgtcactcctcttatatgcacaggctttatggtagcaatggcaccaagcattcaccatgacatatttgaagcagtatggactatgattaaggacagtgggaatttgaatgctcactctgaaacttcagtatgttagcagaatgaaccaaatgtgttttggctgagaacagatggatgcaagactacaaatatttaataactgcttatccttgttgtcatgaagagccttgaacatgaaaactccaagatcatctatgataattctttagaaaaaaagttaagaagttggatttcacttaaaattgtaaactacagtttattcagaaattatggatttaatgatatataaaattattaagacactttaaaatatgagacttatctcctctgttcctcccatatccctttggaaaactgtgctttgaagtccttcttctctcattccactttctcacgtctgctaacatttacaaaaccctttacctgtcttcatctcccaccactgtagacaaacagcccattattaaaatgagatattaaatctcacttggtagagaatgaaaccagagacctgaagcttcacggtatttgtaaaggtcagattttcaaaacccaggtaaacagtattcaaactcatgaggaaatgacccaaatgatttagaaatggtttaatatattacagttcaagtttctgttatttatagaactgtaataacttcagcactttgaactgctctattggatgggtcaagcagggctgatagattactaaaattcctcatgagtaagaaattcaatgttggactgtggagaaatacagcaagtggaaacagggcagggtctcttatcaggtgtcctcagggaatcgttattcagatttctcagtacaattcatggccttttgccgaaaaggaataaatccctcctagagagtccctctaagattctcctccaggcacaaataagacttggaagtttatcacaactactgaatctattgatattgttgggaaatcatcttagcaaacttatcctaattatgtgaaaccatgccaatgcaagaagaatccagaggttaagccagagttatatttgtgtctcttaagctctccaagatggctgttacccaggaaacatacctggctccttgcatggaactaccagtagagaaaagaattaagccctgaatgagaagcaagtctatgtagcatcctccagtttctcaatgttggtatataagcagaagtcatgaggtgacatctttccaaacatggagttgctgtacttagaaaatcctgtgaggttgtaaagatgaggaaagtttcaatatgtgctagtgaaatgtcctctggtgtaaaagtgacagcttggaaaacttaattcaaccaaaaagtgaaaaacaagaaacactgatttcaatttacctatcaatatgcctataaccaactgatgagtaatgggggatgctgtaaatgccacaaatagcaccagtgttgtctctgtaaatggatatcatcatgcctcggtgtggtgtgcatagacagccatattccatgcacattggcttgtctatcttgctgcttgggtagaaatcacaaatgattatgcatgtgtggctatgcaccagaggtgtgtgtgtgtgtgtgtgtgtgtgtgtgtgtgtgtgtgttgtgtgttttcatgtatttgtattgtgggatatataagtatgtgtatgtgtgtatatgtatgtgtttgtataatttcatgtagacatatgcatatatgtgttttgctataggatatttgtatctttgcctatgtgtgtgtgtgtgtgtgtgtgtgtgtgtgtacaaaggtgtctttatgtgtgtatatatgtgcttatatgcatatatatagatatgtgttgtatgtgtatgtgcatgtgcacacagtctgtgtttcttaccagtctatgttgatgaatatgtttccacatctactttctgcttgttaattatctgacttatttatatttttttgtactttctaggtaggggaattaaagagtcaatgttatattggcctctataaaatcacaatttaaattattttctagatagaccctatttgatgtgccatttccacaattttcctacaaatagccatatacaaagatttccttaaaatgctcatattttttttgagaaaaaatactgctgtggcataattgttgacaattatctgttctagcaagcttgttaagtaggggtgattaattttgcagtaaagttcatagctacatggccttgaaggctgtgactaacgtggttttatctgtgaatcagtaattacaaatcaacaacatttctcacttcatgcatttgtatgttcaaagttctgtgacagtaagttatgttgtttatacttcaggcacttcactacaaaatgaacaggaaataaggggactgtgttgtgaggaagagtccagcaaaagaggcaaactattcataagatacacatttctactcatgttaaaattattaattttatttattttatgtatgcaagagatttgcctgtgtaccatgtgcatacctggtgtctctggggatcacaagatattctgaaactggaaccatggcagttgtgagatgcccttgggtgctaggaacagaattctcttcaaatgctcttggccacagagctacctttccaattcctttttcccttttccctttcttggaattttgaacaaacaaacaatgccaggaggtggaagtgttgactagaccatgagtcagccatcagtgtggatcatgcatacaaactaggatctgagagaggaagaacataagttccagagaacaggctccaaagcaagagtgaaacccaagacaattttccttgaacctgccatcccatataaacagccattgtatattttaagcatagttttgtacatacacatttgttccaagaaaactatataagcctatggcatatagaaaactacattttttacaatatgtaatttacttaatttgaagatacctatagttaatcacatctaagcacacaacacgtttgaatttctctgttttttatgcataatcggtgtttatagggtgcaacatgattttgtagatatgatagcagtattaacagaaccatagctggcttctcacaggtgtgggcagtcaatggttttgttttgtaaaaccattttcttgttcttcaagtaacgaccacttgaagtttcacacactgggttctgaatgattaacgaaaacttttgttgggattcatgaggatgcttcccatttattatcttccaatttatctcttctgtggaataaatagaggatgctgaaatgcttgtatgtatcagactgaatctggaaagaatgagtgtgcttattggttgagacactgggtttatttgcatgccctcacctttaaaataataacccttcagtattccctcaactcatgcagctctctgcattcaacatagacagcttgtaaagagggcagaactctcacagggaaagggtgatcagcccatgcactcatcattggagttgccagctaacagagagaagcatagcacatgttacatgtagccctggacagctggaactcccggtggctcctgggaggaatggattccacacagccatctgttctctgacatccctgacattctagattcgatttgctaccattgcaagtcaattaaggatattctgttttgaacagggcacacaaaaataaaatcctcccccccaaaattacctgatttttttttgccttattcgctcaacttgggaatagaaatgaattttaaaacaaagacaactgtcatatgcctctataggtttaagtcatgtgaactaacagattcctcacaagttatttacatgccaaaaatgggtgcctatgtagttactctgttggggaaatcacaggaccaatatttcctttccacaactgatttaacattaggaatattggcatctatcaaatgtgtattaaaactgaccattgaggaaattagttctaggtttacaaagctgcttttcataattaaaataaatcagggcccagatgtgtggcttattactttcacctggagggttatacaattctttcagcatgttgatgcttttgcaggatggctacaacttaattcatataaaaagataattgtgctggaaagattcattacaacaattagacaccttcatcagtatgttaattacaggaatatgtgtaaggtgatggaatggaaataatcactattgtacaactattcaaagttataatttacacttgagtgctctttttatgtgttcttggttaagtggaggtaattgcgtcctaatatatgaaaatgcaaataatgatttcactttgcaaattctctgatgctatagaagagtgtttgttgaaatgaccttaataatgatcttttgtggtgtataagtggattacggcccttggggaatattccacatcaagattggggagatgaataaattgtgctgccaattttctataaagcgacaaggttcccgtataacaatgtattattttgcttgtggataaaaagttcaacattttcttgagtgtgaagtagcaccagtgcattactgagaataacattgcccactaaactgctaacttagataaatgtcctatgatggctaatttttgtcagctaactgagagcttgttagctctcctaaattagcccattgactgactatgatgggcatcaaaaaacacagtaagattttcataaacagtaattcaccaatatattctcatgtttacctgtaagtgcaaaggatgtatcatatgcaaacatttaaaactaagtactataaacagttgttcattgccctgttcctcaggtcacctgtgagtttgggatcatcagtttgtctgtggtcagaatttaataagtactgagatgatggcatctggctatgctgacgctagccagggtggcagtttcaaatccgtgtcattgctttaggttgggttcatagctgctaaaacttgtgagaggtctgtgttataggttaggtatgcacaatatggatacaagatgctcactcatcatcagcagcactcattcatgagaaagctaggcagagggttgtcaaattctcaaacagaactgatgattcctcagccgatttgtgaggactctgtcatgaatccgctcatctaaacttcctgccttggtatagaatggatagcctccccagcccatatcactatgtgaatgcttctcctccaggcatagccttgggcaaggggcttctctgtagcacaagctacttcctcaagaggagacagctcaaggctgtcagcttattgatccaggtgctagagatggaaagtgtattcccaaaaggatagtctgtgagcagtgtctccatgtctgtctgtcttgccagcatagtagttgcccagctacaaaaactacacttaacaatttataagttattagcaagtgaaacattatttctcatatttataattgcatttaatcttcacaacgttcttactagggaggtgtgtggcacagaagaaacagtcaagcaaacaggaaatgcagacagcagaggctgccattagacagtgagcacaggctggtattgattgcactttaaagatgagctaacaaataagaatgtgtagtttagtttgttttattaagttgaaattacaagatttaagcacaaattttaaggaaaataacatgcatgttgctgcccccctcagtgagtctgggttttaggctagggggttaaactcacatatgaaggctgtgaaacctggcaggtatcagacaacacacttgaacaatgagctgagagatgctcctgtagaaggaagcttattcatcaaaaagtgcagaggacttaggactagacactatgtagcatggagctgaggtagagttaaagaaggggaaaattgcccaagaaagagaaaggagataggaacagcctgtaacacacacacacacacacacacacacacacacacacacacacacacacacaaaaagaagtttatagtgtacagctgtatgcatgtgtatgtacgtgttgtctgtattttctatcttaggagcagatggaagcagagagtaacaaactttcaggttgctaatataaaagtaagtagatacatctaagatgttcttgaaagtttagctgcactacactagaaaattattgactgttatttcctagaagtctacctttctccatcttcaactgtttgacatcaattagaagttaaaattgtgtccatgactttttaagcagtcatgtatgacacatgcactcctcctctgccccctaaaatgtgagcattgaatacaattagcccaggtgttcaatgcctgggagtagagtctttcagtttcacagtgacatctggaatgcaaagggacagtgttcagggtgttgccctggggacacaagaacaaaactgcatgctcttggaatttgagaagggcaatgacaacttttgctgtaaaacctctgtgctttctgcctctaatttccagtggaatctagcaaggacgatttttccctgagggaaatgcatggtctttggctgaggatggggcagcgattgtgagtttattattagatatgcctttttgaagtgaagttttaaaagtttctgaagttgtttaagtaacagtggctgcggggcacctgtagtttatctgctaaccatgtatgtatgttttatgaagctatttaatctacaattcacttttttacaaaggtagtcaccatagcaactgtcatctgaaagtttcctgctaacttttacacaaagaacattctgtagccaaagaaatatacacacaaacacagatatacataaatacaaatatatacttgcttggcttcaggggaggggcagctcattatttcagtcatttttttcttcttcttcatctcaggccagtgctgagaatggttaaatatagtcgaggtcaagatacctagatggcagcagagaaattgctggtgattgacatagagactattctccaaagtcttagcatttgtttctttttaataaagctacataagatgtcatgattttcctttgcattctagagtatacatagataaaacttcttgagaaactatactttgattttcatttaaaagaatccacaggaaatacagagagaatgtactgtactagtgacagaataatgctaaatacacaagaaaagcagttgggggctggagcaatgacatattggttaagatgcttgctgttcttagagtggactagtttcagttcctcgtacccatatatatccacaattgtctgtaactccagaactgggtaataggaaccttcttctagcctctcttggcatctatgctcatgtgtatacacgaacacacgggcttgcctgcacacacacacacacacacacacacacacacaaatacctatacactatattccacatggaatgagaaacctacattagtatcatctcctaagaattaaggaatacagatgaaaatagtttttgaaatgcagacctgtgctgggcaattaaaaaagcaatacttggtctcaggtgagtttcctctttgttggaacattgcttttctatctttgtcagaaatctctgtgtgcatgctaccaatgtagacgtctatctaatggacaccatgtgaaatctgttacatgcctgtcactccagcattcacatgcctaagaaaggtagaatctttggatccagactggtttagataatgcaacctgatctgaaaattacaaataattaaaaaaaaaaccttctagaaacaccaagctcagacacaagcctagtatccaagttttatttacctgactggccgttctctgtttgattcatctactttcaaaatgcccccaagtctataaaattttgaaaaccgcgtttctccttatcaatgtataggacaatttattctgtattcaaaagcacaccttgctgttctttgagttccacacctcagcccacttctttcccttgactggaacttatttcattccatttcttatgtttccacatcatttttccttaatgctcccttcctacactcaattttcttactcctgggcttgatttctatctcctaagcaacccttctaaattcacatctgcagagaaggagacattagtttctatttgttatccttggctcttttcacttatttttctcaatgatctgatctacttctattctgccattttaaaaacatgattcttcctctgtgacctaatgggcctgcattgatgacttcatagatgacaatgaacttgtacaattatataaccacaatttttcaatgataggcacttgcatgtggtattcctggggaagacattcatcaactttgtcagtttctaagagcttctgaccctcccaaagtttcaggattattttttctcatttttaatttgtagattgattcattatttttgaacaatattcaaatgttatctgcatcctctactgcttttgaaatgcccttccttcttcaatattgctggatgttggattaaattaaattcttcaatctatatgcattgtttacatgtgagaatggcttcattaaactaacttgattacatgtaaagaatttgtcatatttctgggttagtccttaaatattaccatttcacaagatatagttattacagtaaaggaactgaaattgatttcatgagattttgttttcatgcacatctacaatatatacaaagtgttaatagagaccataaaggaacattggatccactgtaactgaagttacggatagttgtgagttaccttgcggataatgggaacagatcgcagggcctttggtgtgcctaaccattgagcaatctttccagcctccttgttaaatgggggcagagaggcagaatttagctgtatgtatctagctggctggattacatgtcaggccagatagccatggctgtcctcaagcatccccctcggcaaagcaagggttattggttgttgtgtagctatttcctctgaactgaatcagtatgtctggaaaggaggaagaagatcctaatattcagtaaataaatataacttaacaggtgaaatcagtgaattaaacctacaaaaaaacacaaggccttgtggttggtagtttttcactctttgcatgttgggagcctgccacttagctcccaaataaatacttgtagccgtattctttcttatgaatgcacagctttaccttggcttgtttcttgccagcttttcttaatttaaaatatccaggctgcctctgggtttctgtctttctctatgtctgtattcctcttctttcatttgtattctgtgtctggttgtgtggcttcgtggctggcctctgatgaactctctcgtcttccttttctcattcctctttcgcctttttctccttctatttagcctctctgcctgcctgtcctgcacatccattttcctgccttgccattagccattcatttctttattagaccagtcaggtattttaagcagccaaagtaacacagcttcagagagttaaacaaatgcaaaatatcttttcatgaataaaatgttccacagcataaagaaatgtaacacatttttcaataatattctacaaaaagacctggctttaagattatcaaagcaatgacaattgcttgggaaactggtcacctctgactgggctgcctacaaggacagtgagcttcaggattgagctgtcacccacaccaaggtggttttggattatttattttcagtgatgcaactgcctttgagttattcatacccttaagagacctctcatccacactcctgtaagccatcccaataaataaatacataaaaagttctctaagctgttttggatggaataatttctttcatctgttgtttgtgctctgtttatacatgcccagacaatatcatgcagcataggcgaattactccacagccaggtagaaattctgttttctccatgtattttctagacctgggactctagatccctctgtagtagaatatttgttcttgctagcatttgcagtggaggaattaactcaggtccttgtacatgcaaaaaataaataaataaaaaacactttactagtgagctatatttccctggtattttcttaaagagataaattccaagcaaggaatgatgacaaaagtctttaatcccagcacttgggaggcagaggcagatggatctctttgagtttgaggccagattgacagagttccaggaaagcaagggctattacacagaaaaacatgtctcaaaaaacaactacaacaaaagaaagcaaaagaaattacacatagaaaaacaattttaaaagtgtgtacaataggattttgctgtaaaatgtgagatatccagttaaaggggaatatcatgaattaacaattaaattgtccataaaatagatgtttatgataaataatgaatattatggcacaattatgtctcatggaataattaaacaatcatatttacttttctgaaattaaatttttgtcctatttgtatttattaatttagataattcagtttatcacagagaatattattttatttaactacctttctttttaaaggatgcccagtagtaaaatatattccccagaatatatttattgcttgcatctctctttcttcaacatgtgtatactcagatttctaaaacttttacatttgatatcttttctgtgtcaaactcatttttctattttttgctgagaatatagacactgacatggctagcaaaacacctgatgtcgagtgatgaatacacagcataatacataaagagaattcacaaatagaatatctgagatcagtaaatgcagaaagaataagaaggtagagtaactaggatgcagtgaccagggtttttatgaaggaggccacagttatggagaaaacggggagtggtttcacgtgaggaaaggttgtattgctatggacactattagagatattgaattctgcttagacatttaaaatgcatttaacatttttcttggatgtcattggcaaattaaatttaaaggatgctgtataagagcaaaagcagggaactatccaggtggctctttcagtagtccaggaagcaaacacttttgggatgcacggggatgtaggaattggagctgatatctcagaactgacatcaggactcatttttcaagtcagagctcacaggctagaatacagggtgtatgtgagactccatcaaaacaagtctctagattgggcatgagggtttgatgaatagtgtggttttagagcatgtgccatgatgggaagaagaagaaccacacatgaaacctatgtgtttggctagagatatggttagaattctctggaaaaagaggaatgaccccatgtcctgatgtattaacataagtattggcatcatgtctccacttaaggtgtgtgacaacacatataattcattcatgcctgaggccagtcattttactcttcactgtatttatatgaaaccctacagcaggtgtctaataggtgctaattaaacaacttgcagttcattttctaggctccttcctctgggtaaaaacatgtaattgcattatttcctaaaatgatttctttcttgttgttactttcagccatacacttcttttccaaattctaaattggctttgaagacaagaaactatattttagattttccaccataattacaacactctacgcatacaaaacaaatatacatgaatcataaaaatgaattgaaaaaaatatatatgggaaggaaattatgtgaaacactataaagctcaccaccctccattgttttatcagctatgtaaatgatcaagatgtaatctgcaaaccatcttccgtgtctgtttctcactctgatatcagtttgtgtacctctgcagggatactggattttctgcactagccaggttactctgcagaatgaactgcttagttctccaagcagaggcaaacttgcccacacttgtcatctctctcttcagatcctaactcatgtaagtgtcctgtccttattgattaagataatgtacccatggaaaagacagaaatctgttaataatacctttctacaattagtgcattgtcacaatggagcatgccccattgtctctctatggctgggaaatttcactttcaccacagatgttctggtatcttcatttagaagagtaaagagaaacaggaatatgttttaatatatttcactctactaatcttataagtggtgcaggagagctcacaccacaagtgtaggattttatgcttctatctattttgcagggtctcatgatcttcggtttgtaaaactcttagaaacttgtatgaaacacagaaaaaaaatcaatacagatacacatattattttgtgatgttttctgtcagcttagtggctgcacatgaatctactgatattttaattatcatctgtgacccctcagtcagtacctaactggctactcaaacaatagcctagaaggtcttcaagtccaacagctctggtcagtcacaagcatgatatatagatttaaatcaagtatctattgttctatttatcaataagactctggagtcaaaggctggggggtgggaggaagcctgatagttcatggaagctgagtagcaactagctgaccttaaatttttggccagagacacttcaagagatgtatttcttcccttgtcccagaaccaagagagctcaaactctagtccctgtcctttcctttctgtgcttcttctccatccaaattgctggcttctctatggctaaatccagtcagcaaataactagctctgttccctgatttaacatataattttattgggcagtctctggagtgtcagagtgctatcaaaatattccacaacaactttgtataattaaagcaggaatctaatttctggggggtatttcttggaacctaatagctgatattaagatgacttacatcagagccccacaggtggtagtgttcttgccagtgttgaactggttccttgctgaagataaagggctttgttttaacatggccatttctttacagtaattctttccatacttgctctttcaggctgttgatattaattactggatgaaaggatgggctcagtgagctttcagaaactatagcacagacagaccgcctcagtgctgccattcatggttgtcaatgttatcttagttctaaggttgagacttctgtggtttgaaagggaaatgtcacccaaagatttcaagtggttgaaatctgcttctcagttagtggcattactgggaaagttgtggaacctttaggaaatggagctttgtaggaggcagtaagttattttaggacaggttttgagttactatgtacttatcatctgtcatatatctatcatttatctatctatctatctctatctgtttacctacccatctcttcatctatctctgtcatcccatcttgctgtctcaccttttatcctgccacctgatccttagaatggcaatccttagaatgtactaatgtggtttctgttcctgttgtttttctgtcaaaacccataaatctcaccattttggatatcaaagttgtctttgataagttactatgtacttatcatctgtcatatatctatcatttatctatctatctatctctatctgtttacctacccatctcttcatctatctctgtcatcccatcttgctgtctcaccttttatcctgccacctgatccttagaatggcaatccttagaatgtactaatgtggtttctgttcctgttgtttttctgtcaaaacccataaatctcaccattttggatatcaaagttgtcttttattattgagattaaatttagttttctagtgggagctgtcatgttgagatacttgaaaacattttggaccttttgtggccatttctacaggcattttaggcagaagatggacagtgtttactcttggaatacatttcaaccactgaaatgagagcctcttgtgtactgacactctgtgttatatttttactttagtttttctcaaagaatgttctgtcctactctaccttttctggtgtggttgcttactctaaatgggtctcctctttctcatcctcaccagagttcaggagacaatagataatattcatatgattctcttctgactaatcaacaggagcaatcagattccacccttcaggcaactttcaaattataaaaacatttatttctaggtgtcaggatgtgtgtgtgagagagagacagagaaagagagagagagagagtgagagagagagagagagatgaagatcgctccagaaaaaaagggcctattgtgaaactttacatcattgtattcagtacattgttcagctatgtctgttcacaggatgtgttctcacctgcaaagaaacctgcaaacagtaacttcctgtgtgcctaggatgaagaaacatgggtagtcatttaagcaatgtctactacatgccactgtgggtatcaggccatatgaaaataagaaggaaagaggcaatatgaaaacaaaatgatttgtgtctttgaaatacacacatggcttcaggatgtatagaatgagcaatatgaaactattttaagttctttaaaaatcaatgattatcatggaaatatactaaaaattcatgttatagaaatatctgtagtaatttcagaagatgggtgaagtgggtggcaatttgaaagtttttattttaaaacctggtgcaacaaccgacattagttagcacctcctgatcttggaatgtaatagaaatggggtgccaaacctgattttaagataaaggtaataggattcttagcaaatataatatccaggatggattgagggacacttcttatgcctacaagtaaacctcaaatctttactcaagcaaagcctatatatacgcagaatgtgctgaatagacagtgttaaaacgtcaaactaagtgctaatggtgatggaaatcattatatcatatacatcttggaggcagagcaacaaaagaacagacaaaaagcaagtattggtgaaaaaagttgattttccataatagaaaggtttcctagagtgtttaaggatttctgtactaattcatatcattctgttgtaatgttgccatctatttaaaagggtcagactataaaatcatttaaacagcaaaaaggtagaactaaaaaatgcagttaaaatcctgtaagtgactaactagtcccaggagtatttaaaggaaagtggaaatgtcaggaccataaattagttctaagttctggggaagtctttgtaaatgccacaataactttttaacatgggtgaaaattcttgtaagttaccattaaatagcacactactgtcacagtccttaaacttaccatgcctaatgggatagaaagtagaggcatagtattattaattgaagtatgtcttccagtacagacatcatgaagacctcatgccttagtctatcaaagtgtgtgtatttgacatgaaactgattgttgtcacttcatgatacccaactccataatcatccctaaaaagcatatgctttgtatatatgatagcaattcttttattgaatctgcatcactatgcattattttacttatgacttgccatatttagagaaaaatgaagaagaatatttgggtgttagcaaattatctattgtgaatgaagtagaaggctagaggaacagctcagtagttaaaggaactcattactctacatggacctgtgttgggttcccaacaaaggcccgtaactcacaaaggcctgtgacacaagtttcctttttctagcctctaggtgcactatacccacatgtgaacatatgtatgtaagtgtatacataaataaataaaatataataaatcttaaataatgaacaagttagaactactcccacagtggaaatgaagggacattttaaggggaaagaagaataaaatgttcactgctttcagtaaggaaaggcacatgctaattgaaataattgagtctagtctgtccttcagaaacacgtcaaacaaaatgtctcttcatttgggagagaagcaaaggcaatggtgtgaactcaatttttaaaaagtgtccttttgtgactgggtaacctcactcaggatggtttcttctagttccatccatttgcctgtgaatttcaagattccattgttttttttctgctaagtagtactccattttataaatgtaccacaggaagtcatggcactgaagggatgagaactgagtctgacttgccttgatcccatcattggtactcactgaggtcgagacggtaattaaatccagagaagtaccaattacagtgagtttataatttttcaatggataatgagaaaaaaacaaactttgaaaactgactgcatgcaggaaagatcctggcaatagcgctcgtggattatcatagtagagaagaatcaaaccccactcagatgagaagcttgttccaagcagagatccctgggtaatagacacagcagaacagatttccagggtataacaaaataacaaacacacatgaagagagagattttcctagagacctcatttaaataagtttgtccttgagagttcatgacctcctggagaggtcagtctcaaggacaacattggtagctctagttgagaaaagatagaaggttaacacaaaacaaacaaacaaacaaacagaaactattttagcccaagtattagagacatgctgagatgagagcagatctgtagtttcttctccaatgaagatgagaaaattgtattaattgctataagaaaaatgttggtagttgaataagaactgtatttatgtaatgtcttttattatttagccacatgactttgttgtcttatgttcagtcttttagaaaatacttccaatgacaatttacgcaatgatattaatattttaagtcatattctaggactagcaataggggtcagtagataaaggtgcttgttgaccacagaatagatggaaagaagtgactccattgtcctctgtcacccatgtgcacatcgtggacaccacagtggtgaacacacatgagcacacactatcacaaaagaaatgagataaatgctaaattctgaaataccagtaagttaggtcagaaaatgaaattatctccaagacaaaattcctttttatcaaaaacttaagaatgattttaaagaacatgaatgaatactccattttcacaagtttcaccatagttctttctccattgcctgtgaaaactgacagtgtctaggaattccacaccggaaggaggttcagggcaacagtggactaatctgttccagggttcttcttgacagtcaacagtgttggaatgaattttagttattttaacttggcttaaatatattccaagctctaatgtgaggctgaaaatatttttttcatatttttttccataaggctggagatacacagttcactagtagagtatgtaaagatctggatatgaataccaactacagagttgggggtgagatgataattgttatacccagaatccagacacccaaagaccaccaagagaacagatccaatgcaaaacagtcttttaattgtgactatgtctctggtctaactgacacatctgtggagtaagatggacattgagtagcagtggggaagggtatttatattgggggtaaagcaagggaggatctaggggactacatattgcataggaacagactgagaattggtatacctgcgggggcactgggccatggttaattggttagttgacactgcagggaggttgctatctcttgggtggttgctgtggtaactacattctacttttatcggggaagaacattcagagcctattagcttagctcctaattggttcctgaccatataggggatatctctgagttttgttttagcaaggagtgcaaggacaaggaaactgtataaggtcaggggcgcaacacatcctgccacttcctgctaaggcaggggcctacaagctgctaggtcttttctgcagccctatgataacagggatctgggcaagggcctgtgctctttgggctcttcagtaataagtatgaatgttgctcacatttagatttgtttgtactggacccttaacctctgggtttactcttaatgtcacttatttctactagacagtgttactaattttaattttacctcatttgtggcatggcttttttttaaaaaaagcaatcttttctcattttgcataccaatcccagtcccctcttcctcccctccttctattccccccatgtactccttagagagggaaaggcttcccatggggagtcaacaaagtctgtcacatcactttgtgacaggatcaaggccctctcctgtatatctaggctgagcaaggtatccctcctaagaaaatgggctccaaaaagtcagttcaagcaataggaataaatcctggtcccactgccattggccccacagactgccaaagccacacaactgtcacccatattcagagggcctagtttgggcctatgcaggttctcctgctgtcaattaagtgtcagtgagctcccgccaactcaggtcaactgcttttgtgggtttccccaaactggtcttgacatctttgctcatattattgcccctccccctttgactggactctgggaactcagcccagttttcagctgtggatctctgcatctgcctccattaattgctagatgaaggttctatgatgatagaaccttaaggtagtcttcaatctgattacaagggaaggtcttaggtggagtcatccttgtggattcctgggcatctccctagagacaggttgtgacatgtaactttagtcaccagacaagactttgtaaattagttttatacttttctgataaactgaaagtgtctggtacatgtaaacttaggataagcatattggaaagtacaattgattgaaaaccaatagaaacatccacagttcatcattttcaaagttgttcaatgagacttgtcaacctgctcagaagtgaaaaaaaagtcaatgtgtgcagccatatctgtgctagcaggacaacagcagtgaaacttccctgtcgagcacatcactcagaaagtggatatgaggtgccctgcatggaacacaacatgacaagacaccaaaatttaagggcacagttttcaaaggtgaaaaatgggagttgaccattgagagtgaggatggaacactctgctttgactcccaactgttttcttgtctaaataaagaccaaatacaataaattgctttttttgccaaaagggaaaaaaagctttaagtttgggtatagtttgctttgaggtttgtctagggatctgcagtgactgaggtttataagaataaggtattagactcaagagaaaggagtgccttttaacaaattaatgatacatagtgttttacaattaattaattaccaaacaatttagcaattgctggctaaataaatggattccaaagaagacatctgagggttcttttgctgttgctacttaaaaatcattggcaggcacgaagttcttacagctggtctctgttttcttgccttcccttttgtgtcagtaagaggggcaataaaggctgggtagagtggtggcaagtggcacactctaatgttcgagttgaacattcctgaggcatatgagcattcaggctcttcctgaaaagcctatacctctctgaaaatctgtgctgactagagtctacatatttgtcccgaggctctcttcagttctctagtcttttgtccatttattaagctttccttcctgtccttctctggttgcattcactggctatgcctgaaccactccaggtgcttgcctattccaagaaagataattgggtgctgagcctcctggcgacccattctggaattgtttgcgtcagacctacatagccctgtttggcctgggactgacactgtatataccagtcaggtctggaactcaaagatctgcctgctgggggtggaattccgaccagccagacagcttagagagattctgactgtagagctgtctgcaagctgtgcagagatgcaaggatggatcaacatacatgtgttgatcaataaatgtaaagcacaagataaatatattaaagggcagaaaccatgtgatcacctttttcagtaaggtaaacatctctgacaaaatccaacttcccttcatgataaaattcctagagagtctaaccatgcaggagacacatctcaacataataaacgcaatggcattcagaataaggccatcctacaaataccatcataaaaaattctgcatcttactaatgagcagctgtattaatttaagagaggggaattgttgggagccaaatattgtgctattagaggatttcttggagtccaaagctccggatctccagtctatattgtatttgtagatgctaggtaatctgctattgaatagcatcatctcagaggagaatgcctcctagtttgcatctctacagaactaagcatttgaataggcctgcaccagtgcagagagcaaagtctacatggtgagtgagaacagatagttaggaggtattggtctacaggatgagagatggtagagatatctgctgatagggtctaggaggatgagagagaaatggccttgaagtcagggaagaatggttagattacagccaggaaaatgctgaatagagaagagactccagttttgcagcatagaactgagagcttgttagaccccccggaaaactcagctatctggggtcccaggccatgacctccgtcaccccaatcaccagacggattcaagagcttgctgcaaactgcatgaggctttattgtaatttaacgagctaaccccatgttagctcgggtctttgactcacccgccatggcggatggctagcaaagactctgagaagccacaggaccgagatcttatagggtagcgtaaggagagtgtctaggggtacgcacaggctcactattggtgtaccctcctggcttggagggcttgtcctgtgttgattggccaactggttgttatggtccataggccctcccagggtggttgctatgctctgggtcattgctgtgtgcttgtccataaagtacacccagggtcgtaaagcatagcgccaccagctaacttctgattggttccttgtcacgaggcaggcatctgactttctagtgtccaggacaaggtcaaaaagcacgtgttaggccactatgactgccaaaagggaagctggtccctccaagctctctaaagatgtcaagatgcctatgtctggtcttttttgctgttgggttgctaggaatttccacgtccatgctcccccactcaggcggaagctggtttggggctgagacatgcagggcctatatattctgtgaatacacttaataatttcaaaaatggaacgagatatccttagatgatattgttttcactttgattttaaagaatgaaagtttatatgtatgtgcttacttatcaatgtacttacgtatgtaaagatcagaggggaacctcaggtgtcatcctcaggaacaatgttcacttcctttgagagggctctctctgtgggttaaagctcaccagatggtactgtggtttcagtgggcaccgggaatcctcccactaccatctccccactgctgagattgcatgttagtgccaccatgtctagtgtttctatatggatactggaagttgaggtcaggtctacatacttgtgagacaagcactgtattaaatgatctattgttcatctctgatattatttttaattgtcggttgccttaaaataatatatttatatccataggagaatatgaaatacaaacagtactaggaaataaacattttagattttctgtatgagatgaacattagtaagatattaagatgtcttactaatatacctacagagtcagattcacaagaacatttcagattttgcttatcatattccttattgttatggatactgttgccaggaattaagaaaatgacatttaaatttatgctctggcaaactcttgattaagcaggaattcatgcatctgttttgaatgataagtggaaaaaattaaaaaattcttattttatctagaaatctgattcccaaattatattttgcaatcatatattaactcatcaaaaataatgttttagatgtctgtctgcttgtgacaagtgaaagcaataaaggacatggattttatgggtagggaggtggaaaggatcttggaaaagttgaaggaggggacatgtattttatgagtaaaaaattctccttttttaataaaaaagaagaagcatatgtagtattataggttaaaggttagttgttgacagtgcattgtagtaagaaatggagatagcagatgcagtaatcacaagaagactgctaaataattagagaaattcaagtactgaaatatttagcaggtgcttaaaattattacagacaataaaatttattatgctgtatacaatagtttcagattattccaattcctctatggcatatattcaggacacacaagagctttataacccccattgtttatttaatatgttaatttgaagctagacaaaatggcaatgtgctaagtttgtgtacaaaaaaatactattaacaaactagatctgaaagtagagttaatgagaaagtttatgctagatggtgtgtgtgtttaggtgtgtgtgtgtgtgcaagagagagagggagagaaggagagagagagagagagagagagagagagagagaatgtgtactcttgctggactgctggactcatagaggctagaaaagtaatagaatctcttggagctgaagttatagatagttgtgaactggctgccctcaatgctgagaatacaactcgcattctgggaatgcagcattgttcttaactactgagctgtctctccatcctcaagtacattcatctagcaaattgtcaatcatacacaaccactatagacagagataacaaaaggtaaacctcagaaaatacacagcagattcttggttgcttaatagcttgtccatttgaatatttagtatttcagtgttgtaagcctatgaggttaataatcacacccttgaaaacaatttatcctgcttcattcccagttcaacagtggaaagcgaacaagagaacagactacatgactggaaaagtgaattggtggaaagagaaggcagacagtactctatccaggcacacaatacttatgcctcacaaacctatttaatttccttcatgtgaagatgactgcagtgttgtttcataatcatttaaaattccttgaaacacagtggctaggggtgataagcaaatccctgcctttgtcttgaaaggtggctcttttgaatgtaagttttcctgttgtcgttttgctgattctaaagttttgccatctctcaattccttaaaaagaaatgataatctcctgtgggaagactcaggtgttcactctcacctgggaaagtccctggttctttgaagttaccattcaaagcaaaaggaaactcaggcaagaagggctgagtttaattgcttcgaaagtctgctgcttttgaatgaattacgtagctggatttgaaatgtattggcatgcagcttctcagggcttaatctccaactaacaggactctatgtctgctttgcatttagcaggtccctctgctcagatgaaaacacatggaaacacagtcatctcagccatctcagcgaagaatatccccagtgcctaggcatggagggaagcgagttaacaccctctgaagtcatttaactcattgtgctatgtgcttgtctgctcagaatgttgttcccagtcactttttactccattcattataagaaaagattttttttatgtccctatgttcacatactcacacataacatgataaggtttctttgtgaacacgagaaggggaaaagtgctatagagatatttgatgcactgttgggaacattccacaaccatgtagaggccccactcactgtctagccatgcagccccaagtcatgcaggaaaaaaaatgtgtttctaaagatttgtgaagcaaatgatgtgaggaaccgctaagaagttgtaaggactcagaatgatgatgtcactgtttgacaaacagcatcaggagaccctgtcagggagctagaaccacagcaaaggacttgaatgagtatggaggaaagaggcagtgtcactgatgtttccttgggggagccttccattcagatgggggctgtgagggtcatctcgcttccaaagcttgaatgcttcagaggaagaataaatgtcatgcttgctcagctctagctatctcctgatttgaatattacaaacaacactgaaatctctgtggaatttctccatgtatctgcatgccagatatttcatgcagtgtaaattaaatcaagaaaatactcagacattccactttttaaacatcaaatgtgagtagctttgagagagctgctgcatctctgctcacatcctatactagtcagtgttttacacactgcaggttaaatagaacctccatcttagtggttgcctaaattttcttcaaatatgatttatatgctaggaagctttgcaaactcagagctcttctttttaatatcataacccaacaagacactttctttgtgttccccactaatcactgactggctgtatatagaacttagcaaattacttctaaattatgccagctggttaacttacactttcaaaactagagaccaaagattggaacttcaaagtagatacaatagagggccagtgctgcatctgaggtagtaataattggaagctaggaagaactttaaacttttaaattattgggactgccaaggaggaaagcagcaaagtaaaagaaatggaagcagaggaacgagacgggaagggtaatagagagggaacaggatgacaggatgcatattagctacttttctattgctaatagaatgccacaaccaaggcaacttgtagaaggaagggtttgtttgggcgtagacttccagggataggagtccacgaaggagttaatgtttccagcaaccagcagacatagtggcaacgccagctgagcattaacatctggaactcaagcaggaagcacagagagtgaactggggacagtgattagctttttaaatctcaaatcccagccagagtgacatacttcttccagttaggccatacttctaaaacttacctaagcaactctaccaactgagaatcaagcattcaaatgctagagcctatggggggcattctcatccaaaccctaactaacagaaggagaagagaagagtagaaacagtatatccagtgatatcccctgaaacattatttgtgatattaacaataaatacaccccaaatatctagaaacagtgcaacaatataagatagagtagcatatactgtgtttataatcaagaaatgaagagtttcatctatacaataattttgtatgatctttctattttattatgtataaaattatatgcagagagtattgaggccactttttattatttgacatgtgttaatatatgctataattacatacatatgcatgtaaagatgtatcttcatatactacatacatgtaaacatccataaatatagatagagttatttacatatgcagataagcagatgagtttaaatccagatgtaaagtaatgtctaatatgtgcaaaaatcaacatggaaactttaaagtagtcaataaattcaaagtaatgtagaaaaaaatagtgtataggagacaaagaacacccaggatataaataaagaacatataatagattcaaactttaccatattcatagtttaaacactacaattaaaggccagaattacaatgaattatgtaaatctatactacatggaagaaatatattgtgcaaaaaaagcaaatataggtcaatagaaaatgactcagtcttctgctcttccctacgcatccatatgcagtaaatcccttggagcaaggagagccatattcctcagaagtgtagtcactgataggatgttcctgttcattagtaaataaaccctcctgcttactaatgacagcaaacctacttaagagcaacaggctacaaaggaggtgtgaaatgggactgggaactgggaacaggaagatgttctgtggtggttggaaaagaaatgatactgtggaagaatatgatccaatatatactgaacagacagatagacagatgatggatgacagagatagatacaggtagatagaatgaatgatgatagatagatgatagataaataaatgatagatatatagagagatgatacatagatagatagatagatagatagatagatagatgatagatagatagatagggatagattgatagatagatgatagatagacagacagatagatagggatagattgatagatagatgatagatggacagacagatagatagatagggatagattgatagacatatgacatgtatggatagatatataatggatgacagagatagatggatagaagatagatagatagatagatagatagatagatagatagatagatgacaggaatgtatagattggtagatagatagatgatagatagatacacatctgtaatgaacttttgaaagagtgaaaagggaattgcacagggcatgatatatatagccaatagaatccatattttctaatataaatattagaaaatgacataaggcagaaaagcataatatagcatttaattattactcaatatgtaaaacaagagcctaagagaggagcagaaacatcttagaagccgggcgttagtggcgctcgcctttaatcccagcactcgtgaggcagaggcaggaagatctctgtgagtttgaggccagcctggtctccagacagagtgccaggataggcctccaaagctacacagagaaaccctgtctcgaaaaaccaaaaaaataaaacatcttagatattagggaactaacaaacagctgcaacatatgtgaaacagacattgattgaactgaatatagttctatgaatatgtgatgtcaatttctgcatcagtgatctacatgagtaatatgcaggtcagtcatgcgggcaggacttaatcaacaccagccagttgatgtgattgacatttatggagaaggggactggacaataggaaaatgtgtacttttgtcaggaacatagagtacatttacagattaaactctgacttatgaaaaaactgaataaaatttgacaccttaaactcctagtgcattctcagagcagaaagtaactaaattagaaataataatagcaaaaataatagcaggaaactagagaaaatactgtaaacattttagaaattaaacaatatatatcaaagtactccattcttcaagaaagaaacaaaaagaaaataaaactcaaactgactataaatgaaaccagaaacataagaatccaaatatggattgtatcagctgcaggtttaacacaaagagaagaaaaatccacttgtataaaattaactatgaataaatttaaatttgcatactcatgagatattattgggaaaatgaatgagcatttttcatttgaaccgatttaattttattatttttatgtaatgtgtgtatcatggaggaatgtaggtgtgcatgaatttacacaagtgattgtggtgtgtgcatgtcatagttcactcacatgaatcataggagaactgattagaagctggttttcatactccaccatttctttgatttttttctctttattggtcaccactacatagaccaacctagttgaaccttgagcctttgggaatcacctgcctccacctcccctctccctgtatgaacactgggattacagatgtgctgtgcctggctttccatggatcgtgggaatttaaactcagctctttgtgtttataaaccagatacttttacccctgaacagtctcttcaaccttctcaaatattgtttataattcattgcttgtagtttacatgctgtacaaatgctctctggtgcaatggtttggtctataagagtttactgtgttaggactgaagattttttgtcattgattctcatattttgtttcttggtttaatttttgaacatttatccatactggcacagtttgcacccccctaatcaaaatatggttaagtctgaattctctaaatctgaaactctcttgagtaccactatgatcccacagttgaaaaattctgtattttatcccatgtgactggtcttggtaaaaagcagaagaacaaaaattactttatgaacttacctcagtctaggttcataatgtatatatgtgaagtaacaatggatttcaggtgtaagccctgctcattcacagaagatctccatatgcatagtaaaatattcaagaatataaaaagcttctagtcccaagtaagataaggaccttcaatccacagtctttaaaaaaaggcagctatgactaacatgtttcaaaacagtatgaaatttaaaaatgctaaatcatttagcattctaaatctatgtaaatttcattggaggtccttttttaaagaatgtatttttaggtttgagcttgtttttactttaatagtctatcttagttgaatgaacttaaaattgataatactttgttacctggtacaatgggtatggttgcctgtgctgtatgtacaaatgtatgcagtacatgatttctaagcatctctaaatggtaaaatagcagttgcagcttttttctgcatgtaggtaggctgagggagtgttgcaacattcaccagctgcatcgatttcattacttgtatgtttttaccttatagcttatccttcctttagtggtacaatgaggcccaggcttagcatatacttaaggcagtttacttttcaactggctttctatgttctttcaaaatttattacttatcagaagtaattaatgactcttttattcatattcagggctagaatgttctctcccattgacttaaattattattccactcagctacaaatattttcacaggtggctttgtgtgaatagctggagtcttgtaatgctacaaccaaatattttacctatactatattttgttctcccaatcattagtaatatatctagtacatcttatttattataaagtaattgagttttaaaataaaatatgtaagccaagtatcttataagacatgagttatttaatcattacctcaatggaaaataagcactatcctcttatgaaaatatttggtcttttcccagttcatgttaagagagtcacagaaatcatgtattctttgctcctccatatttagatatggacacaaaccaacacacactattaccttgaggaaatatcgtgggtcagaagtagaaagagccactaaagtcatctgattatcttctgggttttgagacaggatttgtgtaaccctagatgtctgtcctaaaactcatggagatccacttacctctgcttcttgaatgctgggattaaaggtatgcaccaccaccaatgcccgactcttacattctgaattgcagagctctaggagtcaggaatctagagaaagactttgattatccagtgttctctggtcataagctgagccttataaggttttactaatgttatgtaaacaaaagtgaaatgcacactctttggaagaggtaattcaaatactaatcattcttgcacatgatctccaggctttggcttcctgctgtcactgaaggcaactataacagatgctaactggtctacctgacacagtgggcttggtagaagcagtataggtgtcagaatatgctcttagtgtagcatcccccttttctgtgaaatagcttcttagattttcacacacacacactacaaaataaacatgtatgtagtctgattgttgcataccttttcggttatttggtccatcagttaatggtattatttattttttatttttatttttctccatttctttatttaaattagaaaaagattgttttacatatcaatgcctttccctttccctctcctcctcccctgcccccactaacatccaatctatcccataccatttctgctccccagggacagactctaaagagcccccctttcatgggggctctttagagtctgtcatatcctttgggatagggcctaggccctctctcatgtgtctaggctgatatggagtatccctctatgtgaaatgggatcccaaagtccattcctatgatagggataagtattgatctactacaagaggcctcatagatttccgaggcctcctcactgacacccatattcatggggtctggatccgttacatgttgttttcccagtgatcagtctgggggccaagacctccccattgttcaggtcagctgtttctgtgggtttcaccagcctggtctggacccctttacacttcacacatcccctgcatctggattccagttcagttcagtgtttagctgtgggagaatgagaaggggagaagcggaggggtgaggaggacataaagtagcaggaaggttgtgtatggggactaatagagtagagcaaaaaaaaagagagataccataatagagggagccattataggtttaaagagaaatcaggcactagggaaatgtccagagatctacaaggatgccaccaactgacaatctaagcaacagtgcagaggctaccttaaacgccctcccctgataatgatattgatggctgacttatatgccatcctagagccttcatccagcagttgatagaagtagaagcagacacccacagttaacggtaattcatgcaaatactctccttattgaaccagtctgtgtttctcgctattgttttagcaaacacaaaagacctctgttatcataaggaatataaatggatgtctgaaggaagcaaaggaagaatagtctatcactcctatgaaaagtgtcagacaattcgctataaccaaacaaatatgaggaggacaagacaagagcagtttatagtttcctaaggacatttgcctatgagagtggggatttaaccaagtgagcaacaaagtaccccaagcattgcctgaggctcccaaggtctttgggattgccaggaaaatgctctcagagctaggagagagacacatgaacgaccacatgctgatttacattaaatgcttcagatgagagagctttatttcacttttaatctagccacagatgtaaacactccattaattgttgtcagcattttctgattccagtgcacattgctgcagcatcattcagaagactttctcgggcacagagaattggctgtgacacatttcctgtcactatggtgcttatacaagtagctagctgtacagggtatggaaacacattttctgctttgttttaccacctggaaagtttcaattgttgcttgtgttaagcagggcaaaatgcagcacagcactccatttagaggaaagacaataggaatttcttagtgcatccacaagagtagggtaaataagcacaaatggtgtgttagtaaagtggcaaaatgagttagaaaatgtgactaaaggtagagaattaattataattatacaaatactcattaattaataataaaacacattcacctttaacccacaactaaccaaattttgtccctcttcaatgttgatttataccagatagttatatgaaaatcagctgccatttgatacaataaaaccaatttaatttatataaaatatcactttactcttcaaaatagattcttaaaagatagatatatgacctgattagagttataaataccatctccagctcttgacactaattgggctttatttaaatatacctaatcaaatttaatagaaaaatatctataaatataattaaaattgacaatacatgaatacttttgttataaaatatattattgtagaaaatttcaagagtgaccaagagtagaaaggtataaaaatgaaatatcttttactcaaggcccaggttccattgtagtcaccaattatatttcgttgttgatccatattggaaaatatttctccattctgttctttctcgtaatatcaatatactaaaattttcatatctataattcaataactgatatttaaattcttcttccttttgactattagtaatcattaatgtagacatacttatggacatgcatattttggatatgtgagtagaattgctctatctgtgggaatgcctctgagaaccaaccagattctttccagagttatcacaacacttcacatgtgtgaagcagtgccttacttaccctgcttctctgtacatcacattgttcatctgacagtttacaatcatagtgatcgagaggaggcaggcttttttttgttttgtttttcgaggcagagtttctctgtgtatttgaaggctctcctggaactagctcttgtagaccaggctggtctccaactcacagagatccacctgcctctgcctcccaagtgctgggactaaaggtgtgtgccaccaccgcctagctgaagagttggcttcacatggtgacttacacctgtgttttgtagtcactcctaatgttcaatgttaggtggtctgtctcagagacagttaaacatcagtgaatagaaggctggccacataaggacagtaaatgttacactaatgattttgatggaaatagcaagtgaatatcttgtagaaaatgtggccaagacataaaaatgtaattacttatacacagggcccaggttcaactgagaatcacactgatcacatttcatttatgcttttcaggcaaagcatttggagaaagctgtgatgtttatttccccctgccatcttcataacacaagcaagctggccagcagccttgctgtctgacatcttcacctctcacacaggctttatgactctgaggaaagcatgcacaacgctgtgtctgccttcctacttgctccttgaccttaaactgaagatggccaggattgtgcctacccatgaagtgtttttatttacaaatatgtagaagctggccgaatgaagtaaataacagctatgttcctcttatccatgctagcaaatgaatttccccttcttaagttcttggacacacttacactggtgatgagaaattttaataaggggcttgtatatggataaactgtttgctattgaaagtatgaggtataaacaaagtccaaccactttacatcaagacagctgctgaaagtgctcgaaggcatgtcagaaatcttcaaagctgcaacttccacaacttgtccagaggtttgcaggaacaacactcaacaaaccagggccatacttcatgggctcacacactacgaagcctgatgcctgagaaatcatttcatttcttttaactgtggaaacatcctgcgtatactctagtgttctagcagtcacaggcacagctcatgctggagccctaacttgatgtccatgtggcactgtgcaatagagttgggaggtcaaggggactttcactttgacttcaaagtgaaaccagagaaaacaaacagacatcagtcacatgatggagcccttgcagagaatgtcaccttgtgaagctgagagtagagttacagtgggcagcagcatggcatctcagccttcaaaagccacaaacctcagcattctgcactggagaggagctatgtgagggccgaacaacaaagatacagggtcaaggttgcctctggtgtccagcacggactttttttctgaagtaaaacaattctaaactaagagtttagggtgtcatgtctgccctgctgagttttgattttctttggggaaatcatttctttatacatttccctttcttccttttagaataagaatattctcaccatatcaataattgctgtagaatcttagaaatgtgtatatttttctgttaattaacagtgtctcacaactggaagcaatcgtccttgagttttgagggaaggtcggtcatcttatacttttgagcaatgctggaaatagttaaaacttggagactggtgggaatggaataaacagtgctaggagcagacatgttatttttgtatgaattcacctcttggctgactctttcatcattacatattcctttctttatcttcactcactttaaacatttttaatttttatttacttgagatagggtttcagtttatagatccagctgtcctcaaagttttggttgtattcctatttcatccttctagtgatgagattagaaacctgtgccatgacatctagcttcagtacttacagtgaaattgaatgacatcttttgcatatatgtgaaccctgcaaggttctatttcttttttttttattagttctagttagggaacaagcttatttcaagtcggccctcaaccggggttctgcaaagtccaccaaatcttcctgtgctaatcctgggcccttccaggattagaagtgtccagggccagagtgtgacccttcacatgggatgggctctcaaagtcccttcttgcaccagggaaaaatactaatccaccaccagaagctccctggagtgcagaggcctccttattgacatccatgttcaggggtctggatcagtcttgtactagcctccctgacagcatctggggtccatgtgttctcccttgtttaggtcaactgttcctgtggatttctccaacctggtacagactccattcttcattcctccctctcttcaactaaattcccgatttcaactcagtgtaaatctgtggatgtctgtctctacttccttcagcccctgggtgagggctctaggatggcataaagagaagtcatcaatctcattttaggggaagggcttttgggttatcctctccaccattgcttggattgtcagattgtgtcatccttgtaggtctctggagatctccctggttccagatctcttcttggacctatagtggctcctccatatttagatatggacacaaaccaacacacactattaccttgaggaaatatcgtgggtcagaagtagaaagagccactaaagtcatctgattatcttctgggttttgagacaggatttgtgtaaccctagatgtctgtccccccaattagttcgggagttcaccctgcaaggttttcaatactatataaaccactattcttttcattaatcagttttaatgttctgggtatttgtaaagtatgaatgtagtttccatgattcatgaatggtcaatatgagtagactgctaaatgctttccaaagttgtcactccagtgttccccaccagaaagttgtaacagtgcgtgttagctcctactgtgactttgacaggatttttctgtgtagctttggagcctatcctggcactcgctttggagaccaggctggccttgaactcatagagatctgcctgcctctgcctccccagtgctgggattaaaggcgtgtgccatcaacacccggctgactttgacatatttatcgttatttgccattacctaggacacaaatttcactttgttttgttctgaagaaatatgtcatcctaaagtttctttgtcacaatactctatgctctttgatgactaactgagatcacccatttcaatttcatgctccataaaaggactgggctttagagataatcttatccctatcaagctgaaaatactctacataatgatggtacaataattacacagctatgtttatcacatgatttatacatttatgatttatctcctaaaatatgactctgttgttctgttctgccacaattcaaaggcaatacctagcttatttctagcaataacatttgggaaagatatgctaagttcatgaaagctgtgttttcaaaagaaaaatttggaatcaagccaagagtatattaatggattaataaataaataagttatgaaaaatatgtacaaatgaattatattcagcatcaagaagaaaggaggctttcactcttaccatggcttgagtaaatcataaatactccatgctacatggtgggagccaatgtcaaagacggtggttccttgtaaaagtcaaattcatggaaatacaaagcaaatagtagtttcctgggcttgagacagagaaaaacaggatattgtgcttggtgagactagagttcagctttccaagaggataaagtatggagctttgctccacaccatggtaaatatccataacactacggactgttagaaacagttaaggtttaatatgtttaccaaattaaggcttttaaatgccaggtaaatatactcagtaggggatagtgaataggtcaagatacaaggtgattttgggaggagagaaaataagagagaatatttatgtggggaaattctgagttgtatggattacctgtgtgttacaggcaaactaagaaagaatagattttggcctcaaaatgctttagtacaacaagataacaatttcttagtggattttggtgtggttctataaagagctttaaagttattcatcacaatcattgatagacaagactgctattgacttttgaatataaaacatttaggccatgatctttaatctaaacagtgttcccttgttggatgagatatattctataacatacaaactttactcctcatctttcctaggaatctggtctaattagaagcttgaattgtcaatattaacagccaaagatgaaagtgtattttttataaaataaaattctgttttgttgcaataaattaaattttctttacactctattcttggcattggggtggaaagataacggctgtgatcaataaatacaacatgatggtttccaaagccagaaagtgtggttattagtttaaaatcaatgtgaatacccttgatatcactgaagagggctgtacacagaccactgagatggtaatgtgtgttttctgaatttttgatgattaaaatattacaaatgccagttctaaaaaaatggttgattagtgggaagcatttgttccagcaatgacttcaaaaacctttagcttatttttggttttaggattacttccattatagtcagtatttccttgcttcctaacatgtcattctactctattctcttaggacaaggttctattctgaaatctgtgctgtgtagtccaatctgccagtccctcaacttcttgcagagtactaagaaagaagacaaacatgtagacttctaaacactttgggggttgtggtcagtcagacacctctttgtcatcaaaagcagcaaaggtgaagtccttctgtgtgtgagttctagtcgataggcacaaccacctttgtatatttggttgtattcttttagcaaactgaagctgaaaaataaagtaagcaataatcaacctgcttgaagtgaaaaatgattattgctactttttactgtgaaatacataaggagaattttgaatagccaagaaatcttgaaggtatttgttgatatcaggcacacaatgtccaccataaagctgcaaatcacacctctccaagagcatccattgcagctgctgcagatatttctaacagtccacagaattttctccaatcttccttcatcactgtcacccccaatcctgaacaaaggaagactcattttcatttctgtgccactatactaccaactacataataagctgggaattgctatgccagttgaattgtcaaatttgtcttctcctaaatgatatttttggaattcctaaggtccccttactcaggattttgtagcttaggccacagtaaagatttctataaagtgttagattgcatgaaggcaaaatctgtattgattctgatcattagtcatcatgaggcaatatctccaaataattggtgatttagtctgatagaatgctataaacgggtaaattcctggaatggtttactaagagaaaatccaagatattctcccaaaattcatcagctcccatagacaatggtgttccaatttttctgaagactaaatcaagggaacaaagccaatctacttgcctagaaaacaaaattcaaatagggagtttttaggttcatattagctttcaacagctcaacatcaaagggatgaaaaatactctttattttgagaaaagaaattataataacagaatatgaaaaacacaagaggtgggaaaatccagcaggttatggtttatagactaataggttatatggaaagtgtgtacaagctcagtaaatttcattcaaggaggctgtgaaaactcaccagatgcaacttcaaaataaagcaatcctatacccaactttagaagacaatcataagatattcaaaaggaagaatattgtgtataatttatgtttacatttgagattgtaatgatataattaatacacagaagacaaacaaaattcacaaaattgtaatttagccttcactcacaaggagaactctgtcactctgcttgggaatagagtcagttttattattataaccttagtattctatcactcacattcatctacatatttatctatgtcagatctaattagatttcccaagtggcttcacactcagattatctagttatgaagtgaaggttgtttatcaagattggctgtgcatatacatatccaaccacctatagctattatccatcttccatctatcatgtaaatattaatcatggaaatagagataggtatacttggcctgagaaagatgaacaatgacttgagtcaggaaagaggacagtactagggaagaaactatgagtgaagaacagtggtaaatgtgtacaaaagtcataaaagaacccattattttgtactccagcaaaataacttaagatttgctccagaatgatctgttaaatagtgtgtactccaattgtaaacaattacagtacttacattgcccaatccagtaagcaaaaatccctgaatgaagctcccaacatttcctgtttcatttttctaattactacaattatcttaaagtatttttaggtgcactgtatgttcataggtcctggacacttgttattccaggttgctgatgccttgcataaagtttctatgtggtttgtaagcgaattatttattatgctacatacattatttcctattacatatctattttatatgaattgagatacctcttcttggaggaaggtgggtgtctcatatgactttagaagtcactaaaatgtatgtcttagaaaagaaacacaacattcagggttcagaaaacccctggaacttaccagatggctttatgataagtgcattattgtggagaaaatgttctctagcaatcttagttttctgcaagttgtataaggagcctcaagagtcaggttttgtgagtcttcactcatgttaggatggacttctcagtatcacaactgtcgttgactcaaccaagctcctctaaacaatgccaatagacttgcaggttcacctctctcaacttgggtgaaggtggtttttggtggtggttttttttaattttctttcttctgtccttcctttcttcctttccattctttctttctgtcttcctcctttctttcatcgtgtgtgtgtgtgtgtgtgtgtgtgtgtgtgtgtgtgtgttgcagttctatgtatagatatttcttatgccccctcacagggaaatcatgcaatgaagctaattacagagtgtattattgcttcctgcagcttagatatgggtaaaaacgttgactcatacagtaaaaatatttgtacaaatcctttatcttaagtgcttcctctacaaagaaaaaatattttaatttaaacatgttttcaaaatacctttaaaaataacaagtcaacctggctcacagatgataatgcctctataatgccctgccctagctccaacactaagctaatactacaggtaaagccatgcattgaagtatgggtctcctctactcccttatcttctgtgtctcctgtaattacaaagtctattcctctagaaccactctgtgaaaatgtcttcaagagtttttccttgtagatacagaccttagaccttagcgtacttttatttaagcaataaaatttctaaggcattgactttggaaatacttattaaagtatgcaaaatttaactaaatatggttattatcctatgcaatttataattactttaccagacaactaaggaagcatcttttactgtgaataatcatgttcttgcaaggtaaataattttagtaagcacctcatcaaaataatagttatcagggaataattgccatggttcaaatgggtcacagtttccacttaatataatgggacatgggatttcttttgccagtacttaatcttccagataaaaggatttaaaaacagacttggaaggaaaatcaaggacaattttagggtagactaaagggaaaacaatagggtaggcactctggagatgttggcagctgagaggaggaggggctcggtagagaaaaggaaaaggatattctttctgagttagaggtgaaaaagcaggtaagctgcagagttcagcatcaccatccatgtgagaaatgcaggtaaaaactacattgagaagaacttagcaagaaactcgtacagatgttggcagggatgcagaaaaacaagcagctttggcaaaaattttaaagtagtccagccactatggcaatcagtgtgaggattcctcaataagaaaaactagatctaacccatgatgcagtcacaccaacctcagatgttgaccatgcagtccctaagtcaacctgtacagggatacatgcatgccagtgtctatcacatgtcttcttataatagctaagtgacagaaccagcataagtgtccatgaacagagcatgggacaaaggggatttgttttatacacactggaattttcatccataaagaagaataaaattatgtcattttctgggaaatggatacaagtggagataatcatattaaattaattaagtcggtctcagaaagacattgcgctgtgttgcagcccatttggggatcatgaattttatcgagatgcataaatcacagatgtttagctgatctgaaggtggaagcaaactatctggggaaacagagagaactaatgaggatttaagaaaaaaggagtgcaacagactgtgtgggaactgtgcacaaagtgtgttatatacttacataaaaatgacattgtggaatccaatataattaaagcaaacaagtagcaaatcaagaagcctcagcaatagaaatttgtgaggaacttctatcttttatttcaaggaggttcagaaagcaccagagtgcttggagaatcagcacaaccaggttcaaggtattgtctggtgtctgtaaacagagatataagagacaaaacaaaaaagttaatttctgggatagaactcactgagtctttgaggtcctgcttcaaaaagctcccctggggaggtgggacagaaggtcaaattctctcagaaatcagaagtaggcagcttagcactgcaggcctgtgcttgctagtttatataatcttgacacaagtgagtgttattatggaagaaggaacctcaattcagaaagtgccccgccagattttctcatggcaagtctgtggtgcaagttcttgattaatgattgataaaggagtgcccaggtctctgtgggcaatgccacccctgggctggtagctctgagtgctctaaggaatcagtctgaacaagccaaaaggtaaacagcattattccatggattctatcaccagatatctacatcaaaggaggttatcaaccactggccaaaccatttgtaatgggaattaatggccatcaatcatgaggtttatgtcacaggatgtcaccatactgaaactcatatgactcaaaaggaggcatctgctgtctctgtcaggagggttgttactgacactgacatttatgcctgaggaatatggcatatatgtgtgtgtttcccagatggagcccaggaagccagtggcttcagatggtccctttcattgtctttctccttgcttagtctttccattggccctgaaatctgtggtgattaaatcttgctttccagagcagtactataaggaggtagacagaacttgaaggagtaaacatctttggtaatttcataggtctctggggatttgtcttgttaactggactgttggactcaagtgctcccagtctgacttctcgtttgactgatgtaagaccttccatagtcatgtctccttttgccacacattgtcattattacagccatgctcagcagagtccaaagagccttggatgatttttgaattgggatttctgaattgttatctaagcaaacgtttgtttttatgaagttagaggcctcaggtatgttttcttcatattgtaaagtgaccatgaatacatgtatatcatcatataaagagctgcagagaataagtgaccatgtggatgtcaagccccaatcactataaataccatataagcctacatttaagtctcaataggacatcatggaagggagatgggtgggtgagtagagggatgataagaaagagaaccagaacatcttctgtaaggtattatcttctagatatgacaggaatgctgaacccatgatatctcaccagtagtgttacccacgtatgacacaaataatgatcacagcagtccacaagcgaacttgaattgaagaaattccacaagggtcttcccctaaaagaagtgtacctggatatcagttgtctggagagaaggcacttcagtgaggaggtcacttttctgcaggttcatactccagagtcattaactgacactaaagtggtcaaccagcatgatataggcatgtgtaaaaataataattaagaaaaagaacttgtagggtggtggcagcacatgcctttaattccagcacttggaatgcagaggcaggcagattcctgtgtttgaagccagcctggtctccacagtgagttccaggacagccaggactacacagagaaaccatgtccccaaaaataaagcacaaacaaaagaataggagaacttcatgacatgggttcagtctctgaaattcttctaagggtggaaggacagaaccatcctcacaaatttgtcctcagtacttcaaatatgcatgtatgcatgcacatgagctgatacacaagcacacatgcacagatgcaaataataatgatgacaaaaattgaaaactaaaaaaatgttacattttaaaagtggtttcaattgacaacaataagagtccttttccattctctaagtaatattatatggcatccttagtcaatacagaccagttaattatgctatgtattagatttaataaaagagttacaattttcttgttccctagctgctctggagctgtggattgtcattatcatttgctttacttctaatatccatttatgagggagtacatacaatggttggcctactctgtctgggctacttcactcaggttggtttttctagttccatccatttgcctgcaaattccatgaggtcatcaatttttacagctgagtagtactccgctgcataaatgtaacacattttccttatcctttctttagttgaggggcatctaggttgtttacacattatggctattacgaataatgctatgagcattgttgagcaagtgtccttgtgatatgatgtgcccaggagtggtggtatcactgagtcttgaggtagattgattcccaattttcttagaaacttatttccaaagtggaaataagtacaagtttgcacttccaccagtagtggaggtgtgttcccctgatgccacatcttctccaacataagttgaggacaacataagttgtcctcagtatttgtgattttatcctttttggcccatgtaagatggtatctcagagttgttttggtttgaatttccctgatgattaaagatatgagcagtttcttacatgtcttttgacaatttgagattcttcttgtgagaattctctgtatagctctatacaccatttttcaattgggttattttgtattataatgtctagtttattgagttctttataaattttggagataagtcctctgttagatgtgaggttggtgaagatcttttcccattctgtaggttgctgttttgtcttattggctgtctcctttgccttacagaagcttttcagtttcaggaggtcccatttattgattgttgttttcaatgtctgtgctactagtgttatatttaagaagtggtctcctggaccaatgcaatcaaggatacttccacctttctcttctatcaggtttaatgtagctggatttattttaaggtctttgatccacgtggatttgagtcttgtgcatggcgatagatatagatctatttgaaatccgctacatgtcagcattcagttatgccagcgccatttgttaaagatgttttttcttgttttcattgtgccatttttgcttctttgtgaaaaatcaggtgttcataggtgtgtggattaatgtccaggtcttaaattctattccattgatccacctgtttttatgccaatgccaagctgtttttattgctatacttctaaagtattttgaagtcagagatggagatgccttcagaagttcccttattgtatagaattgttttagctattctgggtttttgtttttccatataaagttgaatattgttctttcaaggtctatgaagaattgtgttgcgatttttatggggattgcattgaatttgtagattgcttttggtaggattgccatttttattatgttgatcataactgtctaagagcatgggagatctttatcttcttcaatttctttctttagggactaaaagctcttgtcatacaggtcttccacttttttgcttcaagttaacccaagacatttaatatttgtggctattgtaaagggtggtatttctctgatttctttcttagtctatatatcatttgtgcaaaggacggctactgaattttttaatcacattactgaaggtgattataagttggaggagttctcaggtagaatttgtggtcatttttatatactgtcaaggaggaccctagcaaggacacatggatggccttgggaaggaaaattagatgagatctacagggtaaactagggagaaaggggtggtaagggaaagggaagggacataaaaacatgagggaatgggatggtcagtgggggaagagattcagtgcaagagcaatgaaagagatatattaatagagagacactatacagggttacagaaaacccctgatgccacagcaattcccaagaatctacagattgaccccaggtaagactcttagcaatagtagtgagggtgcctgaactagccttcccctgtaatcagattggtaaatactctggctaacgtcatagtgccttcatccagcaatagatacaagcagacacagacatccacaataaagaagcaggcctagttcaggaaatccagtggaagataaggaggaggaaatatatgagcaagggtggtcaagattattattgagaaatctacagagacagttcaaacaagctcattgaaactcataaattctagactgacaacagtggagactccagggcaccaaactaggccctccacatgtgggagacagttgtgaatcttggactatcagaggggggccctggaagtaggaccatgatacaaaccagctatatgagctagcatgttgaagcccattccctatggtgggatgccatgctcagccttaatgcatgggagagctgcttgtccctgtcccaacctattgtatcagactttgttgactcctcatgagattccttaatcatgaggaggaatggaatggggttgggctggggaaaggagggagtgagaggaggggtgggagggagaactgtagttgcaatgtaaaaagaaattagaaaataagtcaattataaaaaggagctacaattctcaactgtaatatgattttcttcttttgatacttcatcctgctatggaacagagactcctttctcctgcaaggagctgcaacatgaacatagtcaaatgcatcacgatgaggctaatgttctaaggcaaagcagagattttttaacctagcctacccccagagccttttaatccaattctattctgcctcgacgatagaacctcattggaagacgaaaatgatcattgcagagtaaaataacatatttaatttcatatactgaatgtgtgccctccatcttcaagtggactaggtaaaattaagttcgatattttcattttttttcaagtagagtatggcagaaaactcaatacaatcaatgattactataaaaataagctgtctaacatgaacaaatgtatcatgcactgatcagagctaacatcaatatgacagttatgtatttaatatgattctccaacaggaagtcataaattcagaaggattgacttgtgtgttttttgaattgcagttatatatgtatagttattttatttatctcagttactcataggcatatttctgtggccttgctttcacaagtgtgataacgacatgtcaccttagattcatgccacaggaaaatgtgcaaatgtaattttcaaaaatgcaaatgagtttctctaatccttgcccttccacaaaagaagtgtaagtaagcttgtcttatataacactattccttgctttccatgtaaatttaaacaatatttaggaagctgataacaagttcttagacttccaatgaactaaatatgtttaagagcaaaaaactgacacagaaaacagagctgcaaaactgagcattcaaaaagtgtatatctgcatgtgtgtgcattattaatagaaaagggaattgtatgaaatgagttagataacttccttttcctcaacttgaagcacaaaggtaccttgagtttgtattactatgcattgtatcatatataacatatattatataaaaatacatggatgcatttacatattgatacatagaaaaagtagtgatagacacacacacacacacacacacacacacacacacacacacacacactctgagtccctttaatattgttcgtgtgtgtgtgtgtgtgtgtgtgtgtgtgtgtgtgtgtgtgtgtgtatgtgtgtgtgtgtgtgtgtatgtgtgtgtgtgtatgtgtatgtgtttatgactgaccacatgggacttcaaaacttaccaggggctcatccttgaagaagactgtttgattcttcttttctaagcagcttgactaactgtagctgtagctcgtcttctataggtcatgacttgtgagatttccccatctatgctgacatgtcagctaatgttgtccttttcagatcttgtttagacaaccatattgtagtagtatgaatataatttgacccccattatctcatagggagtggcactattaggagggttggttattgatgtttacgaaatggagtcagaaatagattgataacaggaagtttattagggaatatagtattcacacaagggagctggtgaccaggtttgcaccagagttggagggacccacaaaatgcttcctagtcagaccagccaagtgaaagggccttttgggtgcctccctccttcttaaacccttatgtaaccctgaccatgcccaagcttctttgtcaaaaatcaggtgtttgaggtgtgtgggttaatatctgagttttcaatttgattccattggtctacctgtctatttttgtgccaagaccaagcagaaaaatgggaatcagtctgccacaaaatccagcaattccactcttaggaatatacccaaatgaagcacattcatacaaggatatctgctcaactatgttcatagcagcattatttgtaatagccagaacctgaaagcaacctagatgcacctcaactgaagaatggattgagaaaatgtggaacatttacacaatggaatattactcagtgccgaaaaacaatggaatcttgaaatttgcagtcaaattgatggcactagaagacaccatcctgagtgaggtaacccagtcacaaaaagacaaacatggtatatactaactcacatatggattttcgacatgcatcaggggatggtcagtctacaatccacactgccagagagtctgggaatcagggagtaccttaagagagacatgcatgataccctggagaagaaagggaaggggacaggatctcttgagcagactgcgagcatgggggcagggagaagagctgggagaaagaaatagggaggagaggagtggcgagaacaaaatgggggagcagggaggttgagtcaggggaagaatagaggagagcagaatgagaggtatcataatagagggagccattatagctttgaggagagagctggcagtagggagatttccaaatatctacaaggataacaccaactggcatggagaggctaccttaaatgccctttgccaataatgagattggtaactatcttatatgccatcctagagccttcatccgggggctgatgtaagcagaggcagacacccagagctaaatactgaactgaacccctggatccaagttgcaaagagggagtagtgaagagcaaaggggtcaagactgagctgctgaaacccatagaaatagctgacctggacaagggggagctcatggaccccagaatgatggctgggagccagcatgggactgacccagacctcctgaacttaggtgtcagggaggaggcctcaacaatctacagggactctggtaatagatcagtatttatccctagcatatgaatggactttgggtgcccattccatgtcgggggatgctttctcagcctggacacatggagcagggcctaggccctgatgatatgacagattttggggacccccatggaaggcctcaccctccctgggaagtggaggggggatagggtgggagattgttggcgggggaggggaagtagaagaagctgagattgacatgtgaagcaggcttgtttctaatttaaagaaaaaaattagcatgtttatagtgtcttttcatagcatactgttgagattttgtttgtaaaacttctcatatacagcagactttctctggctccaacaatctttcttcccatcttctcccatgttctctgagccttatatgtgtgttgtgttgtaggtttctcatttagagctgggtatcctgtagaatgaattataaaaacccagggacacatattgggatgctagctgaagatcagaaaaacaaaactgccagttccggatgtttaagaaagtggcagtagtaggttctcctctagagtacacgacctcaccatgagctgatctttggcttgatttatgttatcagtcaagaattctcttctatttatatgtccttaagtccaattggacagctgctggttattctcaacttttaagtgcttctattgaatccttgaagatgtcttcctaagttggtcagggctctgcttcatgtgttttgcactgatttgggactgtcaattgctctcccccacaacagcctgtatagcacctcaagggactactagagctagtcctgaagaaggaagattttgggtcagtgccagctctattcacccaatccagtgtctggtgtcttcagcaatagcttcnnnnnnnnnnnnnnnntttgatccagctttcttctttctctgttcatcaatcctaaaacatattagctatatatacctcaattctaaattgtgtcctagctagctttatcagcttaacacagcatagaaggaaaggctcttgaagaattgcctagaacagtggtcctcaaccttctcaatgctgtgatgctttaatacagttcctcatcttgtatctccaaccataaaagtattttattactacttcctaagtgtaatttttctactgtgataaatgataatttaaatatctgtactttgtgatggtcttaggtagcccctgtgaaagggttattatattcccaaaagggttgctacccacaggttaagaaccactggcctagattgacatacagacatgtctgtgggattgattggtttgttaattgatggttcagtttaggtatgactactcatagacatgtgatcctggtttgaataagaaagctagcaaagcatgaacccctgagtaggctagtatgtgccattcctccatgatgtctaactcacacttctgcttaggtgcttgccatgacactctgcaattatagactattatctagaagtataaaccaaataaaacatttgatccccaaagttttaaccatagtgttttatcatagcaaggtaaacaaaagtagaatgcctcattatccatttaattcacccaatttgaaatagcagtaagacttggtcaataggtattcactcttaattaggaaagtctggtaaatttggtgtgtctcatcaaaaagttttcccagtgatctttggggacttctgtataatccacatagagtttctaatactaaacatttgctacctcaggaatcttctgatgtttttaaattcaatgtgattccagacctgatgcttcactactctttgaatatgcaggacctattatttaagaactatgacagccttgacataaccatattatatttcaaatccccaaaatgaggctgggagagctggctcagcagctaagagtactgctgatcataaagtgaaccctgttcccagcacccagaaaacagcagctccagttccaatgtgtcttatgccctcttctggtctctgcaagtatgtggcatgcatatggtgcatatagatgcaggcacaacattcttatacataaaataaaaataaacacagctttaagaacctagatattagttatataaacattataatcaaatgtttatttgatatctataatgtttttcttcaaacaatattaaacccatatcacaattagggtcatataatagagatagggtaaatcaacattgttaaataaggagtatttggatttttgactttcacattgactactaaccccatcactcggaaaaacctgcactttccataattgaaaatgtgtatgttcaaagacatagctgcatatttaattattcctataagataccagtcatgatgtttatatataagtaggcatgtttataattcatattgtctgatcaatgacagagagttcattaggagctacaaagtcagcagccaaagtaacagcttgcactggtgctccagccttcagtctcaacagcataacatagtatgggacagatggcacttcctcatgaagtggaacacactgtaagagaatgatccccagattaagaaagctttcctgcagagggactgaagacatcattattctgagtctacttggaggtgcagaactctatatgcttgcttatatgcttccccaaagacgggactctcgcattgtctccctttacaaggtgtgtttgaaattagaaatgtcacacatgtttataatggattttgctcaagtccacatcctattccctcccctgtaattcctcttatatcccccactacacatgtttcctccaaagtacatgctttcttctttttaaaatctgttatatatacttagtactaccattatggccatggacaaaggactggagcttggaaagtctcaggggcctacatcctgaagaaagctgactgtccctaatgtctttgtttgtaaacatcactgaatcattcataagtgtctttatttatgatttagctaaattgcaaaattgctatggaaaatcagctttcggagtgccaattcagttgttcagaggaaaaaaataaagtaatattttatacctttttaaaaagatagagtgagatgctttatcctaaagtgacaaataattctacaaagacataaggaaagctattgcaactgtggaaaataggtctcacataaaattggtctagtgtcaaagtcagcatggctgtatcaaaaaggcacagtgagtataaatggatgtataactactcagagggagagtggggcaagctttgggctcctttatctccacagtattactgctgaaagagggataagtggttgagtactagagtcagggttgaaaaatatcaccagaaataggtggctggagagtaaattgttttataaatgtagttgctaaaagtgtgatttttgattcattgtttgtttggttcacttcttttgagacaagttttctttttccatgtagctcaggctggctttaaactaactacagagcacagactgactttctattcatgattgtccaggctgagctgcctggttgccatgattataagcccgaacaatcacacctatgtctaaaatgacattccacaagggaagatatagagccaaagactcaaggcttctttaaaatcactcagaggagctgggtggaatgtttatcattcacagaatacaaggggaaacatgttgcttaacgaaagaccaggaggctctttctagtgcagacgatacctggaagaaaacaccctacatgaaactcaccatttgatccagtggaattgttaaaatatatatgagatacctgctagttctgtccaactccacttgtgaattaaaacaaacaaaaggtttggtttatattggagcaaaagaaagtattaaactcctacaaaatttatagttctggatgacaaatacaacagcaagttattttaatcaagttctcagttccctaagcatggctataaatcaatggaaatgaataaactggcagtttacttttaaaattcatttttaaacatctcagctgaaaaaagaaagcttcaaatgtaaataacaagttaatctaaactataactcactgaataatttcagttcttatccgtagtaactgtgagatatttccactcaacatataaaacagatattttcataataaatacaccagaacctcccatcctttctaacttaatgtaaattttattatatttgttagaaagagactagatgttttaggaatatgattcactgaattggttaaataaaattaaaacatagttttaggcaatgcaaaatgatcgataaggtagcatgagggcttattaaaatctacaggttgccgggcgttggtgacatatgcctttaatcccagcactcaggagacagaggcaggcagatctctgtgagttcctggtgccaggataggctccaaagctacacagagaaaccctgtcttgaacccccccaaatctagaatttaatgaggaaatcaattaaaaaattagaatactttataaagaatcaaattcatttttatttatgagtgtatgtaagcagtggacagcatgcatttaagaaagaatgtgtttcacagggcagagaacgtctccagagttgctgtaataaactacaaaaggcaacctatcatctacttctgcttgccaggaatctgtgtaaatgacagacaggaatttcatgtctcctcatttttcatcgctttactgtaatccatggtatttttgcctgccttctacagtacctcaacctatctccactgtaactaaatttccctctcctatctgtacttctgtttatttccttctttcttttttcttttttattatttttcttcttttgcctttttctccattttttatttaaattagaaataagattgttttgcatgtcaatctcagttcactctgccttccctcctcgcctgacccccactaacactctatctatcccataccctttctgatccccaggaagggtgaggccttccatagggtttttcagagtccatcacatcctttgggaaagggcctagtccctccctcccagtgatcagtctggggaccaaaagctctccgttgttcaggtcagctgtttctgtgggtttcaccagtctggtcttgtccaggttgctcatcactcctccttctttgcaactggattcccattcagttcagtgtttagctgttggtatctgcttctacttccatcagctgctagatgaaggctctaggatggcatataagttagtcatcaatctcattatcaagggatggcatttacggtagcctctccaccactgcttagatggttagttagtgtcatccttgtagatctctggacatttccctagtgcctgatttctgtttaaacctatactggctccctttctgatagtatctcttattttgtctcttctattcttcccccttcacaaccttcctgcctcccttatgtcctcctcgcccctcctcttctccccttctcattctctaccctacttcaatgtgcttttcactaaaatttctggttcaccaatagccccatttacaaatagcttctcatattgagatgaccaagattagagtttcaagattcctgttttttaaatttatttatatattatataaataatcttattttacatatcaatcccagttccctctctctcccatcctcccatgtcccccaatgatgtccacccccatcctaccaccaatccactccccatggagtgtgaggccttccatggaggaatcatcaagtctatcgcatcatttgggtgagaacatttgtcccttctccatgtatctgggctaagagtgtatccttccctgtggaatggactccaaaagttcatttgtgcactagggacaaatactgttttcactgtcagaggtcccattgactgcccagacctcctaagtggcacccacattcagagggcttggttaggtccaaggctggttcctcagctttatgactgggatatgtatgctctcacttgttcagggcagctgtttttgtgggcttctccagcatagtcttgattgcaggcaaatggatagaactggaagaaatcatcttgagtgaagtaacctactcagagaaagacaagcatgatatgtactcactcatatatggatattagacatagagtaaagtactaacagcctacaatccacacctccagagaagctaggaaacaaggagcaccctaagagagacatacattgtttcccggaaaaggggaaagggacaaagtaatttcttatgacattaagtagtaaaataaaaaatattaggatgaaagagtaagaacatcaatttaaggccaaactgaggtctgtctgaaaaataaggtaagaacacacaaatatgctcactgtaatcttctatatgtaaaagttaaatcagaaggaaactggcgaaaattttacaatatctcttttggagacaggatgtagaaagtggtttatttctgcatgggtatgaatgtgtttgctttatttctacctattatgagtaaacagtataaggtgcagaaaggcaaagtatatataatagttaatattgtcaatgaaaaaattctaaacattcccttgagggattatcaaggactatcagtgtaggtaacatcacccccttggctggtgtcctgtactacataaaagggactgctagctgtgtctgaccattcatttctttctgcctgctgtggtaggatagtaggagttgatgtttgcaggttacattgactattctgtctacaggccctgtatattccacaagaaatagctgaagcacaagaaaaaacaacattgaaaatacctatatgaaaatgatagaagcccttaaagagaaaattaataaatcccttaaagaaatcttggaaaatataatcaaaagatcttgaccctttccccttctccgggggaccatgtatgtctctcttagggtcctccttgtttattagcttcttttggcattgtggctcctgagcaaattgggaacaagggaagaggggggagggagctaggagaatgggaaggggggaagaggagggatgcagagaacatgagggagcagaaaggttgagtcaggggaagaatagatgataacaaaaatggagataccataatagagggagacattttgggtttacagagaaatcaggcactagggaaatgtctggagatctacaaagatgacaccagctaacaatcgaagcaacagagagactaccttaaatgcccttccctgataattcaattgatgactaacttatatgccatcctatagccttcatccagcagctggtggaagtagacacagacacccacaactaatcactgagctaaactggaacccagatgcagagaaggatgaatgaagagcaaaggggtccagaccaggctagtgaaaacccacagaaacagctgacctgaacaaaggggagctcttggtccccagactaatagctgggataccagaatgggactgatccagaccccaggattgtgggtttcagtgaggagaccccgaaattctacgcaacctcctgtagtaattcagtactagcctaggccctatcccaaaggatacaatagactctgatgacatcttatggaatgcctcaccatccagggggagcagaaaggatatgtgatagatagggttttagttggggtggggtaaaggaggtttggagggtgaagggaactgggactgtcatgtaaaacaatcctgtttctaattcaaataaaaaaagaaaatagaaacataatcaaagaattggaagaaatgaataaatccctttaagaaagccaggggagaaatagttgaaataaatgaataaaacttttcaagacagttgaatggaaatggaaatgaaagcaataaagaaaacactaactcagggaattatggagatgaaaagtttagaaattctatcaggaactacagcaatgctcatcaacagactacaagaatgggaagagagcataacaggtattgaagatatgataaaggaaagggaaacatcagtcaaagaaaatgtaaagtctaaaaaattcctgacacaaaacatttagagaatcagggaccttctgaaaagatcaaacctaagaaggtaagaaagaaagaataataggtatagaaaaaggaaaggaacccagctcaaaggcctagaaaataattttaataaaaccatacaagaaaaatttcctaacataaagaaattacctaaaaggatacagaaagcatatagtgttgtggaatattagttgagaatgtgatacattgatttatgctgtggaacatttgtttcatgatgcaaagatgtattgcattactttaaattacattcgtttaaacctgtggtgctgtgttactttgcctgtctaaaacacctgactttaataaagagctaaacagtcaataacgagacaggaaacttgatagacaaggatgccaggctaagagaataaataaaaggagaaaaagaaaagagggaggatcaaaaaaggaggacgggggaggccaagggtttgccatccagccacacagccagccaaagaaataagcaaagaaaatatatacagaaataaggaaaggtaaaagctcagaggcaaaaggtggatatattttaagttaaaaagaatgtgttagaaccaagccaagctaagaccagacattcgtaagtaaaaataagtctcagtgtattcgtctgggagctgggtggcaggtcccacaatgatcagagagagagagaaaaaaacaaacaaacaatgcagtacataagatagattagaccccaaaagaatgttcctttaccacttcataatcaaagcactatacatacagaacaaataaaataatattaaagcttcaagggataaatcccagtaacatatgaagaaagacctattggaattacatctgacttttcttttttgttttttatctgacttttcagtggagactataaaagccagaggagccctggacagatgtactgccgatttaagagatcgaagaggacaacccagattactatatacaataaaactctcaatcaccatagatggaaaagttatgatattccttgctaaaaatcacaactaaacaatttctgttcacaaattcaaccctacaaaggttactaggagaaaaactataacctaaagagattaacaccacccattaaaacacaggaaataagcaacctcacaggagcaaaatcaaaagaggggaagcaaacacacacacacacacacacacacacacacacacacacacannnnnnnnnnnnnnagatgggagatagagaatggtcacaaacacaccaccatcaccaccatcaccaccaccaccatcatcaccacctcctccactaccatcacatccatcaccaccaccaaaacaacaaaataacaggaattactaaacattggccattgatacctctcaattccacaacaaaagatacacactaatagaatggattcaaaacaatatctgttcttctgctgcatccaagaaacattcctcaacatcaaggatagacattacctcagagtaaaggtttggaaaaaattattccaagcaaatgaacctgagaatcaagctcatgtagtcattttaatacttaaaaatttagacttcaaatcaaaactaatcaaaagagatagggaagaacacttcatacacagcaaaggaaagatccaacaagatgacataaggtcacccacttttgtaaaagaaacactatttcttaatatctatgccccaaacgcaaggacacccacttttgtaaaagaaacatcactatactttgaagcacatattgattctcacatagtaatagtggaagacttcaatacccagctctcaccaattgacaatccacccagacaaaaactgagaaattctagaccttacaaatccaataaactaaatacgacctaaaaagatatttatacaacatttaaccaaaataaaaagaatatatattccattcagtaactcatggaactttctccaaaattgaccacatacttagacacaaagcaatatataataaggaaattgaaatcatttcctgagttatttccctatttgaccaccatagcttaaaaacaagagaaacaacagaaatcttccaaacaaatggaaactgaaaaactctttactgaatggaaaatgggccaagacagaaaaaaagaaagaaatcaaaagctgggtgttggtggcacacgcctttaatcccagcactcgggaggcagagtcaggcggatctctgtgagttcgagggcagcctggtctccagagtgagagacaggatagggtccaaagctatacagagaaaccctgtctcgaaaaaccaaaaagaaagaaagaaagaaagaaagaaagaaagaaagaaagaaaggaagaaaggaaggaaggaaggaaggaaggaaggaaggaagaaagaaagaaagaaagaaagaaagaaagaaagaaagaaagaaagaaagaaatcaaagccttcctaaaatacaaagaaaatgaatcaacagcatatccaaagttatgggacacattgagaacagtgcaacgaggaaagttcatagaacaagtacatacaaaaaaaatggagagatctcatgctatcaacctaacagcacacctgagacatctaaacaaaaagaagcaaactcacccaagaggagtggagagaaagagataagcaaaatggcatctgaaagcaataaagaaacaaacagaaaaacaatatgaatcaatgaaacacagagttcattctgagaaaacaacatagacaaacccttatttaaactaactaaaagacacagagaaaattgtcatacaaactaactaaaagacagagaaagaatactaaaattcacaaaatcagaaaaaaaaggagtgataacaaaagacaccaaggaaatccagagaatcacacagacatactttacaaatctgtactctaccaaattggaaaatctaaaagaaatggataattttctggatacataccacttaccaatgttaaatcaaaatcagaaaaaggatttaaatagacctataatcccttgtaaattataagtagtcattaaaagtctcccaaccaaaaaagcataaggacacatggttttagatcataatacttccagactttcaaagaagagctagcacaattttcctcaaattattccagaatatagaaacagaaggaacattcctcaattaattgtatgaggccacagttaccctgataccaattctacctaatgactcaacaaagaaagagaattgcagaccaatttccctatgtatatagatgcaaaataattcaataaaacacttgcatactaaatctaagaactcctaaaaatactttgagattgcatcttacccctgtcagaaaggctaagaccaaaacaattgtcagctcatgttgacaaggatgttgactgaggagaataccctttattgctggtttaagtgcaaacttgtacagccactatcaaaatcaattttttggttcctcagaaaaattgatgatccatgtacttcaagaaacagctacactaatcttgggcatatatacaaaagttactccatcctattacaaggacatttgctcacctatattcattgtagctttattgacaatagtcaaaatctgaaaacaacctgtatgtttctcaactaaagaatggataaagaaaacctggtacatttacacaattgatgagtactctgctgtttaaaaaaatgacattatgaaacttggaaggaaatgcatggaactagaaaaattttcctcagtaaggaaactgatacacagaaagacaaatatagcatggattcattgatatgtgagttttagtcattaagtaaatgattgataatcaagctagagttcatagacccagagagagtaggtgaagagaaagaatgtaggtggatgcttggatctctcccgggggataaaagggcagatggaggcaggtggcgataggagtgggagggatcagatgggagatagagaatggtgggagaaagtatggggaaagttgaaattgggagagatttggagtacatttcggaaccctagtgctgtggaaacttcctgcagtatatgaatatggtcctagttaggacttgtagctatgcaggaaatagtgtctgaactggccatttcttgtagtcaggcaatgctcctagtggcaggactaggctatactcagttgagttatttgctgatggtgttccatggtgatcctcagatgtcccaaactggtgctaggatagagggttggtgtgcacaagtgtactgtggaactccttttgctagggcaacatccacatagctaaattgaatgtagaaagattgagatggtgcctacatggaatcttatgtggtctcttgttgctggaagggacactgtaggctaccaaaaagagaatgatggacatcaccgaagtcacaaaaaccttgacataaaatccgtccttcctacaagataagctcagacaatggtggcactgaacttgtgggtgtgctcaaacaatgtttggtttaacttgaggcccttaagagggaacccatctatgactctgcttagatgtcaaagaaccagactgggtagctcagaagagtcaggtagaaccaagaatgactagtctaaaagaatcaatgaaatgattccttatgatattcctgctatactaatagatcagtgccttgtttagttgtcatcagagagacttcctccaccatcagatgggagtagatgcagaaacccattctcagatattatgtagagagagcctaaactggaggtcttcatccatctggtctttccccttgatgctcagggacttcagaagacagagcagaaatattacaggggttagaggggatgggaaacaccaggagaactgaactggcccaaagaatcagctaagaacagagcaaatgggctcacagaaactgaagcaacaagcacagtgtctgcacggggtcctctgtgatgagactggctgttagcttggtgtctttgtgggactattatcagtgggagaaagtgtatctttgactcatttgtctgcttctgggactctttctcctgttgggttgccttgtcctgcctcagtgtaagtaagggtttctaccttgtcttattgtattttccttcatcgtgtttttttgttgactcttggaggcctgctcttctgtgaagggagctagaggagctatgggttcaggggagagggtaggtggggggagatcttggaggagtggaggtagaggaacctgtggtaagggtgaaagaagactctatattcaattacaaatgaggaggaggaggaggtggaggaggagcagggggagggagagggggaaggaaggaaggaaggaaggaaggaaggaaggaaggaaggaataatttttcttgactgagccagagaacctattcttggttgtcaatgtaaatatacctggaatgaactataattcagcaatggaggacacacttgtgatccggatcttgatgcaacaagacaatatgcctttggtctggatcttgatgctggaagaaatgcaccgttaatccagacatggaggctggaagtcaaacatttaatctgggctacaccttctgtcagaagcctatataaggaaaatggaagatggaagatgttcttctcctacttgccctcggcatgtcaggtcatcccttccttcatctgcttctttgggattccagcatatacagaagatcaactgagacacacatggtactgagcagctcctagattcttgaactttccattcacagctatccattgttggattgcagcctgtaagccattccaataaagagagagagagagggaggaagagagagagagagagagagaaagagagagagagagagagagagagagagagagagagannnnnnnnnnnnnnnnnnnnnnnnnnnnnnnnnnnnccataagttctttgaccctgactaatagagtgtacaatggtcagtttgaaaagtacaatttcatataaatgctataagtggagtacatccacatttctaatactcactttatagagacccagatgcctacttgatctgtgacactctcattgggtgcaaagataggcttaatgggaaggtagcctttcaggaaactgatgtttttcctaagcaaagggatggctgtggaataatagtgaaatagagatgcagttttctttgtaaaacacacctgcaacttatggaagaataagcacaaacagcctttgcactgcctgtgtttcaggatgctgtgagccaggtatcacttctgcccctcagagaacaaccacagacccactctcatctcttatgcatgttgcctctatcaaaggcagtcttagatttccacttactttctcacattttcttgacatttttgaaacccagattagatcttcttctgtgtcctgttcatgatgccagtcagtgtaactcttctattttatctggccttgtttcagttgatatattttcaccaaagaaacagtataataatatcagcaccaaatattaaccaaacaataactaatagtattattgattgttaatcaactaattataatatctgtacagggagtttctgcccagcctggaccgacagccatttagccccaaataacacagagagcctaatattaatgataaaccgtttggtcgatggctgaggcttcttactggctagctctttcttagttattcacccatttctattaaactgtgtatctccatgtgattttggcttaccatagaaggctcaagaatgttactctttcataggctacctggtatctcccaggaggcttctctctgccttcctctccccagaattcttctagtctggtagaccaatctatactccctgcgtggctactgggcatcagtgtttttgtcatcaaccaataatggaaacatatacagaagaacatctcccatgtacatcaaaaatttccaaattatttagtaataaaatagcacactgctaacttcatggatttcctaattactggatgacaggaaagttattgatgacctaaaactccagggtgagtaaaaatggacactaagggatgaacatgttaataagactgtactctggctgctgaagtagagaaaagtctaattatatctaagtgaattattaagggactggtttctaaattttgaataagctttgtgtcataaatttcctcccaagtaaaacaaacatcattggacacagttataaacagacatccttataactgtgtcatcagttaattatgatttctatcataaaatattacacccattctttttagagacaacatgaaatatcattgtttcttttttgagacagggtttctctgtggctttgaagactgtcctggaactagctcttttagaacaggctggtctccaactcacagaaatctgccagcctctgcctcccaagtgctgggactaaaggcatgttccaccactccacagctgaaatgtcattgtttcttatctaggactttttgttccttattgatgttcaatgattcctgagatgattgttcctttcactgatcttgaggtagtatcaggcattatttaatagatcagttccgacttgtaactttcaacttatagaggatctgttttctcattttacatctttgaaaaataaaacttaatggggatttgagtggcaaaggagacccaaaatctgaataccattcttgttacccttgtcttctacaactactgatggcattaagtaaagtacactgtctaattaattatgctgaagacatcatataaattagatatagtcaaatcaaatcagacatagagtcatccaattcagctattaaaagattgttaagtacatttactaatgttactttggttgaggagccaggtctccattcagatagctcaaagtctttcatatgtttccattcatccatcaaaatgacagatcaaccaataataatcaagaaagtaaaaggcacaagagcagggagtgattaaacaagaaatgctgccttttgaaataaggccccaccacatgtgattacaggtttctcttctcagaagcctcagtgaagcaagtttcttcccattggtttattgacgcatttgctgagcttttaaatatttcattccattttaatgtttattttattatgtttttaactgtagtgtatttttaatgtgatcctcaaaagggggtctttttaaccttaattattaattataataaagccataagaaaatatcccacaatgaaaggataaattaacaatttatgataccaaaataatttacaggagtctattgatcccatgataagataaagaatattacataaaaagaagggagatttgaatataacatgaggataagtaggtaattcttaaaagtgggagtatcaaggacatcaaaaatcactactgaatgcagcttctctaaaaacagaattccagacatacagttcttgcttcacaaagaaaagctactgaaattcagatgactttgttgacattgtttatcatacacaccctttaaaatgcacaacagatgagtatgcaattagacaattcccataggccccacttggcctaccctttcccatctctttctctcttaaacacaaaataatatcccttttgattctccattttctgtgtatgagtattttgcatgcatgtatgtttatgtgaatcttgtatgcttgctttaaacagagccagaagagggatctgatatctggaactggagttagagatggttatgagccactatgtgcatgtgcatgctggaaaccaaactccactattatgcacaaagagtcagtggttgtaactatggggccatctctcctgcaccgaacacaatattcttagtaaagataaaatggtgaaaaaatcccaactaagtaagtgtagtagtttgaatgaaaatggcccccataggctcatagggagtgatagtatttgaaaggatgaggatgtctggccttgttggagtaggtgttgccttagaggaggaagtgtgtcactgggggctggctttgagatttcagaaacttagaccaggcccagtgggctcattctaattcagttgcctgccaatccagacatagaactttaggctcctaccataaaatgtctcctgtgtaccaccgtgcttcccaccataatgatgattgaaaaaacctctgaagtaaaagccagccccaattaaatagttttcgttataagtgttgtctctttacagcaagaaacccctacctatgacagttagcatccatcttattatctagaacttatctaccactgttgctttataaaattgtgagatggctgaaatgttgtatggtttgttgtacagtgctcttcaggacaaggtgagagaaatcagtagtctcttaaaatttgcccattatgagtggtctaatattgtttcacaatctatattggctatttatcttgtgctcatgaccaaacatctgatagaaccacttttgagagagaagatttcatttagttcctggtttcagaggcaagtgagccatagagtccagatcatgtggctgttactcatatcagggtgaatcaagaagcagagagatagatgatgatactcatcgtggcttctgggtttctcctttctattcagatggggttaccagtctacagagagagttactgcaccagcttcagctcctacctttagtgtgcctattccttcctcagttggttctcataggaaacacccttcagatacccacaaagggatgtccttgactccttaagctcaatacaatgaggactaaccatcacaggacctaaattgagatttatgtggagattcctttgtgttttgtgaaatgaattcatgttttcttagagtgagtagagtaatgagggtgggactgaagaaaaatgagattttgagaatgaatacacagggggttatgtcttgaaagtatgttaaatgtaaaatactgagggtttttttttccttccattagaagaacaaaaaagttagtgtgaaggatgggaccattctctttgcaatatggtatttcagatgtttgtttgtgtttatatgaccaaatacctaccaggaacaatttaagggtggaaaggtttatttgccttacagttctaagaagtactgtctatcaaggcagggaaagacaattactttgtaagaagcaggaggatattgctggtcacatggaatctgcagtcaggagaaagtgatcaatgaaggaatgctcgagctattctggattttctcctttaattcactctagaattgcaaatgccactgacgctatttagagtggatcttcccctgtcagctaacctaatctaagcaactcttcataggcatgctcagaagcttgtctcttagatgtttcagccacccaggtaagtagcaggatgaagaaaagacttcagtgatgaccacatttgaggtcaaagactgatgaggacaaagatggccttcttgccaccgtatatatgaaagatgtactttccttgtcaatataataaaatattgtagagaaatattgctggcctattccaagcagagaacataagttatccttaattctgttgtgatttactgtttttgctatgattttgcataatcccttgcagaatgcaaatggtgaagtggggaagaaataccaggtgaagagtgaaagaagaaagctgcaagagaaaatgtactttcctaagtgtcacatcaatgcccttatatcatttcataccagaatacaccagagttctcattataacactatcccatttcctaaaacttctaaaagataacttcatctttatttagatttatgacttgtttcaatagcattgcaaaagcatcaccaaataaaagagacttggaaataccatcaaattgaggattactatatctgaggaaataacatttatttcacaatcactactttgtaaacttagtattatgacaaagtacacatttaattaatggtatgaaaagtgttcatatttctttgatctgcgtaggcaaaaactacactaatataaagaatttagactgtatgggaaagctcaaaatcatacattttatagttaaaatttctcaggacctaatagttagagcgcacttgtaatgacagaacaacagtataaacattacagtggtcattcctctgaaagttataagcccacatattggtctgaagccaaaatagaatcatctttagggtattccatgagatggagaaaacatgacatacaagggaatcaatgattcccaatgatattcaaatttccattttcatcataattgctgttcctgattttgaattaatactatttagcaacattcagccatttatacgctagagtaatattcaagtataagaaaggttgatgtctacatcatatatctcattgtactactatatgatttacctaattaaattgacctgaagttattcaaacatgaaaactgtatggcatatagaatttaatttttttctgtgaatgtttacctgcattctgatttttgagtcatttttcatcaaacatcttcagaattgagagggattttataagaaaagtcaatcacatgagtggtttcctttctctcatgtggaagggtggaaggaagatgactttctcaaggagaaatagagtctcacagcttaccaggctcctgaaggcagtcacttgtgctactccatatcataacatcagttgatcctttactgcatattttgaacacagtttttaagttttcttgctacagactctcagttttcttatggatgccaatgccacctcacacagacttctctgctgtgtgtcttgcaccagtcattagatgaagagcaccattcacccagacaccctcactgcttccagctctagctctctcaaggcaaggaaagttcagcctttgcagggatctgtgacaactgcttattaacacatgatctatctcttaggatatgacttcctgaaacaaggttctgttcacattctaattttgaatgcacttaatatactatcactcagtatatatgtaattgtagtacatcacacaggattaaatatgtatatatttatgcatatatgtagatatagttcttctgacaagaacacacacatttatgctaagtataagacatataaacactttaagaaagtaaaattttatggagaaacagtgagtcaatgactatgttgtagaaaaatatgatagtgtatctttgaacaactactgtgaatgcatagtaggcagatatgaagttggtaacattaaatatatgtttctattatgtagagcctggagatactgactaaataagcacaatagttgtgaaggaacctaaaacaccaaccctcagcaagactccaacaaactctttctctcctttctctcaattctccaaaaacttaaatggaaaaggtgctactaaacgttagatacaaccttctaaatttcatttctaagatagaattgcataaatataagctacaatttgatagaaaagtcaaagaatataatttttcctcaacacctaaacacaggaatcttttacatattcagtaaccagaaaatcttggtcattgaattaccatgggctttccctttatcttggttatgagaaattatcacactatgggttctgaagtggacttagaactctggttctgattttattctactttccccctttgctacccttagtatttatttataagaagctaaatttaaggctgatactccagtagcagaactgttcacatgacctctctctctagggttgtccaatcagcaagctccttataaaataaccacatcttcaatgtgagtaattcacatacctgctggtgaccatgtgcatcaattggtcacatcagaagcaactcaacaacctggaactatttgagaatgttagaattgcctttgtataccttcttgtacattgatgtgtgtgagtgggcacatgcgtgtatctaagagtgagagagagagagagagagagagagagagagagagagagagaaccagcagaggccataaaaggttgctggttttcttcaagttattaacttttttgacctaattgctcttaactacataaccatctctccaacctctaacattgtctttaaaatctagaaagatgcattcttgtcttggatgtttttcttcacagtcaattcacattcagtattaatgtgtctgagatgatcacatggtgtcttagttcaagttcaaggcaaatcttgaaacaactgatcacactcagcaactatgtggctaaatattataatgttcagtttcttttgttataaaaactgaaagaatatatttaaaattaagttggtcctttatgtaagtaatatttggaaagttccattaagcataaatttctatataaatgacaaatgtcatttttcttatgatattatttatagacataatattttgatgaattttcagtacacatacaaatactcaagtgccaagaaaggaaatgctaaaactttttaggagagaattgatttcattcttctcaagtccttaaaattatatcctgtgctttttatgtgagggtatgtctgtcactcacgaatgttttgctgtgagtcctttgaagtcagattatatattccttatttgaaatctctgtgcttgtgtggagatgaaaagcagttgcctttgaaagtagctcatgcacaatttgtgtgtgtggcagggggaagagattgctgtgctagaaaaacttaaaggtttatttctcctcatagacaagtctaccgttaattgtcacatagagtcacaatgtacacacatttccctgatttatatgggcaaaagacagaaatgccaataagatggttcatttttaatttgaaaactctgtgttatttgtggagatagtggggaatgtaacatgaattcatggctcattacacaagttttcaactccagcactgatccatgaataggttcaaattcctcttctgcctcaggttattttcacatgttctccatcataatacaaacacgcaaaaaaaaattacccactgaaaagctgttactggacataccctggaagattcttctgtgtcttttttttaaaataaaaggttccttttttattttatttttttttcattttacataccaatcttttttttttattacttctagttagggaacaagcttatttcaagtcccttacataccaatcttaattccccctccctcccctcctcccactccctcctccaccaatctcctcctcaaagagggtaaggcctctcttgggtagtcaacaagcctggcatatcaagtggaagcaggactgagctcctcccagtgtatcaaggctgaacaaggtctttcaccatagggaacaggctccaaaaagccagttcatgcacctgggataaatcctggtctcactgccagggtccccacaaacagatcaagccacttaactgcaacccacaatctgagtgcctagtttggtcccataagactcccactctataaatatgtcagtttggccaaagagaataggttaattattgaacagtgagaacttaagtcatttttagtgagaaataaacttaagtcttctattttcaaagtctctgagaaggtgtggtatggtggtgaaatactagttttccaattctatagagagagaatgtaaatctcaaaagtaaaatcctattttgtgcctagatttaaggggaatatatatgaaatctttcttgaatccaaatactatctaatgatgtcaagtgccagcaagcaagggctgggtcttattatatatattctctcctttctctcaattctccaaaaacttaaatggaaaaggtgctactaaacgttagatacactagacagaacctactgttcctgatgatacaccaatttcccttaaactgttaattttcatgtctcatttaattaagtaaaattttaattcattctatgacttgaaggatacttataagtacatatgcaaatgccttctatgttttattgatgttcttttgggtagggtagtaaaaactataggattcctacacaataataagatgaagatttccctttgatctaagaaatgtggtcagctacctattatttcaaaaattcagcaaagttgccaatgagattcattgacattatagtttcctttcttgaaatgtaaagcaaattgccttaacttattctacccccaattgagaagttgttcatcatgtaaaaagttacaagaagattcaaagttctagaaaggagctcaagaaacatttagcagcaacagctcaagttcttcctaccgtcagctatagacagacatctggcaccctccatgctgtccttactaatcaaagctacagttaattggcaacctagaaattcatgtcaagatacccagaagaaatgagaacttgtataaaatgactgttttgtgacatgcatagtagattcattgatagcatattccaaaatgaaaagaactgaaaagtgcaattattgcaggattatttagagtatgctggtctattatgtctcctaggaaattttaaaattttttttcaacttctttgaaaaggggttttattctatgtagtctgtgtacttgtaactaaaatccaaatgatacaaactgcatcctatagtgtgaaggatttggaacatacatacatcagtgaaatgattaccactgaggacttgatgggttttatcctggtgactagcaagcactccttgtgtctctgcaaactttcagcatccaatttaagatttgagaaaagagatcatacattcaaagattcattctcagaaacttgtataaaacttaaaaaactgatttcaacaccttataagtgacataagtggtctgaatatgcaaattagtggcttttattcatgattaaaataaggtcaatgaaaaattgccttaaaccatgttcctgagaagactaccctcttaatttataaatgtcattctttagggaaagtaaccatgtcacatgatatgaaatggtctattcatgtaccaaatgtaaaagctgtacattgagatgttccacaggtgacagtcacatacttcagccaccaatcactccagaactcagggaagcaggagttttggaacagggatttgggtccttgaaaaatggatcctcttggctgcattaataacaaaagtggcactgggcatggatttgtgagtctggagtatagcctggctgtgttccttggggtgcaggggccaccaggaacagccaaagtgaatggaatcagttgtagattctgacactgagagccacatccactttggtgaacagtttttgcttctgtgacacatgcaaagacaggaagcaaacagaaggaaccaggtgaatttttcagtcctcctactcccctatgttacctgccatgtattgtctcctccaccaggcagggtctaactgagaaccacatgataatgtggcttacagtgtcctaactccaacatcacgaagtagttcatgagtgatagctttaaagctgaaagtaaagcttaataacagcacacacagagtttcccaaaaccctttatgccttatttaaagtgaacaacacctgtcactctatacatgcacttaaagatatccagaataaattgatggtgtgtgtgtctgtatcagtgttcagtttaggctctactactattgcttgtcttaaactatggcaacacaacaagacactctcgctgaaaaggagaaatgaactacatctggaagactgtttcagaatgtttcaaaacagaatatagttttcttccacattcacatatactcacagaaaaataagctaaatctttcaaagataatcagaaatatatgcagttaatagtgaaaaattagaggacaaataaccttgaatcatttagattttaaataaaacaaacctctttaattagtaatatgaacagtttccatatcaactgtatcataattaaagggaaaacattttgtttctaaggaaactacttagttcagttaataagaatatgctgtataattgaatgtgccacctagatgctgaactgccaaaattgtttatgaagcatgaaatcttgaaaaatgaaagtattatgccatatgataaaattattttaaggagtatttgaatgaaaacaaaagacagtgctagtagccatagtgctattagcaatagaaacacatgagatttcggtgctattatcatttctcagatcactcattcatggtttatatgtatggtgtgcccacactgagaacttaaaattattttggcaatttattgtctcattgaaaattgaattagggtctttagaggtaccctaatgtgtttccttgggagcaaatgctttaatgaaaaagcatacaaggattggacatgattatgattagctacccaaagaaaagcaggaaaagaaagcccttctccaggccctgtgactgcagttggccaccaggtaatgctgttgtttcagacaagtgtggaaacttcaggaggtgtggcctccaggaggaactggactactattagagggctatgaggtttcacaagctcagccccacttcctgactaccctcagcttcctatttcttcagaatatgagatatgtggtcccagatgtgtgcttcaacagacaaggatctacccattggaatgccatgccttcccttccatgactgactgaagccctttcaaccagtgagtcacaattaacactgccttcctttctaattaactaactcattgaaatagaattttggattgcattttaatttttgtcattgagcattgtggctgcaacttgacaaatgggagaaataggggagtactctcaaaacatatatacattgctctccatatattatatactatgtattgacttgcatatatactgagaggaacataagagagttgtgctgagactaagaacttaggacataataagcaatgtatgcagaagattttgagccgcggtcctcaacaaaacactagcagatttcccttgtagctttaggaaaatggacttaaattcaggtatgagtttttaaagcttcaaagccttgttgcacagaagctgctgtcctgatgtgaagggagtctgtctctgtagcttgcttccccctcagggtttttcccctgggtgatgtccaatgtcagcatttagcttgagcagatgttgattgcagtctccagagagactgttcctttccgggggtaagcattcctgtgtgtgcaccatctagacctgaccagctcccttgttacacaaacaacagagtgcactgccagctatgtccctaaagaaaacagagttaaggatttctatgtgtgtttatttttctagaagtttttagtaattaagacacattacattctcttcctccccagtgttcttatcacattaaatatgctcttaaaaatacttgccttttccattttccatgtctgtttagcactaactgttcaattacatgaatcaacttctgtttacttatttatatttcacttattttaccatatacatatgaaatactatttgttgttttacattcttagatattagcagcatttatcttgactggggttgcaatgatagtaaaaactatattcagaaggaaaattataaattcatttttgtaacttcccaaacattacaacacatttaaaaatttctctattttcagtgtgtgtgtgtgtgtgtgtgtgtgtgtgtgtttgctgagagggtcatttgtttggttgtttgtttaagacagtatctcagtatgcagtcatgtttaatgcccactgtataaattgagcaggcctcaaactgtagtctatcctgtattaattaggggttctattgctgtgaagagacaccatgaccacagcaactcctttaaagtaaaatattaattgggtctagcttcagttcaaaggtttattccactgttgtcatgtctggaaagatggcaacatgcaggcaaacatggttctggaaaaggatctgacagttctatgtgttgattcacaagcaacaggaagtgaactttgtgccacagtgagcctggcttgagcgtagcagacctcaaagctcactctcacagtgacatacttcatccaacaaggctaaacatactccaggaaagccatacctcctaaaagtgccactccgtttgggtgacattttcttttaaacaaccacataccctatctgtttgtttgttttgtatgtttttttgagacaggatttctctgtatatccctggctgtcctggaacacactctgtagaccagactgggctcactctctcagagacctgcctgcctctaccttttaattgctgggatcggaggcatgcaccaccattgccaggttatcctatctcttgaattgcaggtatataccaccatgcctttatccttgattttcaagctatacattctatattctaaataatttgaaacttaaaattttgggatcccattattatgccctattctagaagattattccaaatatcatttttctttgtagcattatttatttatttatttatttatttatttatttgtttgtttgtttttctcatttggcagatcctctttcagatagtattagttcagctcatgggagggttaactcagttgtgtcaggattcatattcctttacctttaagtctagaagcatttcatatttcttcgccaaaactttcaaaatcctgttccattgtcttctgctttgcatatagtttctcataaagtttgtgaaccctctaatctgtgctattccatgtttattctctaacctctgatctgcaagttttcattggttataaaaattcattatgatgttttcagtgtttatcgtgtttcttatttctttgttggtaaggcagtgtctcaggtaacactggctgctccaggacttctattaattgattctaacattgaattcttattccccccacttcctccactcaagtgaccctgttgtcactatgaaaagaaatctctgcttgttattgtactaatcagaaagactatagtaataataatgtaaccatgtgaccaacttgtatttcaggagaaacataggtatttatatgctaaaaggcatatgtacaattgcaagtaagctgaacatgtaacatttctgcatctatacatattattttctccattttgaatatcagaaaaatcaacatgtcattgtgaaccactcagagatataacttgtaaaatatagaagtaaaggcatgtgaacttcagtaatcaagtttgacatcacattttactttcaaattattaaataaccaaaagttattccttaagtaagcttgataaaataccagcacaaatttatcctttaaattatctacaaatcattgaaattattttcaaatttggaagacataaagtataattgtattataaatacttttatataagtaatccttatagtctatcacaaatttataattccatatttataagtgttaaataatagtgtcttatttgatcactaaaatatttcaagagttcagcctcattaggcaaacatcactctttcattagatgttttaagccgggttcctctgggtattttgttgaggcttcaaaactgttaatacataatttcctgcagataaaaacttttttcaaatgcaaagcaccactggtcagtgactttattcagttcactagttaatatgaaaaactgcatgatgttaagactgattctaattgcatttgaaggattgggcttcaatttaaaaataaatgatgataaataatactttaggattagttttaaaactgagtcgtgtcctacggagaaatagtctttcacatgtaaagttatcttttgaaccaagcaaaattgtgtgacattttaaactaaaattattctacagcaaggtacttcattaaatctaggacttttactcaattgccagcacccacatgttgggtcacaaccatatgtaactgtagtcccatgggatcagaagccctcttctggcatgtaaatttacatacagacaaaagaccatatacttaaaggacatgaataaatctaaaacaaaaaagaatgtgaccaatcatcacaggtcaaagaaccaaaattatagtaataactccttatattcacatttataattcaaaaataaatctaaatttcaaatttcattattacaaaaatttgacaaactaggttaattggatagttataacttatttcacttgcaagaatgcatttattagaggagatcgctcttttatatctaagtggtgtttcctacctgggttccttgctttcattttcaaaatattcttggaatcaatcacagaccattccaccataatctaagtaacactttgagtatgctgaagtatttctgcacgatgaaacccatatccttatgtaatttcatcatttatctttctgtttgccacttaaatgagcaatataattaaatttggcattaggatggcattaatactgtgttgtaggaaaatctctatggtttctttcttactagaaaattaagaaaccaaatgactcacaaatcaaacatagtatgtgtcctttaatgaaaatacttgacactaactatggcacactgttgttttatggatttactaatccataataagtgacaagtaatactctcttgaattgaagattagttaacacttaagcctttttatgcttgtcatttttattctctgatggacccatacctctgagtatccattttatgctgtattcatctctgaatataaaatctgcctaaaccccaggtaagctgatgtttctcacagaaagcagccaaagaatgattatgtgcttaagggcaaactgtaggcattgttctctgagacagctggctctcaaacataccctttggttagctctgccagagtattttgaatgttactttctctttaggaagatgaaaccaagccaggaagtctcttcctttgtgagtgagcaaccatgatatgatctcaataatattttcattattattttttccttttaaaatatttatttatttatattttatgcgagtactttgcctgcatacatgcaagtgcattgcatgcatgcttggtagatgcagaatccagaaaagaacagtcgactccctgaaactacagttatatagatagctgtaaactctcatgtgggtgctagaaccaactatttcttttgcaaaggcagcaagtacttctaacccatcagtacatatattgtgactggggatgcattttccttctttcagaaataactgttaaaatatatttttcattaacagtatgctactgacatcactttaaaaaattcacaacaccaaccaaaatcacaacataatcaataattttcaaaatggtactgtatatattagaagcataaaacatacacacacacacacaaagtcctgtaaaaacatgaagttggaaaaacacaatataaaatcaaaagacctagaagtttaaaagaaaatgaccagagaaagcattatgaggtaaaaatcctccaaaaatagcattgggttcattttgtgtttacatctagctcttggcatgaggcctgccctaaagtttggtttgtataccaaatgagactccaggcctgacacacatgtgaactcacagtgattctggcaacatgcacaaggccttcacaggtccaaaccaggtgggctcccaacactgatagggaagtgcacacaagaccccatccctaatccagaagctatctcctgtagacaaccacacccaaaggaaaacttggttttccccttctgggtttcacaggatgcttttattacttttagttgtcatgtactcagcagactcagttcaactgtcaatcccaaggaaccaaagacagggtccaatgctcacatggtctttgtgacattatgcactgtttctaataatgcagacagtgtgaatgtctaggagttggatcaacacactatgtacacacacacacacacacacacacacacacacacacacacacacacacatgatattatgactcttgccataacaccatggatataggaagcattaatctgagtagacaatgtgcttttttttaggatccccatttttaaattgagggagtaatttgtaatcctaaaatggtgttatgttttcaacagaaacaaaagtttcatttagtgtacttttttctgtaggtatctataacagttttgcattgtgagaatgtgaatgtggttgatagcaaatattaactgtaaaattgtgagtacataaactataaagacttgaatttttacctgcagttactacatcatgaaatcaaagactctgtacacattgtttaatttacttctttaagttgtgataaattttcatgaggttggcaagaaagagtcatctgtggttttgtaaatttaaagattcatcagctattaaatgactaactataatcatgtttttatttcttcattcaattctatcattttgatctatgtactttgaagaaaaggaattgtggagaaaaatgtttataaatattaaatacattttcatgattgattataattcacaatattttccttgggtaattttctttgatttatttttattttactttataaattctcattatagccttaaactatctataagatcagcttattgtagacatttttattgttttttaaacagttacatttggacattttagattgcccagtttagacattcatatttaagctaaaatgaattaattgaaatagtatcttctttttctgtatgtttaaatttaaatataaatattaatttgtattttagtgatactattgcaactttatgttatttcagattgaacatactttacacttctaagtgttacatatcaattcaactatattgttaaactaatcacaataatttaattttgctttatttttcagcttgttcacaaaagttatttacatttcaaaaaaagaaacaagaaattttttgtattttatttatttctcaattttagggtgaattgaaaaatattaaatgtttctttttcattcacctattagagaaaaatacaaaaaaactgaattattttttatatggatagttttgtctttatcctattctatttaaccaaattcaatgtaaactcactgagtgaatgaattagttttactaccaagaaaatctgattctagatttgttatatatactaaccatataattaaaacattgctagggtgcatcgtggttttatataggaaacatgaggaacacactggtaatagacaaggtagcacaaatacctacacattattaactgtggtatgcctgaaaccaaaacaggaaaagatattagctttctttgttagatgcatgcatacatttgagataaaatttcaacatgctttattcaaatattcattgaaattttatattactgttgtttttccatatatatgcaaaacttgtaatgatcataaatagggatataatacataaacctcattttattcttattaggaaaataaaaccacataaattttgcagtttaaatgcaatatatgggaagttattgactatatgggtataaagcaatagtttctattagcaatttgaggtgataaatatcagacattaaaatatcatggaaataaactgaatctaagcatcttcaggatgagaaatcccactatattgtttgatttgctaccaatcaggttcctgtaatctttttatttacactaacaaccataataatttgtatataatagagttcaattttgaatttatgtgtctaatcaatacaataatattaagtgtggttgtttgaataggaaggggccctatgaactctcagatttgaatggtttgttgctagtgaatggcattattaggaggcatggccttgttagaataggtgtggtcttgttgaagtaggtgtagtcttgttgaaggaagtgtgatacagaggatgggctttgaattttcagaagcttaaaccaagtgtaggggctcactaattttgctgcctgctaatcttcatgtagaactcttagctccttctccagcatcatgtctgtctgactcctgccgtgcttcttgacatgatggactaaacccatgaactgtaagggaaccccaatgaaatattttccttcgtaattgttaccatggtcacattgtctcttaacagaaacagaaactttaagtaagacactaaagcactggttgtcaacctgtgggtcacaatccctttgggggggaaaaatgacattttcacaggggtcacctaagaccatcacaaaacaaaggcatttacattataatttgtagcagtagcaaaatacagtaagggaatagcaacaaaaaattttttttgtgttgggggatcaccaatgtgaggagctgtattaaagggtcatagaaccatgaagagtgagaaccattgcaccagaagtatttatttcatacttagaagggacaaaggggcattattttttatttctttatgatttaactagtatcttgtaactgttttcataattgcctccattatcatctcttgcccttctcttactcttactacctccttttatcccaggtagtcaccaacctgcatctatgtcattttgtacatgcaggtcttgtgaagatggtcacggccacaggtgtgatgtcttcatgattacaatgtccaatttatatcgcccaaacagcatttcataattctcttctctattctctacctcttaaataaggcttaggaagcagatcagacactatctcacttggcaaaacatcagtagtacatgattaataatggttaaatgtgataaaccagtttggagttgaaaagttcaaatcacaaatactgagaagtggcatcgaggcttataatcatgccccaaaatctaaattacaaattttgctatcagataccaatgaacacataatatttttaacaatgtattatagtttttcctcaaataataaggaaatcaacaatatgtgttgcttctttcctgtcagtctcagtaggagctctaattctatcttcctcagctttggaaccatactgcaattatcaatttccctagtttttagactttcttgggtcaatactttgcaaaccaaacatcatgaaactgcttagctgtagatagaagttttctgtcctgcctggtcccacagctgtttaatcccaaataaacacacagagtcttatatcaattataaactgtttggccgatgacccaggcattttattggctggcccttttcttaattattaacatatttctatcaaactgtgtattgccacaaggctgtggcttacctgtaattctctggcatgttactcctttggcagctgcatggtgttcctctggcaactctctgtttttcttcccaggatctggtctggtagctctgactatacttctttcctggttacatcctgcctgtccagtggccataacagttttatttaccaaataatatagaaacatatatccaaagcatacagagaaaaggcctctagggctatagtagacaaggcaatttgagcctggtgatgagaaaggttgtagaaacatgtgcatgcagaaaggtccatgattaacatgtctgtgtggttctctgaacagatttgacattctgccatgaggagagtccaatgtgatttcaggttaaaactgtaatctgtacaaccatggagttcttttacctcatccttttgattcagtggcatagatgaagttcagaaagtctctgcaaaatgccaatggaaactgtaagtaaaagtgagtaattatctaccttagtatcaaatgtagttgtttaaaaaatgcccaagtattcatgttttaaaatttcgtgcttttcctgtatttgtttggctaccatagatcttatggatttgcataaagaatgtttttgtaaaaagtcctttatattggtgtctcaattacattagttttcacatttccattttaccaagaaaatccttaacaaatcctgagaaactaaaggtgcagagtttcaactttccacatacatgaaaaggctggtaatgtgtgtctagttccagtgatatatatgatttaaaagtctcaccacctaattaacttttaatgaaaataaaatttctaagaatccccttgtattttcaggtggtatcagtcaatagcattgttccagttgtttatcctttactaattaggtaggtcttcagtgttctcattcactctcctatcagtgggttcttttattttggacatagtcttcctattagcattattttgtggttaacaatctctgaagagcagaaatattctatagacactaatatacagatccatcactatctgctatgttaatgtatcagggactctggagggttgactaatctcacatataagtctcttgagctgttattgaattaaatcatataggcactaatttcaacataaatcttccccatccccactccttctgtcctataactataccagtgagtaagcacatgttttcctccaatttattgccaaaactcttcaccccacagatttttcccccaatacaggcctacactgcttaaagaataagaaaaataaatattaaatgatacatgaaacctattgtaaatcaaatatatagtccttttttacacatcagttctcttaagttttagtctttgaaagattaaaatgtcataatcatagaaatttaatgacttccataagactaattgggaactccagagtaacatataataaagtaatagaaaataatgattttcatgacttttacatcttaaagccatatatggatttttaaaatgttttagagactcacatattgtcttttagttccagacctttctttattctctgagagttaattgtatttcctatatattccacaaatgtcaaactactcaagattaattatttaaattatgtattatttatttagggaggaagagatgagaaattctttttatctaaattctttaaaaaagtagtgtcattgaataattggtttaacattttgtcaactttaacagaggtaaaatgtacagacattcttagtcacaatagtaaaatgtcatggcaccatacttggatctattatattcattattattagaatttagggggtagtgagaggtgggatagaaaggagtgtgaaagcctatggaattcatgtgtagttttaaaaataaattacaaagttgtttttttctttgctactgttcaaacattgagaagagcaaatagcttatattttgaatgctttatattttgaaacagaaactagatgggcctgggcttgaaggcaaagtcctataatcccagtgcagaagaggctaacacagggagaaagatcaatgtttattcttatttttattttgtttatacaaccatcattggttgtgtgtaatgcatttgagccatgtgtcacaccatataagtttgggaatgaagaactgtatactctttgttctatagtgatttgtagttagcttggacttaggagtgctctaggacctacgcaattttctgttgccttaacattgcggtatttgcagtgtgactagactagagatgataatggtcaaagctggaacttctgggaactggcaaggtttgaatttttctattttgttttaatggttttgaagggcgtaattgaagtcatgacccctcatttgccaagcccatgccctcctatggctgtgcccacagtgtcaaggaggggaagctacaaagcatcacagaatcacaagcagattacagggacaggtcctcataacaggtacatattctaagtgaaaggtaggtgagaactacagcaacacacggtgtctacactagagatgttcaagcacattagaagaagctttgagtcacccagcaataagttagctggattagctgaagacttactgaggacaaagaggaagggagtaggacacagaaactatgaatctaatcaatgaccacactattccaagctgatttcttcttctttttcttccccccacctcaccaccccatttcttttttcttttttttttttttcgagacagggtttccctgtggctttggaggctgtcctggaactagctcttgtagaacaggctggtctcaacctcacagagattcacctgcctctgcctccccagtgctgggattaaaggcatatgccaccaccgcctggttgatttcttcttgttttgcttttgaccttagatctgttatgatattcccattctgtacctaaacattcgcctccctctgagtgtttgtatttgcatacagtacaattattagaagatcatttttaagcctataattggcttattgtgtcttttatttaattaagtttttttcttacattatttttcccaactttttttatttgaattagaaacaggattattttacatgactatcccagttccgttctcccacctgtcctcccctacccccccaactagaaccttatctgtcacatatcttttctgctgcccctggatggtgaggccttccatagggtgtcatcagagtctttcgtatcctttgggatagggcctaggctcacccccgtgtgtcttggtgcagggagtattcctctatatggaatatgctcccaaagtccacctctgatctctcctctcccccaccccataagtttcctctgttaaaccattgactcacattgaataatagcacagattccttgactagtttttattatgtcacactaaaagaaagaatgggtttgttaccaaaggtaggagctgaaaaaagtgtttaaaaaaaaaaaaaactcattgtcacacaacaaataaaagacccagagactgatattggggttcaagtttcaagctgaagattaaaaaggaaagcagctggctgccagctcttacctctacctcagactgaaaggcaattctggctccaacaaacctcagactgcaatcccaaactatgatcctctcctcaacatggatggacaattttgaggctgactactgaagaccttgctcctatctttgttttttgtttttgttttttttcactttttatttactttttattttagaaataacctttttttacatatcaatccccccattccctcaccctccaatcctcccatgcccccacaacccacccacaaccaattacccaaggatagtgagggcttccaggggggataataaaagtctgtcacatcatttaggggagggactaagcactctttcaggtatctgggctgccatagtattccaccttagggaatgagcccacaaaattcatttgtgaactaaggataaacactggatccattgttagaagtctctcagacttcccaggcctcctatctagcactcacattcagagggcaaggttcggtccaatgctggttacccagccttatgactagtatctccatgctctcactgggtcaggtcaactgtttctgtgagtttctccaacatggtcttggctccctttagtcatggcttccccctctctacaactagattccagtagtatggctcagtgtgtagctctgggtgtcttcttctgctttgatcagctacctgatgaaggctataggatggcaaccaaggtagacatcaatctcagtataggggaagggcattaaaggaagtgtctccactattgcctggattcttagttggggtcatccctgtgtatccttgaacttttccctagtgccagacctctctcccaaactatattgactcctctatcaatgtagtgcctttcttgctctcctctattcctccgctgtctctgtcttcctgatccctcttgctctccttccccatcctcttctccacttctatttttccgacctgcctcttgtctccccccatgctcccaatttgctcaaggtatgtttttgctttcccctctttcagggactgtgtatttttattggggggtcctccttatttcctagtttctctgatggtgtggattgtagacaggtagtctttggctctttgactaatatccatatatgagtgagtacataccatgcttgtctttctgtgattgggttacctcactcagggtgttttgttcccattccatctatctcctgtgaatttcaagatttcattgttgttttttttttctggtgagcaatactctattgtataaatatagcacattttctccatccattcattgcttgaggagcatttaggttacttccaggttctggctattgcaaacaaggctgctatgaacatatatccttgttgtgtaattgtgcatatttgggtatatgctcaaaagtacagttgctggatcttgaggtagactgattcccattttcctgagaaaatgccatacttgtttccaaagtggtcatacatctttgaattcccatcagcaatggaggagtgatactttttccccacaccctttccagaagagaccttcattggtgtttttgattttagccattctgaccagtgtaagatggtatcacagagttgttttgagttgcatttcctgtatggctaaggatgttaagcactttcttgtgccttttagccattttagattcctctatggagaaatctctatatagttctgtatcacacttttaaattggagtatatggtgttttggtggctatcttcttgggttttttgtatattttggaaatcaatcctctttcagatgtggggttgaatatcttttcccattctgtgggctgcctttttgtcttgttgactgtgtcctttgtcttacaaaagcttttcagtttcaggaggtcccatttattaattgtccacctcatgtctgtgctactgtgctactgtttttatattcaggaagcggcctaatgtacaaaatttttcaagggtactcccccacactttctctactaagaggttcagtgtggctggatgtattttgagttctttgatccatgtggacgtaagatttgtgcatggcataaatatggatctatctcagtcttctacatgtcagcatccagccttgccagcaccatttgttgaagaggcttccttttaatttccattgtaaaacttcagattctttctcaaagatcaggtgtatgtaggtatgtgggttaatatcagggttttcaaagtgattccattggtctctctgtctattttgatgccaataccaagatgttttcaggactatagctctacaatagagcttgaagtcagggacagtgatgcctccggaaattcctttattgttcagggttgttttggctatcctgggtcttttctttttacatataaagtttagtattgttctttaaaggtctgtgaaaaattgtgttgggatttttatggggattgcattgaatctgtagattgcttttagcgagattgtcatttttactatgttgatactacctatccaagatcatggaagatctttccattttctggtaccttctttaatttctttctataaagattcaaagttcttgctaaagaagtatttcacttctttgtttagcattaccccaagatattttctgttgtttgtagctattgtaaagggtgatgtttctctgatttctttctcagtccatttatagtctgtatatagtagggccattgattttttttttttgagttaatcttgtatcctgccacattgctaaagatgtttgtcagctgtaggagttccatggtagattatttcaggtcacttgtgtaaactatcatgtcatctgcaaatagtgaaagtttgacttcttcctttccaatttgtatcctcttgatccccttttgttgtcttattgctctagctagaacttccagtacaatattgaagaaatactgagggattggacagccttgtcttgttcctgattttggaggaatcatgttgagttcctctccatatagtttgatcatggctgttggtttgctatatattgcttttattgtgtttatttatgttcctgttactcctgatctctccaaaacctttaacctgaaggtgtgttgtattttgccaaaggctttttcagcatctagtgagatgatcatgtggttttaattttgcagtttgtttatatggtggattatattgatggatttttgtatgttgtaccatccctgcatccctgggaaaaagcctacttgatcatagtggatgacttttctgatgtattcttggattcaatttgccagtattttgttgagtactttttcatcaatgttcatgaggtatattggtctgtagttctctttcttagttgtgtctttctgtgacttggttaccaaagtaattgtagcctagtaaaaagagtatggcaatgacccttctgtatctattgtgtggatcagtttaaggggtattggtaatagctcttctttgaatttctggtagaattctgcactgaaaccatctggccctaggcttgtttttggttgggagacatttgatgactgcttctatttcattaggggttataggtctatttaaattgctatatgttttgatttaatttgctaaatgatatctatccagaaaattgtccatttcctttagatttttgaattttttgaaatacaagatttcaaagtatgacctgatgtttctctggatttcctctttgtctgttgttatgtccccctttttatttctgattgtgttaattaccatgctctctctgccttttggttagtttgggtaaacatttatctatcttgttgatttctcaaagaaccaattccgtgttacattgattctttctattgttttctttgtttctaattgatagatttctgtcctcaatatgattatttcctggtgtctactcctctggtgtgagtttgcttctttttgttctagagccttcacttgtgatgttaattctctagtgtgacaaatctccagttacttcatgtgggttcttagtgctatgaacttttctcttagcactgctttctaagtgtctaataagtttgggtatgttgtgtcttcattctcattgagttctaggaagtacttaatttcttttttatttattcttccttaacccaggaatggtgcaattgtgtgttgttcaatttccatgagtttattggttttctgcaatttgtgttgctgttgaattctaactttaaatcatggtggtccgataagatagagagggttatttcattttttatacatgttgaggtcttcgatgtagcagttattcattcaattgtagagaagttttcatggggtactgaaaagaaggtatattcttttgtatttggatggaatgttctatagatgtctgttaaactcaatttggtcataacttttattagttcctttgtttctttgttaagtttctgtctggtggtcctgtctagtagtgaaagtggggtgttgaagactcccactataagtgtgtgaggttttatgtgtgatttgagctttagtaatgtgtctttaagaatgtgtgttccttcatatttggggcatagatgtacagaattaagacttcatcctgatggacttttcctgtgatgaatatgaaatgaccttctccatatcttttcattaattgtaatgtgaaatctaactcattagatataaggattgctacaccagcttgtttcttgtgtccatttgattggaaactcttgtcctaacctttttctctgaggtaatgtgtgtctttgatattgatatgtgtttcttggaatcagcagaagggtggattatgtctttgtatccattctcttatcctgtgtctttttataggcaagttaagatcattgacaatgagggatattaatgaccattgattgtttattcatgtttgttttggatttggtggtggtggtggtggtattgtgtgtgtattcccactccccctttttctttttgattctggtaaagtgagactatctattgcctatgttttgtgagtttagttatcttccttgggttagagttttctttccaatattttctgtagggctggatttgtggatatgtgttgtttaaatctggttttgtcatggaatatcttgttttctctatctttagtgattgaaaactttgctgggtatactagtctatgatgatgtccatggtctcttagtgtttgtagaacatctatccaggacaattctagcttttagcgtttccattgagaagtcacatgtaattctgatgtctgtctttatatcttacttggcctttttcctttgctgctctttcataggcatatcattctttaatttggggaagttttcttctatgattttgttgaatacgttttccttacccttgagctgtatttcttcactttcttccatacccattattcttaggtttggtcttttcacggtatcccatatttcctggatgtgttgtgttagggatttgttggacttgagattctctttggtcaacgactgtatttcctctgggtcttcacacctgagatgctttcttctatcttttatattctattggttatacttccttctttagatcctgattgtttacccagcttttcaatttccagcatgcctccttctgtgttttattttttctgtttccactttcaagccttgaactgtttcaattgtttccttcacttgtttgcctgttttttcttggctttctttgcattctttaagggatttgtttatttcttgaaattttgtttgtcttttcttccatttcctgtaattttttttgtttttctttcatttctttaagttattttccaatttcctctctgagggtctctattatcttcataaagttgtttttaatgtccttctcttctgctccatgtgccttgggatgttcaggtctgatgtagagttccttgattctggtggtgtcatattggtctttctgttgttgagtgtgttcttatactattgtcttcccatatccttctcctcttgtcttctggtgacataggtgggccaagactttgaggtcttgcaagtctggatggtccggcctccactggttttctcctcactcaagcacagggtatagggggggcaacactcaagtggagggcagagggcagagggtggagtggtggccaagactaaggtgtggtcagacaccaggtagtccatcctgccaggattgctccactacatgccaaggaggcccagggagatccatgaggcaggtagtaggctttttgccccagcagaggccacactcacctcaagcagaggatggagggtggccatgctcctattgtttatatctctctagagctggagttaaaggcacatagccctgggtggccttgacttcagagtaatccatctgccattgtctcttgagtcctaggattaatggcgtgtaccatccctgcctgatctcaacagcttgaggctgaccttattttcggaatcctcaggcaggctttaataaataaattgtaaataatataccaccataattcatgtcaatttttacattttttttttacttttgagaatttcctctgtaagtactgtgtttttatcacttcctccaccacttctccctccagtttctttcacattgccttccacatttatgatttcttctttagatattattgttattcttgttcatatgttcatgtgtttagagctgaccagttcagattagataatatattaaggagctcatttctggggaaagctttttctccctctcttatcagccttgactgtctatagatttttgtctaggggtagtaccttgtgacagagagtcagaacttgtgagaaggaatagaataagtgattgtggaatgcttagaccaaaatagtatagctacatcacccaaaccttgagtcatatcacagaagatgggatggaaaccattccaagattcagaaggccaaaatgcccactgctatatattgtcttgtagacctcacatggtaactgttcccatgaagtctcaacaatgtgattgcctatgcatgacatgcatgacaacacaatattatatttcatacttgcaaagagctgtgttgtattataaatacctgaaatcattgttctcattcttaagaaaatttacctcccatgtttttggtcatttaagagaataaaagagctgcactgctaaatggtgaagaaatctgccaggagagaatgaaatgtacaagagaggaaagaagtactagacaaagttgcagaaatggccctgggtcaaaagaactagaaaaaagaagcaacccattttccaaagctagtgaaatacaggtatcacactgctatgttttattttctgtcagttatttgcagcttttatatcttcctaactatatcatcagcttctcttttctcaaagaggttgactgtcctgtctaagtcaaaaagtatgggataagtgagagacagagagacagagagatagagagacatacagagagagacagagagagaagccatattttaccaacagaaatgcttgtctctagagccatattttatgcaactgttgcattataactggctctgtactctttatgacatgatgttataaaatatgtattagtacattcagttccttttttaaaaataacaccagtagcacagacactgagattgacaattaataagtaggacctctgaaagtgagaatattctgtaaggcaaaggacacagtgaacaagacaaaattgcagcccacagaatgagaaaagatattcactaaccctacatctgacagaaggatgatttccaaaatatacaaagaactcaagaagctagtcaccaaaacaccaaataatccaattaaaaagtgggggtacaaaacagaaatttcaatagaggaacctaaaatggctgaaagacacataagaaagtggttaacatccttagccataagggaaatgcaaatcaaaataactctgagataccatgttgcttctgtgagaatggctaaaatcaaaaccactaaggacagtttatgatggaaaggatgtggagaaaggggaacactcctccactgctggtgggagtgcaaactcatatagccactttggaaatcagtatggctgttccacaggaaaatgggaatcagtctcccacaagatccagcaagagactgtattctgaagatgtggctttattagaaaagcagtctgtctctataacttcacgttgagaaagcaggggtagcacaggggaatttggggaaagtcaaaggaggtcttggaaggagggagatgggatgacttagttaagcaatgagcttgccaaggaaaggaaatgctgttcctgtgattgagctgtattggcagagtgcttgggaatgggcatctgaagacagaatacaacagctgcacattctgtgtgtgcttcattagtatttaggcacttgtactggcctgcctttggagttctgataagagatggcctttcctgctgtgactaagagtacctcttcaatatgttcccatttaaatgggccctgcccacctcccatctctctatctttaattccctccatctctctgtctgtctgtccatccccctctctctccttctcttctctctttcctccctggaggtctgtctccccacaccccttttccctttttatgattcctttacctaaataataattaaaaaactgtccacttgaagtctgttgcatgcagtcttcctctctgaagacactttttaaaaattacaatatgcttgattctgtaattgtgatatttttacattttaatcatatgctgtaagcatacaattgttacaataataaaacccagatgaacaattacctaatcaagtctctcttagtcacatctcaatctgtaccttgttgtacttactaggtttagaaaccaatagcctatatttcctctttctcttccacctattgggcaattaatcaatattaatataattcatgcaaatacacacatgaatatttttaaataatttcttctaatgccaacaatgtgaactcttttctgtgaatgtttgagaatttgagtatctgaaatattaacaaaaatagccaaaagcaaagagctgataaatatgtttagttttaacttaaatcttattttctacaaattgtaaaattgattttattctgctgagagaattaccagagtacaatttgttcaactacattaaagtaataattcaatcgctatttgagaaacttctctgcacagagctctgtggcaagggctatttggaggggaatattctttctattctgtgaggcaaaggggctctgtgaaagtaaaacatgccaaagtgtgcacatctttagttactgtcaccaagattataacaaagatacactgacaattcgcccagcaaccatctctgttgaaagaaagtcaaggatacagaagaatagttggtttgcttataaagcaacagcaagatattgacagagaataagtaatcatgcatataaggacaacaaaccaatcagagaattgacaactttgagcacatggccaagaaggtggtggccatgacgacttgacaggggaggcagtggtgttcttagaaattagagggagtaaagagtgatctaatgcccagtgacggaataggtgactttcattaagaacaatattttatgtttatattttgtcttctttttaatttcaaatttcaccatgaaaagtttttaatatcaagcaactaaacatccctgcagaactcaaaactttaaattttgaggagaaagtatatcttgatatctctactagcttaactaagaaaagatctctgaaatacacctgagaaacaaaggtcaactttacctggtaagaactttaccacctatttcaccgaagatattagctttctttcggcttcattgacattggctttcatagacttgctcaaatacccaagcacacacagatacacagagaaacacagagacacatatagacacacacacacacacacacacacacacacacacacacacacacacaaacgtacactcacagagagaggacagagagacagacacagacacacaaacacatgcatataagcacatatagacaccctgacagacatacatgcacatgcacatacacacatatatgcatacataaacaatatacatatatagatatatgtatatatacatacatacacacagtaaaaaaacgtgtgcgtgcacacacacgcacatgcacatgcacacgtacacacacacacaaacacacacacacacacacacacacgccaacttgtacacagttatacctcgggacttttcctctgcctctaactttttccagaaatcctgtcccctgagttatccccatgcttaaagtttctttgtagtctttggtcaaacctcaacattccatgttgccctttatgaagcctcagccttagaaacattacattagaaatcttgttttgtctacttttaatttttcattgtagtatatacaggttcctcacatatgtgataacttatttgtagtatatactcttatatttcagtctgtctcttgctataatataaactccaagacagcaaagatctgtgaattttcattctgtcaatcttgtgagtattaaaatcaacaaaattttcaagtggagttaattgatgtctcctattcactctgtgtttgtttgctcttatttaataaatcaacaatgacacctacaaacaaacattgctgcgtatgtttaaaatgcttcttagattcatgcatgtagttagcttggatgcattttgtgtgtggagtgagggaatgatgtatgttttcttcattgactctcatttgtattgagaaaattatatttttagtatttagtgaaactgcagtccaggttgtagttgggaattcttggaactgagctcaatttctctggaagagcatcctgtgctcttaagctctgagcgctctctgtaatcctagacatttagcctcagctgggacatcttccattgatgcagtttcattaatgcaattaatggcaccttttcattctccacttacccaccctatccaccttttatttgatgtaacacatgtgagttgttaaatccatttatttctgtctcagtttccattcttgagtgaatgtttgatgataagagcatgaattatttcttcatccttactcagttaatctgcccttttttcaaattatcctcttgtgctggtccatatcctttaaaaacatcatttctattaataacttatccatctttgtaattaattagtattttggtaaatgactgtatcagctaatgaaagacctctcaagacaagtatggccaccattctcccttacaataaaaccttgtggaaaatcaaaatttacatttcaagatctatttgctttcatattgtgagatacatttttcaagatgaattttgtttggaacagggctttggggaaagatttccctccaaatgacggaaatgtcaaatggaaattttcattatgtctgccatcatcttatccaggaatctcagaacagtttattaatggaagctgtagattttcctagtgtgccctttggggtgatttgattctatcagaaggatatggcatatataaactttcagacatttcctttgaggagctttaaaactaagctttcatgaaaataattttaaagtccatgggtatgacttcatggttgcagcaccttgcaattccaatattgttaatgcattatcattgagcttaatactcactgcaacaggagaaataagtgaatagaagaaatttatctagatatataaagaattttacaataaaattcaatgttgcaaaacagttttcatgaatagtagcagctttgggacaattaaacagtattttaggtaactgttttaaacaaatccacagtatttagtgaagttcttgtagtttttaaagtttcagagtatcaatatatagcattacttcagcagcccctctctcattctctctatcttcccttataccttgctccctccctctctcttagaatttctccagcacttctatccagcataatgttctaatgagactgatccaggtaccatccctgactaggttaaccagtgaggaaaagacagctgccagtgtgagttaaaaatattttctcactttccatgtgggggttctggaaaagcacattcaacacaaggtcagcaaaaacacttctgaggttcacagttcattggggaaatcagcagaagggctggctgcagctggaacatatgcaaattatcttggcatcagttgcagtttctgccatggggtatctctgggttgcctctattaaaaatgcatcaggttcaagcactcacctttaccttgtgtacccagaaggccactccagggattcagaggagaccgtgtcaaggataatgagagggcacctgggaaggagcacctcatcaggacttgtgttctgttcaatagtgatgcccagggtgttggttatttcttttcttagatgccacatacccttacagtaattatgaacaacatgctttttatcatgttactgagatacaccttcccaaactaaatttatctgctctgtagagtatcttggattatctgtctgtctgtctgtctgtctgtctatctatctatctatttatctatctatctggagttatctggagtcattcatttattttgggtacttgaattctgataaatttacaaaaattcatgtaaaatgaattgataaactgtatataaaagcacctcagaggcctttctattttgaggactgcaaatattaagcacatgtttaaaacaaaatgagaggatgaaactgtttatgttctttgtagtaagacagctgtataaaaaattggtttctccaagtatttatccctagtgcatgaatgggctttgggagcctatcccctatgtaaggatattctcttagcctagatacatggcagaaggctttggtactaacccaaatgatgtgacagactttgatgagcccccataggaggcctcaccctccctgaggagtggataggtgtcagatggggtttgtaggggaaaatgggaggacaggagggagagggaactgggattgttatgtaaaataaggtttttttaatttaaataaaaattaataaaacttggtttctcaatacagcagcctaggtttatggatgctaaataatctagtttgtccccgtactgttggttttcatcatttgttggagagaaaggaatccaacaatgaaataaaagaaaactagtaaacttctaagcattggtgatttccataggatgattccacaaagtaagcaccaaatgtcctgacaaaatgatgtatgattttccgcatcataaaatgctttatttttatcaccatgcaatgaagaaggtgtccaattagggctctgaaggaattaagtttatacaaacagtatctctaagtacagcagaaagcaaacctagttttataacatactgaccagatccagcacagttccaattcagtgtgcacagtggctggaaatggcataggctcttgccagatcttggctgccgtgttgtattgtgatgaagctgacttcgtcctatgtgtttccacacatagaaattcatcgaatacaaactcttgtctctaattgaacagctattgtatgcctttcccttaattttttttttttgctttttgtcaatttatggagtgtatcagtagtatgtaaatgcatccctgttattgtatgtatacagtgttggtgtgtgtgtaccttgctgggctgagtgcccagaagaatcttcagtttcttagacatccagatgatagaccaggtaaccagtgaacttagatactgtgaccgcagccatgagagctctctgtacagggtcaagcactgcagctccttcatgtcactgatggcaatggagtgtcccaaaacacactaacaaaaccactgcttgaaatatctcacccatatgaacctttccccattctagtcataaattttcttacctctctaaatttagctaaacaaaatgcccagattctaaagagatatttagtaacacgctgcatctcattttaagagctaggtcacctttgtcatggggaaagttccagaaaattgtgtcacttttcaggtggacccagatgggcactgtgtccatgttcaagggttccatgctatttttggccagcaacaatgaagtaattcccctaggtaagaacttcagggtcttcatccctttctgtaacatatggtttttgttttggccttatgatgttctgtggcgtaagctttttcacaggctactatgggtaattttatagcagagtgggggggtagttaggtcactgagtttgccccaattatgtctcagaaagagtatgccatctgtgcaaactatgaaaggatgctattgaaatctgtggcttttcattctactatcacatggtttcatgctgggatgtatatgctgaagtaagagtgtgcttagctctacagattttggcaagatacattcagaaacatttacagtaaactggaatgtgtgttgaaatcagagacaggtaatgaaatgagaagttattgcaaacagcgcatgtaatacccaagtaatttgagggaataaaagttcggtgcttctcaatgtttacaacacaaacatgattgacatggatgtttattcttcttctttagtgtttggtttgatccaaccctaacatgaacttccataccaatttttcttccattatgtttaataaatacattccaatatgttgtaaatagtgtgttgtttatttttgtacttagataacatatatccaaatgttgtctttttcttcatatattccaaagatatttcatgatttttcttctctgtgtctttctagcatgcatacaatgagggagagagaagtggagggagataaggaaagatgagactctggaaaggaatgcagtgacaaagggtaggctttatgcttcgtggtgtaaagggcagagtttgctttagtgactcaataggaaactagcaaatgaatgtatagaaaactataggttgataagatacaaataggctaaaggtatataatgttctagacccatagttcctacttcatactgagtataaacacactgatgttgccttgtatgatctatgatagccatgcatttagttttgaatcagtgaatgcattatgtctgtagcaagccataataaaagaataaatcgcaagagactgttgaaagtatataagtaatagatatatgacaggtagatacatagatacagaatagatagctggtagacagagaggaataaaggtagatgatagataaatagatgataaattatagagatagatagatagatagatagatagagaagcagataacaaaaaagcatcatctgtattgtctaattgcatgctcacaacatccagtagaaaccaacagaagaagcacttttaaagtagcctcctggagggctggagagatggctcagtggttaagagcactgactgctcttccagaggtcctgagttcaattcccagtaaccacatggtggctcacaaaaaaccgttataagatctggtgccctcttctggtgtgcagatgtacatggaagcagaatattgtatacataataaataaataaataaaatttttaagaaaaaaaagtagcctcctggagggctggagagatggctcagtggttaagagcactgactgctcttccagaggtcctgagttcaattcccagtaaccacatggtggctcacaaaaaaccgttataagatctggtgccctcttctggtgtgcagatgtacatggaagcagaatattgtatacataataaataaataaataaaatttttaagaaaaaaaagtagcctcctggactcccaatctagaaagtccagagcagagcaaaacatcgccttcagtatgacttccaagtaaatgtacaaataactacggaaaggtgatatcatcaaattgagggcttaaaacatccagtagaaaactgagggctctctggctggctgccttggtgaggtttcctcagttggtttctaatggatgttttaagcattcggtttgatgatgtcacctttctgcagtgtattgtgttgttgttcatttacatggaagccttacccaaagggatcttttgctctgctatggattttctagattgggaagtccagaagggtactaaagggacttctgttgatttcttctggatattgtgagtaacccaattagatgacccttttgtgttacctgcttatctacctacctacctacctacctacctacctaactacctatatcttccatttatgtgtctattatctacctttctttctgtctgtctatcagctatctatcctgtatctatatatctgcctatcatatatctgtcactcatctatcatctatctatctcttcctggtagagagtcttaggtgagcagagtgtctccttagataatgcttcaaactagaaaaacagataccaacacagagaaataaaatcattaaactggattcccacaacatttagcagagcccttctatggaggttgaggcagtcagctggggtttctttcaaacattctctacatggatgagcttcatatggctaaccttctggcttttccttctcactaaaggagtttttatatcatgggtttaacaataggaatctctgttggaaatgctccatcttcttgctgttcacaaggagacagtgtttttgttttggggctcttttgctgttttagagagtattggagtacatcacatacacaatttgaagaaaaaaataaatacaatttttaaagcttcaatacttttggttttatattttactgagacaaagattaggtctcttctatttagcattgtaaaaatgtccactttctttttagatcatatgtggcatttgccctatgtgtctatttctataaaacaaattcatttcatgaaaagaatgtaggctttagagacagacatccataattcaaaattaatctgctacttaagtgtgtggctctgggcaaatgttctcatcacccaaagttttattttccccatttctaaaataaaaataatagcaattaatttccaatgataattataataattcaatagaacaatagcaaaggcctcctcaaatagaggtttgtgggtgtaaaacactggtaaatttggctattattatgaacaagaatactaatagacatagcctaggccagatcagatataattttttttaaaaaacatatgaataaacaaaagtctcaaccctgtcaaatatgtgtcctacaaggatgttaaagttgactggctgagaggttcaaatagtaaaatacatgaaaaagacacaaatgctcaactccagcaaatacatgaaggttggaaaacagctgacaggaaattcatagcaataccctgtttttaagttaattacttatctattttctttatgttccttactgaatagtctctggtgtgtatgtttttctgagataattgaaattcttacaggtcacttattttgaattttgatgtggtactatcacataaattatgttattatttttattactatatagtatttttatttttggtgtgaatgtcaatgaccatggtgtaagtcatctgtttcactaaaaccctgacagggagcacttgaatatttggatatcatttagaaattctgagtgtcattgttgagggttcagccaacatggtgtaatggccaagaaggaagggctattagcnnnnnnnnnnnnnnnnnnnnnnnnnnnnnnnnnnnnnnnnnngagaaatgagagccatcagggtgaaagtgcagcaggagctcataagaaatttatctagatatttgaaatgctctttggctctagacacatgttatagttacttcagactttttgtcatctgattcattttaaaccatgactattgtaactgtaatattgaatgcattgtaatacacatagaaattaatgctacaatttttcataattttatgactttgatatcttaaaatttagcattccctatgtcatgacaatgtgtttaccacagcaaatctattttaaatcaattttgatagaactgaactcaaacaattgacagaaagggcaatagagtaagatatattataattttttggaaacaaaactagtagaaaggtgtagggagctgcagaaaaccgcacccaaaagatggcgccggtttccgccctccgccagcccgacggcgagcgctctctgtggtaaacaactccaaatttggtaaaggtcatgtatcctcttaattctgcttggagacaacctatcctgacgtgccacgtagggttaggtgattggtagatgtagactatatcaggccccgtctccctcgacccggggccgccgccattatacattgtacaaagcaaagaggttcccgattaaactgtgtttgaagaagattcctcggtgtggcgtctttcttgctggtcaagggtggacgccgcagaaaggtttgtgtcaaatagctgtgaaaggagtactgtgtgggttctggtcagggacaattgcacatcttgagtttaccattcagactctcttatcttcaaatatcaatgttctatgactgattcattgtatatgaaatgttcatttctttacaactatcgtagttattattattctgtgtctgggcacaggtaccacagagggcttgtggatgggaggacaatgtgagagacctggttctttgctgtcacattttgatcccaaagatagaaatcaggtcattgatcttgtgtggcaagtacttatatgtgagatcatcttgctggcactgaaatattaatttactctcagtatctggttgtaccttgtccaacaggagtttgaagtcaatggtccctcattcatatactcaacacttttcagaatgaacttctgtataaattaggaattgttgctgtaactagagatgcagaagcactgcctcaagggaaattatgattaaaatatgtacatatacaatgaattgtgacagaatgcttacattcttaatattgttgttaaatgtgctgtaacaacagagggtccaagagatctataagggttccagagacaaaggggcattcaaatttaaatgaaaattgagccaaaatatttcttttcttctgattctatatttagtcgcagaaaaacaaacttaacaatgtgaaacatgaatcaagctggttcatatctccaggaaacttaagtgcttagaaatttaaaaactagtaatatgaatcataaaagatgtgtttgtgatcaataggtctttttcccattgttcgtgattattgttttagttaaacatatttggatgacctttcatatagatgacatactaaaaaagggataaaagtggtgagacagactgagatacaagctgagcttctagaaaatgtgaaaaggaatatttttgagaaaagttttacttctgcagtgtagctgtttctcatacatgcatccttgcaattcaaaacctctgcagggatctggaaatcatagttgaccttgtgatttcaaagataattgttgatgacttagtgtcagcctttgttaggaaagattcttctcagaaatggaggaattgtgaaacacaggcttccaggttttcttctctgcatcccgagaaatagtgaggactgttgtcctcagtgtgtgtgtcctggtgttcatgcttctgttattgggaagtaatgaagagaatctatgagattctggcgctgtgaacatattacatggaagccaataaataccaagttaaatgctttcatttttcttgatgagtgaagatctgctctcccacatgatctcaggaggggtgtgcttcctaatcaaatagtcttaccgtgttctctatttctgcttttgattaagactatcagcccatcttagtcagtattccattgttgcgaagagacgcaatgaccatgggaactcttataacagaaaacatttaattgtgggcatgcttacagtttcagaggtttagtccattatcagtagagtgtggagcatggccatgtgcaggaatacatggtgctggaaaagtagctgaaggttctacatctgaatccaaaggcagcaggaagacagagacactggcactgacttgggctttgaaactcaaaacccagcctaaagtcacacaattcctgcaacagggcaacatctacttcaacaaagtcatacctcctaatccctcccaggtggtgccactccttgatgactaagcattccaatatatgagcctatagggcattcttattcaaaccaccccatagccttcctaccatttctcagatgcctctggcttctgtttatagatgcctaaatctaacatgagaaaattggggtgtccagcttcctgcattagtccactaatacctcttgtcgttttgactaacattttttactattttttatttttaattactcatatttgcacaccaatgggatttgctgaaggaggcagaggtaggaggatcatgaggtcaacgccagcctgggctacactaatacctcttaacccaaataaatgacatactgactatgacttttggtttacttgaaaaatgtggatacaatgatagtgccatctggcttccttctctgatggatgcaaggattaaaactgacagtccagaagtctcttctgtgcatccttccagtacctgctatttctataaataaaccacaagtcaacaattatcattatagactaataatccccaattgattctaatcacataacagtttacaatacttttgtgatgcttctgttttgcttttagcaaatatttttatgaagtggttattttcttgatttaagttgtaattgttttatataattttaaataattggcacaaaggttgatataataagatgtcataatttttaaaaataaaactattggacaagtttttgtgaaaaatttgacagatgtttatatttcctggcaatctgagggtaaataatgtttctcttggagatttcaaatttcatatcattcccataatattttgggatctcattcttctatcaggaattagaaccttgcaggctctgtctttggattgataaaattttgtaagggaaatgtccagctcagttgccctctgatgttgttactgactggctacataacatattatttataaactgtttggccgatggctagggcttcttactggctagttttctcttaaattttaacccatttatgttaaactatgtattgccacaaggctgtgtcttacccataatctagcatgttactccttgggcagcatgacgtctcttccatttatgtgtctattatctacctttctttctgtctgtctatcagctatctatcctgtatctatatatctgcctatcatatatctgtcactcatctatcatctatctatctcttcctggtagagagtcttaggtgagcagagtgtctccttagataatgcttcaaactagaaaaacagataccaacacagagaaataaaatcattaaactggattcccacaacatttagcagagcccttctatggaggttgaggcagtcagctggggtttctttcaaacattctctacatggatgagcttcatatggctaaccttctggcttttccttctcactaaaggagtttttatatcatgggtttaacaataggaatctctgttggaaatgctccatcttcttgctgttcaccattaccaacatcaccacaggtgagagagagaaggacgttaccaacatcaccacaggtgaattatcaaaaattccaaaactccaataacacagatttttttctcattctttcttctattagaacatttaagtgtatctgtatgctgtgaaattatagttagtggatggtttgttctgtgtctgaggtttctatgttcttcccacagtatggaaaatttatattggcatatcctgctcaattattttccctcaaccatgctcacactaataatgaacatctcaaagacattcattggtttttgtttacagttgtctttacctatggtgtatcctttgatgcttaaataacacaccccctcctgcatgctgttcacttttcctatatagatcttagtatattaatcatactacttagactccctgcctgatatttacaacacttgtatcataagtaaaccattatttggtatgcttttctctacaaagtgtgttcctattttaccttttcagatcctcccttgaaatatagacataatgtgcaaattctacaaatagcccaagtgtaaggatgcatgttatttgaggtattgtgaaaatgacaatttaaagttgtagacttgtttaatgattgctgtcaatgcaacttcagcacctttgttttggatcacagctgatttctggtctttcttcagaattctaactgaagtaatagatcttgtagttctttgtctgggatgtattgttagcatccagagaatttagatgtggagggatagtgtgaacaagaaaaggcttgtcttagttagggttactattgctgttatgaaacaccaggaatcaaaagcaaccttacattgcaccttggattgcagttcattgccgatagccaaggcagaaacccaaacttggcagaagagctgaggtttggcactgtgagagaccaaaagaggtcattaatgaaggtgcagactgagtagcagtataagctccaggattgaaaagaacatagagagaagttggagcttggtatcatggaaagaatccagtaaaggctattggtaaaagcacagctcagttgcagcaggaaatgccagtgccatgggatgtccttcaagatcaacaacagtggtagagtggagctggcttaagcttggaagacaagctgtgtgttctacagaggtcagagccagttaagtgaccccagccctttggaagagaccagaaaatcttgagtaaattccagcctttggaattttgttatttactcttggttttgttctgttcagatggtgatttactctagttcttccttttgaagtatgaaagtgttcaaaatatttttaattgtacaggatcccatgtctgagagaatttgaacattttaagtggttttatatttttaaagagactctggatttttaaagaaaataaataaaaggcagtgtttgtgacagagtgtgggatattttatgtttgtacaatgttttatattatgattttggtattaatgtgttatcttgataatgaacaagaaagaaaaggttgtggcttatttgtgacaagcatttcattatgctggcaagttttatgtcaatttgacacaagctaatgtcatcacagaggagaaaacctcagttgagataatgtctttataagatcaggctgtaccaagcctgtaggacattttttaaattagtgattgatggggagatcacatcctttggtgagtggtgccacccttgggatggtggccctaggtgctacaagaaaatgggtgagcaaaccatgaagaacaagtcagtaagctttattccttcatgcatttaataccactgtcacctgggagaattttatacattaccaagtttggctgcaagcacaaatccagtgtagccaccagtggaaaacagcatttgtgtcctgattctaaggaaacacctccaaaaagatttcatctcagtgattctcatctctccttgaacacccctaaattctccaactgaccagatcgagtgtcccagcaaaacaaaggctttaccatagtgattcatgtatcttgatagttgcagcagattcttcagccccagctaagcaaaaccacagatttttaacttaagatatgaaaatactcaaaggagtctttaactctacaaagtccttgcacaatcctgcacaaaacaatttaaaaaggcaggaacttacacagggcagcaattcaaacaggagccaggagctgatccagagtttttggcagggtgctgcttactggcttactccccatggtttgctctacctgctttcttatagaacccaggaccaccagtccaacggtggcaccacccacaattaactggatgcttccccatcaatcactaattaagacaatgccctacagctggatctatggagcatgtttctcaattgaggctccctgctttcagatatcttgtgccagtttgatacaaagttaaccagcacattaaccagttcaatgaatcttatcactaaaccaaatagtagagatcttgtatccaagggatgggcagactcacgtgtatctaatctcttgctacatctatttgtcagagcaaatatattcaagttcctccagatggataaataccatgcactctgaggcagtgaggtaataaagaatcttattacccagaagtgaagggattgaaatctaggaaacaaatgttcaaagtggtagttttacctcacacctggctcggccctccaatagagctctgtgggtttttttttgggggggggtatgagtgggtttgctaactatacaagattcctgaaagagaaagtcacaaaatttctagggaaccctgacaactgtgactactggagttttatattgtcatgctccgccattcttctctggcatttcgagttatcctaccagcattggctctagcagctttggctctattatgtcacacattccccaaaccagtgtctcctctagtccacactttttcctgattgtgtgtattcttcaaaccacagcttcactaggctttccttgtatcttgtgcttttcttcatcaaagggtaaaatggtaagtactaggttagttgcacaccagagatctagttgccttttgaatttggtcattatttccctcatatgcctgtcagcatttcaaggctttagaaaatggaggtatcttggaaatgaaagaactaagcaagagttgccaaaggccttgttgactatgcagtggtatgcagtaaacaataggtatgatagaaatgtatagacaaattaacggcagtttatctgggagatgattttaaagatgtgaaagacatttgtcaaatgaagaaagaggttttctaaaagaggctgtgtgctttgatgagccatgagtgctgaatggaacagataacttggaggcttcagttcttgggtttctctgatgatgatacagttcatgtaatctgaaaacattacaatagaaacaggatatgctgtgagtgctggacagaggagaaagattgtctctactcctctaagttctgtgtctgagctacaagtgatatcatcaccaaactaacagggaaagtacatttttattacaggactctcacaaaagtttatggctgaaagtagcatgaaaaataagacagggagtttgatcttggggttcaagcttcaagctgaagatcagaaaagcaaagcaccaactcttatctctacctcagaatgaaaggcgatcctggctccaccaaacctcagactgcaatcatagactgtgatgctttccccaacatggctggagaatcctgagactgagtctactgaagagcctgctcctatcttttatacctctctagtgctgggatgaactgtgtgtgataccaactgctaatatcatctttgtgtgagccgtttctcttagcactggatcaattttatgaagtcagtgtggccttgaactaacaaagatctgacacctcttaatcctatgtcctgggatgaaatgtgtgtgactggattctatgtcttgtggctgactttgctttctgaatcctcaggcaagctttaataaatcataaataatacatgtccacaactgaaagcaaagccaagttgctgaagctttaacagtacctggaactgttcaaatgagaaaggttattggactcctcaatgactgcaagatgagggtgaacaatatttggtgaaggaaggtcacatgatgcagggaagctcggcgtgctaagtagtttctaagcatccctctctcagatacaaatcctttcacaagcaaaggttctttattaatgtaaattttttctttaagaggacagttctgtagagctgtgctgcactgtattaaatgagcaccttgaagtaaacagaatctcagaggactacttgaaatggcatattttcgccgctgataatttcaaggtgatgtatcttgagccattgtacaaaatttgcttttgaaatatgtccttggagggtacggacacttgcatgaactttgtgtgtggcttttaaagtcatactttgtcatctgggttgagtttcatgaaactagacaggtgaattgtctggttctacaaaagctttgtgattgtgttacctcacaatagccaggtatgttagaaggaacataaggttttactgagagtcacctgggttaatgtacaaatggccactagcttattgtctaaatttaacataattcctatctaggccctgtgttcttcctctgtgatgggattatgttagtgatggtgctatatcgtgcctccctaacaccatattcaataatatctggaaaataatgtaaggataccaaaccactaagtctctctcctagataaagcacctttcagcatcaccatctcaatgtctcctgtgtcttctgtttcccgctacatattgacttaatgtgacatattatgtggctgtgtctttgcattttaggcttgcttacatgttgtcacccaagtactacagtccttcagatcacatcttctcttgatgtcattaaacattatttttcaacaactgtttttcatagtgctattttgttggctcactgtagtacaccttgacactgtgtttaatgtctgccttccttaccagtataagacactgaaattcaagagttatgtcaatatacatattggtcactcaaggcaccattctcatgcaagttgggcgtcaccctacagtctccctatgtctttctggggaacacttatctctccactatttacaaagaaaaattaaccttgttttcatgcatttaaccaggctagacaaacatatctaggtcctcatgttctattatgtctatggctgagtctaagatatacttagggattatgactttaagctcgtcaagacaaagattttccagcaccttgtagagtggggaatagcaatgtcacactgagtaactgagtaactgtgatctatcgtgcctaagtcttttatttggacatggctgatgctttagttaactaagccaactcagctggccggcgctttaatatattagtttaatttgcttactgtggttacctgaagttcctctggcagcaatgacagctgataatatttacaaaagtgcattacatcttgctttaatatgtagtggagtgtaactcactcacaaaggacctataatcctgactgaaggattcagaaacatcagtatttcatggttgaactctttccttagcttttctgcatgaaaactaaaaaataatgtagatttatataaatgtgaaaacttattatccctattatagtcacttggatcaaataaacattagttttacaacgaaataaacaataaattaatctgtgcttaactcaagtacagaaattttttattacaagaaacacaggtgagagagtccaccagacttgaattgaaaaattagtcaatgcttagtaatattatttttagacataattcttaagtagcagaaatatagaggaggaaactgttaaggttaaacatcaataggcactctatgtggtaagattcacttcatgaattgttttcttaatgttatctctaaagacaaattcattccaagatctgggatcacctaattgtagaaatttcaaatgagacacagtaaatgaattcctatggcttccagattcatttgtagaacacattattgagagaagtttgtcatacaaagaattgctgatagaaagccaaagcttacactttttacttggacaggaaaatcattaacagaagttgtcagaattcagaaaaatagaaagtatgtattgaacagatacagtatgagttgagactacatgaatgtggaatcttgcatggaaattataattcatgtacgatgttgagaaggcacagcttcttcataggtgggttctcacagtgctctctttagagaaataaagatcattatataatatcatgatttgaaattccttaaagttaagaaaattaggacagtgaggttcctaaatacaggcatgagaacgacattcagcacaggtaatgcaggaatagctgtgaaagaatagtgagctgttaagtgcagaaggcagggaatccagagagatgctccagggatatgaagagggtcctactggtacttccatttggcatatggaaacttcaactctatgttgttggagaaagaagcagcctcacataagacaagctacatgaggttatatgaggatacgatgagaccatgtttcccacagagccaaaaatgttcatgaatcacaaagtatttatcaaagtgttcagcaaggtttagtcagtgagaaacatgactactagccaaagacttggagctatccatgtaatgctttgaagaaatatcaacaaacaaacaaatctctgggaagtccacctggtttaattagatatcaaaataaaacacaatgttttgtgatatatgtgttttggaatgtgtgtgcaggttgaagaacatatttggggagtctgttctctcctttgacccttatgaaggcttcaggaactgaactctgaacatcaagcttcttcaggaaatggcattacccattgagcatctgactctcagtcattcttgctccagtaatgatatgggcaagaaaacaaaataaccttctagggagatggttcagtggctaaactgcttgaaatgaaagcataaagacccaacttcatgtccagaacccaagttaacagcaaatttccaagtttcttcagggataagagaggcacagtaagaaaaatcccaggaatcctgcaagccaggaaacctggcatagacagaagaaaataatacctattcaggcaactttcattatactcagtggattacaaacaaaaatatgacatggaagtaggagtggaacttatgggaagaaaacgggattcagtaagaaagggagagaaatgagtaagaggagagaggggagaaaaaagagtaaattcatcatacacagatatgagaaatccaaagaatgagtgtaaaattggaaaaaagtataaggcaaagatgtatgtttgttctctgatctcctcatgcttaccacagtgtacacatgtattcatacacacacaaaacatactagcatacacacatttattaacacagcacacacacatacacacacataaacacacctacacaaatgaaaattgcttagggacacaaccaccaactgaaagaagactgaaatataactgtaaaatcacctgtattcaatgatgtatataggaggatataagataaaaagtgagacaaactatacacaatagggagacatgtagttactaatttccaaagtaaatataattatttaacatagaaaagtaagtgatggtcagaagaccttcaaagatcaatatgtagaaataaaggcaaggagataaaacaaatgagaaaactgacatcaagaaaataagttagtaaatctggtctgagcaaaaggcaaagaaaaaggcagaagtactcctacagggaaaaatctttaaagagaaaatacaatagaatacaacattaaaactgcaattttaaaaatggttccagggccagatggtggtgatgcatgactttaatcccagcacttgggatgcagaggcaggtggatctctgtgagttcaagtcctgcctgatctacagagtgagttccaggatagccaggggtgttaaatagagaaatcctgtcttgaaaaaccaaataattgaatgaatgaatgaatgaatgaatgaatgaatgaatgaataagcaagctttcagaaaaaaaggctatgggaaatcatactttcattgttaattttcccaaagcttattttcagtacttcctctaaaacatttgtgtctgtcatactgagactctgtcagctcttgccttgtgtgacttgagcatacatgttcaatacaaggcccatccctggttctaatgattgcccacattaagatcaaatgcatttgtatatgtaaatacactttggctaacaaagaggatgaatgaattcccagtgtgttcatgataccagaataagaaacagtttacagaaattatgaaagtaatactagaaaatacacaaacgcactgtggccccagttacagcaggggtatgaatcttcctcccagtattagctagggtttaaggctttgggggcaggctatttttattccagcctgacatttcatgttgggagctagttctagaacaaggaaccagtttttaaacctaatccttaggtacccattactagacacaaacacaagaatctgtgattgaccttctccttcctacttctgagacacaataactaattctgttagaccttgctacactaaatttaacaagtgtacttctcaataagtttctttgttacatttagaagacagtatatagtgatgtctctgagtgatgatctatcttcatggttaaagcatgtatttttttccttgagataaatattgtaagactcaaaactcaaagtcaacaactcataattaaatgctcacatttctccacaaatatattgtatttacatatgccctcattcagttaaaatttttaaagctgattaacaagatttcacaaataagatttttctctcttacttgattgtgctttttgcccaacaactggcttatgaactagcttgtcacacaaaacagtagttgaagtctgagcatagtcccatcactcaatttcatgcacaacaaagtcataaaaatctctcagtacttcataagaaaaacaatatcctcaatccatattttgaaactgctttttaaaattatctttaccaattaagtgcagaggatttcatccatacattaagcagaaaaagcaatacaaatcattgcatttcatttccatcggtccaagtttgtaaccatcactgaaaaattcctctgtacttgctctgattacaaacttttgcctgtaattaaggttctaattgtcatgcagctgtttgtttacaggggtgtctcatggcctctagtggtgcattgcatgtgtgcattttgaagcaaaagcttacatttcccaagtaaatcactgaatagcagctgtatcagaggatggatacagctttaaagaagtcacatctgttccagaagcctatgggattttgcttgctttcttctttcccacatgtgttccaaaaagtgggaatatgctccttgtcaagatttaacagagcaattcaaacagtaacaagaagcaacagctccaggaagaataacatggagtttatgcagagagaaaatggaagaagcagatttcaaatacacaaatcacactactgaatgtttcttagtaatagaggagctgcaaactctgtctctggtgttcagtttgctaaagaacactgagatagtcttcccttgacattcagagaattattaatagtatcataaatgatatcaactcttaataaagcccctttctttcaaacagtccttctaaattctttctaaccttcctaaaagctctgcaagcagtccatgattatttaaccttacaaagggtgagaaaatatgactttttcccagtgagacagaattaataagcgaaagaggcaaagttcaaatatatatgagtgtataaggcaaagacgtttttaaaggcactattagtattctaccaatgtgactgtgaagtgcagtggcttttttgaccttgatgcccccagttcttcagcatcctcttctatgagtccagtactccaccccaccctgttttcttccttcctagccaaaatatattctttgactattctgtccttcttacagtaagtattgatatccctgaaatcctagtggtacctgttttaaccattattctttcaataaaactttcttcagttcccaagaaaccaagtcaatatgtgctcataaaccatgcttattatttttgttaacacaagtatgaatgagtagatacaaaattctctattcagcattaagacattaatccacaatgtgttgtataatcaatattacattacaggggaagctaatgtcatatagtaataaacagcaatctcagtgaacatttgttggaataagacaattataatttgaataacctagtatagaaaggtttcctgttcaattcaataaaaatataaaactagtctagttttgagttagatattagcatttcagctataatatctttttaaatggcaacctaggtctctggcatcttcagtgttagagccagactcttggcccattgacaatttagtccatttcaatctctcaaaaaaatgagtgaaaattccaatttgcatagcatgctaaatttgtatctatcaaagttgttactcaacttttactttctcaaccactgtgtagtagttcggttaccaagtagaagtagaataatggcttaagtcttcctgccaaggcacagacaatacagaccttttgatataatctctttggatttccttgacaggtagaagtgattccaactgtgctttagggaaaagtctgcctgctaaaacatcagcagtgggagattgttccatctcactggaattctattatttagaggataatgctcagacctagaaaaacaaatctgggtgattttgaaatgtcaccattttaaactagctataaactggattccatggagagtattcacataaagtttgaaaaagatgtaacaattgcaacacacacacacacacacacacacacacacacacacacacacacaaacacacaattttctaaggcaagaagaaaaagtcacctgccatttgtcaccatgctgttattgcatcaagtttggagacacaaaaagaagcaactgacaaagatttgagtcaattattataaggactcattcatattgtagagttcaattgttttcatatgctcctttagatatagctgtcttctacagcagtgaaattagtataaaactcacattaacttgttatggtatgagaagaacacacacacacatatctacctctacctttatgtattttaatttttcagctttccctagtctttgtaagaggctagcaatgtcaatttcatataaccaaagaaactaatttctggagtcacatcaagaaagaatcttcccatacaaaagcaagccagtcaacattacatcgtggaagttgtaggatctctcaacccacctcttcctgagaaactacacacagttgatggctgctaaacaaaggtctccttaagggtgtggtccctgttgcattttaccatactccaggggaaggccctgcacatgtgtatgggcagcattaactgtattcattggaatacaacaaacaaaggacatgaatttaggatagtgatgcagggtgaaggtccaaggaggagttagagagactgatgagagtgaaactgatcaaaatatattgtattcatgcatgggaatatctaaggaattaataaaggagtatgttaagtatttgaaaaaataaactaaggtttgtttatgattactttgcattataaattgcttttgcttattcaatggagataattgatcatgcccccctacacacatttcctatgaagaaaatggctaaatactcttaatgttttgtacaaaaaattcatttccactacttgtggaaatcacagccatcattaatagtttcctatgtcaaatgataacatgtatttccctagaaacactggctgatgttatcaagacactacaccttgctctttgattcagtatgtttccacaatacattgtgttatttgttttgctgacaataaccagtcaagaatttgacattatatcactttcaattaagtgtgaaagagtggcagacagaaactccagggaagacacatttgactcagtgtcaatataatgcaccatagttcttatttgagaaaagattagatatgacataaaatcccagacactctcaaatcaaagctgacatgaactgttttcaatacacatcttcatattggtggccagtaagctttgtttttcctcttgtgttgtcactctgtaaaacctcagattggaaagccagactgtgaatttgagcctccccaaaatcctcaatattaaaagaatattctcaactgcaaaataacaaaatatgatttaaaacttctctacttgtacataatgtacctgtaataaggtagaaacatataggatctaaaaataatggggcctaaaatgatgatgatgaagactttggtgaggatggtgacaatggtgatggtggtgaggatagtggtggtggcaaatgtaaaagctttgaggaagagaccaaatttaataagtcattagagaatgaaaaaaaatctgaaaacttgacatttagcaggcacagacctccaggaaatatcaaacacaaagcatgcagatttcttccttttttcaaacatcaacaggatttcaatatgtttaaataggaatcatggtcccctctttggctagatcctgaatacccattgatcctctttgggcaaaacatttgctgaaattatttaatgtttcatctggattttctactattttgtagtttaggaactttcagtttataattttatgtttaaatttcacattcactttagttgttttgtgtaagtgttgttttgttcgaaaatctctttagaaagctatttccaaatacagtatatttttgttattattattaagatagtaaattctggagtactgaaactaaccaaatgtttttgttttagttcaatatcaagtccaccctgttgcagaatatttgctgttttcccttgcctgcctaaggtacctcctttgcctaataaaaagctgaatgaaaaatagcgagggaggagggatagacaagatttatgggcaaggagaataagtagtagggaatttaggctccagggaagaaagataaaggagataacggagatgttaggtgccagacagacaaagaagcaggaaagtaagacatacagaatgcaagaaaggtaagaggccccaaggcaaaatgtaggttaaattaagtttaaaaagtggctgatggaagcagaggcagacacccacagctattcactcacctgaactctggaacccagttgcagagagggaggaatgaaggacaaaggggtctggaccaggctggtgaaacccacagaaacagctgacctgaacaagggggagcacatggaccccagactgatatctgggaggccagcacgggactgatccagacccctgaacgtggatgtcaataaggaggcctcggcactttatggggcccctggtattgaatcagtatttatccctggcataagaagggactttgagagcccatcccacatggagggatgctccctcagcctggaaacataggagagggcttaggccctgcccaggatgatatgacagactttggggaacttccatggagggacttaccctccctggggagcagagaggggatgaggtgggggactggaaagggattgtggggaggggaaggagagtgagaagggattaacgtgaagcaagcttgtttctaaaaaaagaaagaaagaaagaaaaatttagtgggacaagcttaagctcaggctgagcatacataattaataataagtctccatatctttatttgggagctggttggtagctcaaaaaaaaaaaaaaattcccactgcaccatcgccttttctgtgcagctctctgtgtcttgttccatggtcatgcatccccattacagaagtatgcaggacatctaccctgccctagacacacgcctggtgctgtatttgctctgtcctgccctcttccttagagtcgttttggtaaagccgtcattttagagtttccattaactttggcttcccagcatgtcatcagcttcgattcataaagtacatagctgctcagacttttatatttcttaagcaatatgaagttttaagtcccactcatttcttagatggctttgtatctcattccttttacaaagtaacaatacattgtatggatgtttcaggaccttgtgcatggaaggcaattacaacacaactgagcaaatctgtcaccttgacctgcctgcatctggaacagaggtaatcctggccttccagaatgagttgtggtgttttcctggtgattccatggtttggaagtggtattaacacaatgacatgtgccattccctatacatatgtaaccagtcatcagggagtctacctggcttgcttctttatttgggaatctcatatatatattaaaatagcgattttgtacacattttgcctttaggagtttagacttttctgtgaacattttccctgaaattctttcaaagacagtctccattttatttaatacattatattcatggcatggagctgttcatagtttctttcattacaattaattctcttgaaaatagcctaacaatatctttcttttgttgttcttcacattgttttccctttttgttgttcaattccctgtaatttgtcaattgttttgattgctctaaagaagcaatatttagttctactgtggaggttttacttgttaactctttattttattcatagatgtcttaaatgttatcatttctgacattctgctttttagattgaccaactcttcagggtcatgtttctcctgggggatctttgcagcacatgaaatcaacagttaacttattgtaattcctgatctgttttcttacaaatgataaggttaatatgctatagagaccactcagttgtgaagaactcttactgctcctacagaggacttaggctctgtttccaacacccaggatagacagctcagaactgtttattattccagtttcagttcctgacaacctacatctggcctgtgcatatgcgtacatgggcacaatacatataagtaaattattttgataattgctcagtaaaatgattgtaaaataagagcaattctataaatatgaaataattgttccctggctattacaccattggaattgtatagagaattcaataagtaggagtgagaaaatagccaattaaaattgacatcagcatagagtaaaaaaatgttttatgtcaagaatacattgacaatatgaatggtttattcttaatatcttcttttgttagatatctaaaagcctatgttgctctcctctctttctttctctcacacatacaaactaagtagtgattaatgcaagagtgtccagtccattgtgggtggtgtcattcctgtactcttgttttgggttctgtgagatagtagtctgagcaggccaggagaagcaagccagcaagtaggacctctccatggctctgaagcagctcctgcttccaggatcctgccctgtttgagttcctgtcctaacttccttcagtagtgaatggcaatgtggaagtgtaagctgaataaacccttttctgcccaaattgctttatggtcatggtgttttctcacagcaataggacccctaattaagatatagggactttatgatttgatagaaattattaaagaataggatatgtcagagattggataattctattgagtaagaaactagagtatagatattcctctgaaaagtctactggtatttgcagaaggagaaggaaatggacactaaacttgaattgtctgaatagaaaacctgttagaactggagaaacaataaactggataatttgtgaatgacagaatcagtgactacataatactttcaaaattctgtcaggaaaattgaaaatactttctcttactaagttgaaaagtgttccatatagctatgggatgcaaatatgttatcttgaagtgggctagtcaaccaagataacttatctatcattttccttgcttatcagtaatctccataactttggtaaaataacccatattttttagacattttgctttcacagtcagacttcaggggcataaattacgttctttaaatttgatgcagcttgcttaaaaatctcactgttttgaacttatcacaagtgaactgagcttcaataaactgtgtagaacttttggacaagtgttcaaagccatgaatcttttatccttccaaaatcattccatcactgatcctaatatctgatcaactatgcctggagtacaaactccatgcaaaagaaacaactcactagggattattttatgagctctttgtaattgtttagacttgtttactaacatttgccacatacatgtcatactgcttctttaatcaatatttgagaaaataccttacagctgaatctttaaaaggtgtgttctcaactggggctttttctctgatgactcaagcctgtgtcaagttgacacattaaaccagccattacaactggcatgttgtcaacttgacacaaaaacacttcacttttaagccacaacctgctatgaaaagcatacataactttaaaattcccactgtctttaaaaattcaaacacattaaaatttcagtccctttaaaatagccaaccttgttaaaaatccaaacaaagtctttaaaattcaaaacctctcaactgtgggctccagtaaaatattttcttacttcaagagggaaaatcaggccacagtcacaatcaactcaaagcaaaaccaaattctgggatccataaaagatcttctggactcctgcaaaggttttgtgtcacttctctggctctaccttctataccacacaaagattgtatgatgggctcctgttggcttcactctactgctgatgttgtccttggtggtcatcccatggtacagacatctccaaaatgttgggatcttctgcttcaactagtttgttctttcactaatggcctctcctggcatctcagagtgacaagctacaggttctctccatgaccccttcatattgtcaaaaccagtactacctgggtgacacacattaccaagtctggatgccagcacaacgtacaaccttggctgcccctgaaacatagtttctatactctctaaacatctcacagaagatcacctcaatgatgttggtttcttcttaatcacacataatttattagctccagccaaccagcatcaattgtcccagtaactcaaaggttcactttagtagttctggtatcttgtttatcaaggctgattcttcagtcccatctaaccagaaccacagaatcatgaaccaaaataacaaatggttctgatagtattcttaaaacctccagaaacttcacaagtcaggccttcatcctctgcactactctcaacattcctttctatcatgttcccacagaacatcccatatggtctgagattttgcatttgttaggtttgtattttttgcctcctctccctgtaaagcttatgtaagctctttcctgaattggtggtgagtatactgcaagtgctcagtgagtctatgctgaaagagaagatgtatgctgtgtcctggtgttcttgtgaattttccagtcatttctcaacctaaatcagtaaatgcaggtttatctttaagaacacagaatgcagagtctagaaacagaacttgtttacattatagatacccattcttaacctaaatcaaataggttttgatgttgttgtttttagtggtggacattttttaacttgtatttccttatccttggatggatagatatacaatagagatagatagatagatagatagatagatagatagatagacagacaaacagatagatagatatcatttaagttactgactaaaatacttagaaatttttctggtacttagcagagaccttataaatggcttactactaaaattttaatcctccaattgtcttctgtctgccaactagtctatactttacctctaaaattttagtgactattttttattaccaatgtcattaaggtcttccagtatagccattaactgcatgcttaaattattaagcaaaacttgaaatattattttaatacagtaatacacaaattaatgcatttgaaatatcaatgactttctcccaaacaaactatgtccaccattattatcattaaatacagtgccagaacccctatgtctgtggcctgagtactatcttgcagtgatataattctctgtagtgaacatatgaacatggttagtactgtgtcttgggactttccaggttttatagcaattatatttcattttgtaagctcctatatttgaatcactgttgcttttctctaactaaattcatttaaactttaaacaaatgatatcacatgtgtccatggtggtatgcccatagaaggctttcacattgttatgtcggtcctacttctgttttagtcattcctctcttagttgcatttttttattttaatcatgtaacttaaataacaacatctatattaaagtatatcctaatttaatttcatattttaatgtttctaacgaaataatcttttgatttatcctcttagtaaattagtctgaaaaacaattttgctgtatatcaagaattggaacactgcaaatgagaaaataaagtgataacagcagcattttagaacatgaattttagccaacccatcatatttgtgtgccaagtgaatgtagcaagtcttttcaactggtcacagttcacattcctcatttgttaattcagtgagtataggagactaggctttctttttctttgagacacactttcactatatgtcacaggcatacttctgttttctaggctgacttcaaacaccagattcttttgcctaggtttctaatttactggaattagagaggaattccagcacactcatctttaaagttctcttttacatatcaatataattcacaaatagttctctttgaaattatcttatttccagccatagacaaaatgaaaattgcctaagcagtttgatttcattattatatgttgggacccagcccccaagtggtctccatgagttgttttccagcataaccacaggtacctcctgtttttctaagcctcgcccactagcatcctgttatgaatctttcttgttattgaaacattatgccttgcccccatccccttcttgcttcattggccatgggtgggtgttctggtttccttatttatgatagggtgtgggagtgcattctgctagcaggttatgttttcccatgtccccttgcatataagctgctggctacaataaatggatggcattcacttctacagaatgacccgagttgtgtccttcttaatccgcagactctcgcctggtttggttctttggtctctggctctggtgccggtgacaattatatatttaaattatattaatattacacatttcttccttacactttcctctctgcaaacactgccacttaccctactcccttgatacctttatggtctccttttctttgattgctattgttatccatatatgtaaatgcataaatatataaatacaggctactgaatctatttagtgttgctcatgtgtgtttgacttcattgctgacaacttggaattggacagctaattaaggattcatctaagaggcttacttctctctcagcagcctgtagtttcctctagtggcttaattcaagagctgggctgggctctaagagactaccctctttcaaaataacacatctatcttcttttatattattggagacaatcaaagcatcatagcctttcttttgtactaactaccagcagggcatttattaaaaattggtgctcaaacctattatttatccatattgaatacatatttttcctgtttaggtaaatattcattccacaatggggcattggcataaattacataataatttctccatcaatataagacacaaattctcatgaatgttaggttttgggccacaatatagatactgagataaatcatacatgtatcggtataggtgtctatcattctgcataatgtatagataaaaccatgtgccatttaacaattgggataccttatgagaaatgtacttacctgtgacatttttgtcttgcaaacattccagggtggagtagtcactacactctggggtatccctcctaattacatgtaactatagtgagtactgttaaaaatcataacacaatgggactagtgtatgcaagaacatgcaaacatatatgtgtggcataaatgtagtaatatgataaaaattatgccaatgtataggtcagtgactctgaaaggagattaggaagcaggaagcagcctggaagtagtactgggttagtcaatgataggataatgacaggagatgagcgcctaagttgatgcggtgcactgaagaccagaaactctgcatgctcaggctactggcaaatcactttaaaataacttcaactccattcttagcttttttgttttagcctagagtagactttgactttaataactatatacagtcctttttacttcatagactttcttttaatgatttgttttgggaatttcagagatatatacaataattttgattacacccatcgctaccctggttcaccacacaccctgcctcctaacatgatatacttgtttagtctgctgagtccaattactaagtcttagattgaaagaaacaatgtatgacaccataataaactactttttatatctgtattctattattatgttttatttttctatatttacatatcttacttttgaataatttttgataaaaatgaagacacaagcttagatattaggatcaaaatcatgtttatctgtcttccatatctgcttatggtcatcagggttgtaccacatcctgtcatagtggcttcttctggttcttctggagaatcatggtttacctgggactatttaatatatgtgaaacttcaaacacacacatatagagtgcagtctaataaaaaaagatagtgtatcactaatacagattagtaccatggtatattatcaagtattacataacatgcatgatttttgcatgcaataaatttacataattgggggaattataatatctttacatcagtattatcgtgagcatgtgaattaatcccaatgatttccttgcacaatataagaacttttggcttcacttcaatctaatggaaccatcaaacatgtatgaagtatgaagaatttttgaatatggatatatttttatatttgatattgatcacatcaggtaactccacctattgaacatttatctgtcataatgctacccaccccagatcatttttaaaaaaatatttttaatattggggtgtgtctgagaactgatgtccatctttgttatgcatagacacttgcatttctccttgatagtttcaatggtgctcatagttctctgtcacagttgctgctgtgcacggaagacccgaaacactgcatgcttaggctactgtaaaattactttaaaataacttaaaatatccaactctctagcaaggctcaaatattgccaacaccatagtcacttgatgatggctactgagcaaacagatgaaatagtaacaacagcacagtgctaagtgaaatgaacattttcattcaatagaccatgttaatagttttacactaatcatttcagtttattctcatagtcggaagttgcttttacaaggctcatttgttggacatgctaaccttgaaaggactccttcatggctcctatcctcacatcccttctttgcacatgtttgagtggtatgttagagatgttttttcctactatgtctatcccccatattaattattcatctgctatgtacaaatcaaattgtgaaaatagttttcaaacaatacagtataactatacgtgtgcatacatttcaatatatcattattattcactcagttgcacattctaactccatcatgtgaataaatatactgtttcatcttggtggttgagagaatggctacataaggcaattagaaacattgctgtagtgctccacatagagtgaatatacaacctactcacagaaaatggtttcgaattaaaattcaaactgtgtcttgaacatagcagtgagatgcagaagaattgagatgtggttctatctaactttcaagaaaaataatctgttacatttgcatggaaaagttattttgttcgcattctctgtggaattttcccgagtggatgtacataaaaaaaagtaatcaaagatgtcaacttatctacactgctgttcctccatctgtgaatatcgtccatagtctgtggcacttgaacacttggttccaagtggttgcccctgcatgaggagcttttgctattgcagccttgctagagaaatatttcactgggggcagagtttgagagtaaaaattcttgcctagttccaatttactctctctgcttcactctgtgttttagggcgtgagctcccagcttctgccatgccttccacttgctactgggctcccccattatgatggaccccatactttactgtctggaacagtaaagcaaaataaacttgtctataagttgtcttgatcatagtgttttatcacagcagcagaaatacaccatccaagatctcaaaacagatagcctatgcaatgagatatacctgaatagaatccgttattgttcttctttgtcttctttttatatttaagtttgtttcatgctatatattttgattatgttcttcccccttccagatttgcccccagttctgctctatgacctactttatgtcctctctctctgaaatcaacagaaaggaatattaagacaaacaaaactacaaaaaaaatcaaaatgaagtaaaataaccataaatactctggagtctgttttctattgggactaccctggagtacagaactgacactccattggagaaaactaatttcctcttcccagcaggtatcaattgcaaataattccttggtatgggtgtgattttgtgtccacttctgtttctcagtgtttgtattttggctggtttgaacctgtgcagatcttgtgtgtgctgtagaagtccagctatggcagtttggaaggttcaggttttaaagacaaattgatagcctacagtagattgctatacaaataggtagaatgtgaatgcaatggagaggaggcccagtgaagggactatctgtaaaaatagagcagattatacactgtatctcacattcttttttatttttttattttttgatttttcgagacagggtttctctgtgtagctttggagcctattctggcactcgctctggagaccaggctggcctcgaactcacagagatccacctgcctctgcctcccgagtgctggaattaaacgtatttgccaccaatgcccagcgtatctcacattctttaaaaccagcagcatgcaaatgaccaggaaaaggacgtcttcaaggtgctgaataatagtgattggttaatttgggttagtaaattgtagcaaacgcatgaccctatgaaagttactgatgatggtgaggggaacaatgcctgtagggctaaagagaatgcaaaaactctccgtacttcctacctaatatttttatgaccataaaactactctaaaactaaggcttgtattatttgttatttattatttatgtgcagtctgatgtagctgaacctggccttgaactcattatttagcggaggctgtccttcaactcctgatccttaagtgtgcatctccccaggagtaggactgcatcactatgcccagttcctgcagtgaaaagcatcaacccaggatcctcatgcactcggcaaaggatttgtgagctgtgctacatccctgttccctagagtccatatttaaaagcttggaaatgccatggcttaagacttaggtttatgatttttcacctgggttaggtttttacaacttgctttgttttgaaaatcaagtcttagagattagggattattccattaatataatcaataatgatttcacatgattaggtgaggcaattataaatgctaaaacatatttagggaagagaagatggctcagttgaaaagtacttagcattcaccttgaggacctaagttaaatcacctgaactcatataacaaaatataaactgggcacgtagagtttagagagatgggtccgtaattctgcatatttgctgctcttgtggagaacttgagcttagttcccagcacccaagcggatacaaggtgtatcacaaacagttctaggtgatccaacatcctattctggcctcctagcacaatatacatgcacatggaacaaatatatatagaactatacaaagaatattgaaccatacaaagaaatacaaagaaatcttaaataaaccaaaacaaaatctgggcagtgtccctataatcccatcccttgggagccagagacaggcagatcccttgaactcagtgttcaataggtttaagtgactctgtgagtaccaggttatatgacagaccctattcaaaaagaaggtggagagtgacattgacctcttgtcttcacacatgtgtgcatgcagctgcacacccatccatgtacacaaacacacaaccatcagcacacacatatactatgcacatgaaaaactaggaagagatgagataattataacatgtaatctctaccacattagatacatggtgctagtagacagctttattatcaatgcctgttgtaaagctataaattatgatcttttccagtttcaatttaaaaataggtaaattagtttaacccagagcagaaatccattttctctgtatctcttacccatttagttttgaccatactttccacatccacataagcctcacaaatttagcaaaatgatttgaaaaattgataaaacctgacttgaaacagattattgaggaaaactgactttgtttttccaataatttaagataaaattgcaaaatattattgcacagtaaaggggcatcaagacatttctcatctctttgaatctttcagtggtatgaatttatttcatatctaagatgccacacttgaaaatcaaatagagagttcaaagcttatgaaaaagacacaaataaataaaattaataaagcttctacttgaaaatagacttactgggagtaattgtgaaagaaaagatagtttatttaataacatatactgaaatccatctgatctttaaaccataaggtttatacatctgcatagctctgcataacagttatttctaaaaaataactcatagacattgggaaaacagtatctataatactattctatgtgacactaaggatgatcatgctcaataagtatttgttgacaatatttctgcaacgacatgataatttctctattcagtggggtaattagcctgctgttgcccattttaaataaaatgttctcaattgggcactgaggctgacaggcttcctgtttagaaatgatttctgactgctctatagtcaaaaaagccagcaataatttctacaataaaatctaattgatacatactaatttcttcatttatgtttatatcctgttttaaataataaagttgtcctcaaaaataaataaggaaaatgcctttcctaaccttggtatgaaaatttttcttctgacttgatttgcatttgcatatttaagagttaactttatcagaacacagttggagggcagcagtcacttgtattatcaaggcagtctgtctcctttgtaatggtaaatgttcaattttgctctaatgtcaaaagtgcttttgagtaaacagcactgaaagcaacagtgataaccaaaacattttacgatcggttttgtcatcccttgtagatatatttcaacactttccttctggtaagtgaaaactgacaggtcataggcttcagagctttgcatacagaatgcatcattattatggagtgtacaccataattcaacccttgtattccctccctgaattcatttcctgagttgaaatggttattgaatacttaatttactgaatccatgctaagcattatgtaaatatgaggatgactttctccttactctaaaaattcatatatgaatgaaataattgagtttgcaaatgttgtaatcagcatgtaaaatatataaacagaatgaatggataatattgatggtgatcaaaatgcctaattttcaaaatttctttcacaaacactgacttcaaatactaagaattaacatcccaggaaccaagagactggattcctcaaattgtagttacattgccttaaacaggtaacacaaaccaacacatttaaattccacggggtttgcaggtggtggtgcatgcctttaatcccagaacttgggaggcagaagcaagtggatctatgtgagtttgaggccagcctgatctacagagccagtgccaggacagtgcaggttacatggagaaagcttgcagaaagatgaaagaaaaaagaaagaaagaaagaaagaaagaaaggaaggaagaaagaaagaaagagaaaataattccacaatgtctatgtatttgtcctttcaaatacccctttttattcttacaatgattctgtgtgtatagcatgtgtataagttaaccatatgctctctcttatctactacttcagatttctaagttttagactgtagaaggaggagcatgaacaaacttgacccacctatgactttcagattttgtttcttgtgaaggtatgtattgaactaagggcctttggctttctagattaaagttctgtcattatttgccactgacctatacccttagaacttcttttttacctttttattttaaaacaagcctccataatttcctttatcatgaccttgaacttcctctgtaggctatagttttgaacttgcaaatcttctggcatcggttacctaaatccttgtaattgcaggcctgtgccaccataaagaaaactaacatgataatattgtagatttctagtttcctggaaacacagccaatctctaagacagcgggaatgaaacttgagatatttaaggagaataaatgataagcttatcagtgtctcagagtgcagaacaaaaagtcacactatttcataagatttacacatcttatataagatttgtctttaatctgccttgattaggataatgatggagtgattgaaatatagtgggaataccaaggtacaggtgctaaaataagggtccctaagaatcttgagacatgtactcattaatactgattgacaccttgataagatctagaaccattgtaagaaaagcctctgggcatgtctgtaagcagttttccaaagctgggctaactgatgagggaagacctaccctgaatgtctctgattttctacactgggctaatggatgaaggaatgcttaccctacatgtctgtaaggggtttcctagactggactaaatgatgagggaagacctaccctcatctgggtgccacaatttcatggactgagcttgtggactgattataaaataaaaaggaagttgagtactggcatctgtctccctatagttcccagttctgcagaaaatgcaaccagttgcatgatgcttacaccaacatgccttccccaccacaatgccatgaagaactaaaagaacactatgagccaaactaagccttttctgaaataacacattttgtgtcaggcattctgttgcagaaagagaagtaactaatatagaaggtcagtggtggcacagtgctctctgttcaaaagtcaaatagcttgattttcataaaaaaatatttttctacaattatctaaagtgaacacagcatatttatagtttttgggattcccagaaaaactatgaaagataattatttatgaattgtcaatagaacaatatttattttgtgcggttatctatatgtaaagattatattacaatagctatattaatgcattatcttaattattaatagaagctattgatatataggtggttttgtgtcctgaggtctccatcaatctgaaacaaacttacacagttaatacctaagaatacaattaaagctacctagacctaacaatcatatattaagcttgaaggactggtactgtcaatctcttggtgacttagttcacggttcttcttgatagatgagtgctgatatctctagcttcatatagagacttttactcttaaggagaggcaattgtaatctttgtcttcttggtgttgccagagaaaagaacacaagcaaggaaggtggcatactagcttcagatcttcacctctcccttgaaaatggacttcttaattggtctagataataaaaacatggagtcagatgtagagggaaatgcagagatatcagagagaaggagctagcactgccataccttagctcctttgtgtctcagcagacaagataacaaattcttgtttctccctgcttatatcccatttccacccagctaccttacttccttactgtctggacagacctccagcctctatggttagctagtggcatgctccattctctgaccttcagaaaggctttctttgtgtgagcaagacatcaccacactccctagtcctctccaaatccatttcctcagttgcagtctcatctctgttgaatagcacctactgcagcaacctgccacctcctcagcagaaatcatacacctcttctattaaagctttgcttcctccaactgttcccagttacccaggccccaactccagcaaacattccctgggaactgacctggcaaccactgtaggtagtgggtaggctaaatacagatcttcacctctccttcttcttcttctgcaaatccaatctgccagtaaaatccccagctctgtggcacaccacctactggagtgccccctcctctgccctcactttcaacagatcactcagaccttatccattcttcctcccacttaccctttgtgccatatcccaactccaacagaaatttcctaggaactttccagttaagcccaccaagtaggcctgagaagcaagtaggatagcttcaggtcttcactctccatcatttcccctaaatgcaaccccatagtctcatctctaggtctgtagcagactagctattgcatcctcacctcattctctaacttcattctcagggaactaagcaagtctaggtggaacaccagctttccttcttcttgtggacttccttaaccccttatttccatttttaagtacaagatcccaataactagaaacacattcttcatggaacgctcaggaagtagaactggcatcttctcaaaagaatacttattcaagctacacatagtcaccctcctaacaagcagagaggacaacatgaacaacatcagtggaattgattccccaataaaaagacagagactaacagaatagattacaaacaggatctgcccttctgctgcagccaagagacaaaccttaacttcaaggatgtacttcacatcaaggtaaaaggacagaaaagtgtcttaataaatacaaggaaagggggcaaaagcaagagaaggatggaaggcagggtgagattggaaccctataggcagaggaaacaatcctatccttctgggagcaggcattattttttggtaaaagcattaacattataagctctagccaaagaactaggaaaagtctgattaaggacatttaaaaatgcccataccaaaaccaatcagattttctctgtaggctctaaagagcatccaaccacacctatcttttcagggttttttgttttgttttgttctgttttgtcttgttttgtttgtttgcttgattttaatcttgttgttctccaaggcttgattcaccagtgatgagcctatgatctgctttcaagtatttttgcattggctagagtgacagtgtgaagtccagccaggtgggctttaggaagggaaaagaaagaaaggaattaactatcatttgagctacaggttaaaataatagttaccttgctcttggttgtagcattgtggctgagacaaagccatgaggtctagtatcttggcaacagttctttcaccaaaaagaatatcatgaatgagaaatagttgtccatattgcatctaatatggacttaagtccaaatgtctagaggctatgattacatggactatgtaaaagaataacgatcattttaagctgggttttggtggcacacacctttaatcccagcacttgggaggaagaggcaggcagttctctgtgaaattgaggccagcctggtctctagagcaagtaccaggataggctccaaagctacacagagaaacccagtctcaaaaaaacaaagaaaagaataaaaaacatcatctgacacaaagtgacctggatgcctgactgagttcagcggtggcggggagttccatggtgggaggatctgaacatccaacacccagaggcagcctggcctccattcgctggccctggtaggccaggagctgtttctggctcctgttcttcctcgctgttcagagtcatctgacacaagtgacctgtgtgcctgatcgagttcaggggctgctggatccaacacactgaggcccagtgacagctctgcctccaactgctggcccagtgggacctggcacacccaaacactgtggacacctgggtaacagtgatacctccatccaagagaagaggacggaatcagagtattggaactgtttgcatctaccagaagagaacattggttccacactcaccaggagaacaagaaacatttgctacacccaccagaagaaaggatgagaagaggacaaggtaaaagaacatccaacaacagaaaacagaatatgacaacacctgagactaggaatcatacaccagtatgatctgatcatcacaatgcagatgaaccagaagggaatgaccttaaaaacatcttcatgaaaatgatagaggacctcaaagaagacatgagaaaatcccttaaagaaatggaagaaaaaaactaaccaaaaattacaagatatcaacaaatctctcaaggaaatagttcaagacctaaaaactgaaatagagacagtaaagaaagcacaatctgagggaatcctggaaatagaaaagctggataaatgatcaggaactgcatacataagcataaccaacagaatacaagagatggaagagagaatcccaggagttgaagacacactggcagaaatagattcatcaagcaaagaaaatcttgtctaacaaatccctatcacaaaatatccaggaaatatgggataccgtggaaagaccaaacctaagaataataggtatagaagaaggtgaagaaatccaactcaaaggcacagaaaacatattcaacaaaatcacagaagaaaaccttcctaacctaaagaaagacatgccaatgaaaatacaagaagtctacagaaaaccaaatatactgaaccaaaaaaaaaaaaagtcacctcgccacataataatcaaaatgccaaacatacagaataaagagatcatggatgccagcccagactactatacccagcaaagctttcaatcattatagatggagaaaacaagatatcctatgacaaaaccagattcaaaaaatacaaatccaccaaaccagccctacagaaagtacgggaaggaaaactgcaagccaacgaagttaattacaaccagagaaacatagacaataaataatcccaacataccaatagccaaaaggaaaaagggacagaatcccacatataatcttgccaccatcaccaaatcaaaaacaaagaagaattaacaataatcaatagtcattaatatccatcaacattaacaatcttaactcccatataaaaagacatagattagcagaatggataagaagacagaatccttctttgtgcagcatacaagaaactcacctcaacctcacagatagactgtacctaannnnnnnnnnnnnnnnnnnnnnnnnnnnnnnnnnnnnnnnnnnnnnnnnnnnnnnnnnnnnnnnngggggtagcaatcctaatatccaacaaattggactttaaactaaaatcagtcaaaagagatgaagaaggtcatttcctactcatcacaggagaaatccatcaggatgaagtctcaattctgaacatttattccccaaacacaaaggcatccacttttgtgaaggaaactttactaaaactcaaatcacacataaaactgaacacacttatagtgggagatttcaacaccccactcttaccacaggaacaccatacagaaacttaacaaagaaacaaaagaacatagaagttatggagcaattggtcttaacagatatctatagaacattccacccaaatacaaaacattttaccttcttctcagcaccacatggaaccttctctaaaatcgaccatgtacttggcaacatagcaaaccacaacaagtaaaaataaataaataaataaaaataaaaaaaaatgatgtaaccccctgtgtcttatcagaccaccatgctttaaatttagaattcaacaacaacacaaactacagaaaacctacaaactcatgaaaattaagtaacaaccaattgcacaattcatgtgtccaggaagacataaaaaaaaagaaattaaggtttcctagaattcaatgagactgcggatgcaacatatccaaacctatgggatactttgaaagcagtgctgaggaaagttcatagcactaaattgccacatgaagaaacaggagaataatcacactaaacaattaacagcacaactgaaagctttagaaaacaaagaagccaatacaccccagaggagcagatgccaggaaataatcaaattgagggttgaaatcaataaaatggaaactaggagaacattacaaagaatcaatataacaaaaaattggttcttcgagaaaaacaacaagggagacaaacctttatccaaacttaccaaacaacaaagagtgaacatgcaaattaataaaatcaggtatgaaaagggagacatgacaacagaaacagaggaaatccagagaatcatcaggtcatactttgaaaaccgatattcctcaaaatttgaaaatctaaaggaaatggacaattttctggacagatttcactttccaaaattaaatcaagaactgataagcaacttaaatagagctataaactccaatgaaattgaagcagtcattagaagtctcccaaccaaaaaaagcccagagccagatgaatttctaccagaaattcaaagtacagctaataccaaatctcctcaaagtattccacacaatagaaacagaagggacactagcaaactctttttgtgaggcttcaataaccttgatacccaagacacaccaagacacaactaagaaagagaactacagaccaatatccctcatgaacattgatgcaaaaattctcaataaaatattggcaaatcaaatccaagaacacatcagagaaatcatccatcccgatcaagtaggcttcatcccagggatgcaaggatggtttaacatatgaaaatccatcaatgtaatccaccatataaacagaatgagggaaaaaatcacatgatcatttcactagatgccaaaaagcatttgacaaaatccaacaccccttcatgataaaggtcctggagaaatcagggataacaggaacacacctcaacataataaaggcaatatacaacaagccgacagccaacatcaaattaaatggagagaatctcaatgcaattcctctaaaatcaggaacaagagtaggctgcccactctctccatacctcttcaatgttgtccttgaagttctaactagagcaataagacaagaaaaggagatcaagggaatacacatcagaaaggaagaagtcaaactctcactatttgcagatgatatgatagtctacattagtgacctgaaaaaactctaccaggaaactcctacagctgataaacaccttcagcaaagtggcaggatacaagattaactcaaaaaaatctgtagccctactnnnnnnnnnnnnnnnnnnnnnnnnnnnnnnnnnnnnnnnnnnnnnnnnnnnnnnnnnnnnnnnnnnnnnnnnnnnnnnnnnnnnnnnnnnnnnntataccttggggtaacaccaaccaaaaaagtgaaagacctgtaccctaagaattttgagtctctaaagaaggaaattaaagaagaaaccaaaaaatggaaagatctcccatgctattagataggcaggatcaacacagtaaaaatggcagtcttgccaaaagcaatctacagattcaatgcaatacccatcaaatcccaacacaatttttcactgtccttgaaagaaaaattctcaattttatatggagaaacaaaagacccaggatagccaaaacaaccctgtataataaaggaacttctggaagcatcacaatccctaactttatagctctattacagagctatagtcctgaaaacagcttggtattggcacaaaaatagacaggtagaccaatggaatagagttgaaaaccttgatattaacccacacacctacatacacctgatttttgagaaacaatccaaatatatacgctagaacaaacagagcatgttcaacaaatggtgctggcataactggatgcaaacatgtagaagactacagatagacccatgcctttcgccctgcacaaaacttaagtcaaaatggatcaaagacctcaacataaacccagccccactgtacctactcgaagataaagtgggaaatacccttgaattaatggacacaggagactgtttccttaacataaaactagtagcacagaccctgagatcaacaattaataaatgggacctcctgagacttagaagcttctgtaaggcaaaggacacattcagcaaaacaaagcgacagcccacagactgggaaaagatattcaccaaccccacatataacagagggctgatctccaaaatatacaaagaacctaagaagctagtctccaaaacaccaaataatccaattaaaaaataggatacagaactaaatagacaattctcaatagaggaaactaaaatggctgaaagacacataagaaagtgttcaacatccttagccatcagggaaatgcaaatcaaaacaactctgaaataccaccttactcctgtcagaatggcaaaaatcaaaaacactaatgacagtttatgctggagaggatgtggaaaaagaggaacactcctccactgctggtgggagttggcactgatggtgccaacttgtacagctactttggaaatcagtattgcgactcctcaagaaaatgggaatgagtctacnnnnnnnnnnnnnnnnnnnnnnnnnnnnnnnnnnnnnnnnnnnnnnnnnnnnnnnnnnnnnnnnnnnnnnnnnnnnnnnnnnnnnnnnnnnnnnnnnnnnnnnnnnnnnnnnnnnnnnnnnnnnnnnnnnnnnactggaagcaacctagatgcccctcaactgaagaatggatggagaaaatgtggtacatttacacaatggagtactactcagcagaaaaaaaacaatggaatcttgaaatttgcaggaaaatggatggaacttgaagaaaccagtctgagataacccaatcacaaaaagacaaacttgatatgtactcactcatatgtggtttttagacatagattaagggattaccagcctaccatccacactgccagagatactagtaaacaaagaagaccctaaaggagacaaactttgtcccctggagaaggagaaagggtcaccatcccctgagcaaattgagaacatggggagaggggagaggaagctacgagaataagaagggaagaaaaggaaggatgcagaggtcatgaggaagcagaaattttgagtcaggtgtagattagaagaaaggacatatgacagttagggttttagttgggggggttgtagaggaggaagggagggagaaaggaactgggatggtcatgtaattcaaacttttttgtaattcaaatatataaaaacataaaaaatttcatacaaaaaaaagaataacagtcatttaaatctttggttttatttttctattgggtgttaaagagcattatctggccaagtttagccattttgtcaacaatcaaaacctgttgaagaaacaatcaaagtctgttctcaggggttatttgctacttggctccttgcccattaaacttttctgtttgtgccatgtgttgggatgattcagtgagcactgaccatgctgcttttcttgcaatcactgaggacatttttgtctgcatttgctcttctccctgtgttatgctcactggttaatgataccaggatcatgcagagaattaccttgtctcactcttggttttaccagagaaagattatttgctttggaaatgccactttctcataagttttataaggccatggatatgtggcagctaacactgatgatcaaggaggaccagatcctgtgtggatagacttcagatgagtgcttggaagcctccatccacaatcatcatgtgcttgcaatgtggcagctgtcaaaatgacaacttaatatatgactgccctctttctaccaaagatcagattgtaggttagtacagtgcaatagttgatattttcttctggagtcagttttactgcatcctcttgtttatgtttaggctaggctcaatgcagaaatatgccagcatttttgttaaggtctgagggttaaaggaagggctctccatctgcacaagtaaaagggaatgttaagctaactcccaattccttcttatctgcacccaatcaccaggttctctgatggctccttttctcttctgctactggtgaccatgaggaaagaagggtcctttttagtttatccatacttactcacaagatccagacatctatgttccctcccctcctcatgacaatggaggaaggtgaagcccttagaattgctgtaacctttatgtagactctactaccctatgagattgtattcttcattttgcttagtttacaaaaaataaaccattggtggaaaacagctcagaagaaaagctgtagaactaggattcagcaatagcgacattgctgaattctacggttactttggttggttataacaaaggcccaaaaactttgggaaattttgaaaagatgaacttactccaaacacatattaagcttcttagatagtgagtgtcaggacccacaagttaccttggtaatataaaataaatgactatctttcaattatgttagtacttccttttctgtaaggatgtggaatgactgagagggaacccaaaaagtgaagtgtggtacatggaaatctcttaagtttcctttaggatatcatagataacattatgcatgtgaaataatccttaaatttaaaagaagccacactgtacatgtggtattgcctgcttaatctgatacaggaaatgcattgggcttatcatgtcttaacaataggagaaccataaaacattacataaacattgctgccaaattttgagtaaattttgagtaaatttttgaaaagtggagtaaatcctaaattagagtagattcgatatatcagttgacagaggattcggaatggtgaaaatgaagaagtgatttgtattttttttttttttttggttttttgagacagggtttctctgtggctttggaggctgtcctggaactagctcttgtagaccaggctggtctggaactcacagagatccgcctgcctctgcctcctgagtgctgggattagaggcgtgcaccaccaaaacccatcgaagaagtgatttgtaacagcaaagcaaggaaaaagaaagagatgagaaattccaggttttcagtctaaatgagggagtcactttttctttcctgtgacaccaggatatgtgtcctgactttgttttgctcagttcctagatacaaacaaacttctaccagggtggaagcccatggaagaagctgagattgggaaatatgcccaatggccacaggtggctttgtgtaggcatggggaatctgagttgaaattatccaaatgcatgtattccatagcctcatctgagcatggctgagacctggcagatatgtgacactgtgttggcaaggtgttatacattgtgctgtgagcacagtgctataagcaatcttcaggtctggtcccttccttgcctctgaatttgagtagagttctctctggctctgagggaatggtgatcctgaaggtgaagataagtttcctagtccagggacaataaatgaggaattcaacatagtgcttgcatacatgaagaaaagaatgtaagacagaaagacaggtggcaggaacagcagtgaggaatgggaagggagttagtctagttagctacaatgaggtctccaggtgtctctcatattcagtcatatgctatgattagcttttgttcactagtgttcacacaacaaagaggtaacaagaaaccggaaacctgaatctaatttatggcactatcaaactaaagcaagaacagaactgttgacaggatcagggatactcccagaattgcacctgactggcgaggtccttgtcataaacctaactgagcagatttcaagtcttgttcacaaaagaaggaggttctataaaatgggaaggaaggcagctcttttttattttaatcttctctaaaacatgttgttggatcttcacttcctgtggctacatcatctatttcttcttgaaaccatatattagcagaactcatgattgaggaggccttcagaaattacagttctaaacaaatgctttgtactgaacatcctaactatctcactttctcttctgttagtacaaagttgaagatgagacatcttaaagaggtttgtgaaggacctctgttatacttgctctgtctcagaatgggggctgggcttttactttgctacccagtattctttctttctttctttctttctttctttctttctttctttctttttgatgcaaacagtaagaggctttattgcagttgtttatcgagctaaccccattagcttgggcctttcatccatccactatagcagatggctggctacccaatattcttgaaagtacccactcactcttcatctaaatgtcacaattatgaatgccatagttagggtttctgttggtgtaaagagacaccatgaccatggaaactcaaaaaaaggaagtcacttaattgggttagctaaaaatttcagaggttaagtccgttatcatcatagcacaggcagatatggtacaggaaaaggagctgggagttctataccttgtgtgcaggcaataagaggtaagctgtgttactgggcatagcttaatcatgtaggagacctcaaagccccccacagtgacacactgtatccaacaaggccatacctactacaacaaagccacagctcctaatatcaccactctctatgggggccattttttccaagccaccacattgcactccctgccccccataggcttatagccatatcatcatgcaaacacgcattcagtagaaattcaaacgtccccatagtctataacagtctcaaacttatttaaaagtctaaatttcaaagtctcttctgagtgggttcttgccctgaaatcacaactccctttatattcaatttcttcatctgtttatctccttgactgcaggacatagctccagtccacctttcttctcaaattgtacgttttctatttttcctttctcagcttgctccttttcattatatatcttcattagaccagcactaataacaactcctagaaatttcactgaggtaatctattagacttattttctttctctgatgtgcatgagagtaaccaagtccaaagtagttggttcctccttcatcagtacagtcaacagatgtgatattttgtgaaagagacaaatgacattgctattaggattgccacataagctcctctttcggtgttcagcaacctttctaatccaaagtaccaggttttccacattctgaaacaaaacaaacaaacaaaaataaaacaaacaacaacaacaaaacaaaacaaaacagacctgacactgcaacagctgtcactggcagcaatttctgcttagtttgattttcattttgttttgttctttttggagcctctcctggaaatggatctgtagagcaagcagtcctgggctcacagaaatatgcctgtctctgctttcaaagtgcagagattaaaggcatatgccaccagcacccttagtttgatgtttctattgtcatggtaaaagatcacaaccaaagcaacttttagaagcagagtttgtttgggtatatggacccagattgttagatttcatgattgctgcatgctaacagcaggcatagtgggacaacaaactgtgggctcacatcccaggctgcaggtaaaaacctgagagaacaatgtgggagcagcacatgcgaatgtcaggcttccccatgtacctctttatggaaaagcttcacacaatttgtctcatgtgcatttcaggatcttaagtgcttccaccatttcttctcttgtttctcctctttatctcgctgcacacaaacataaagttctcacagatgaacttcaacatgtacagtgtctgttttcagcatggcgttctcatttgcaagaaacagaactgtttgatgctcaaaagtcaaaatgttacaagagactgggcagtgacaagatcccaatcttagtcacagggctctgatgctaagcagattcatgattatctccaagatcagagacatggttgagtagttggggaactggaatgatcttgcttaagatttgagttcccagcatctacattatcagctcacagcaacctgcaactccaattctaggagatggaacactttcttttggcctccatggacaactggacttatgtgaaaaagaaacctgcaaacagggaattaaaaatgaaaacacatcttttgaaaaagattatttaggacaacaagtttctggtacttggctttaggcacaggcctcagatagaagaaaaaaagcctaaaccattctacaagtccttggtaactcttgttatttgagatattttgtcttcctttatcctctccttggccatgcaacttcagaaaagcatggtgagagaattaccattgcctcctttgaactagactcttcttctggagaataacaagcccacacattgtgtgcacatcctttaaaatggcctcatgctgacccaacatagtgaattgaaacctctgtttggagtataaaggctctcttactgagaggatgtagaagaccatgtacaaaccacaaacactgaagtgatccatggcaaagcatatagaaatcctatgacattgtgcttgctttcttagctaagggagagaaaaaaaatcatacaaagctttacttgcttccactcaaatatctctaaaataatgaaccatatatgctattacataagagaaatttctgaattttatcactcttttcttccattttattgtgatgaataaacatacagaaagaatacatatgggaaataagcagcatttgacttatggctcaataatgaagtgcagacaagtaagaaggtagtgattttgaatttatatttagttactttgtataaagttacaggcatctattgatataagaagaaacatttaaatatcagcaaactaaattggtaacctgctaggaagtttcatgtggaggtccatgccaccctgtaccaggaatgtattacctgtacaaaacataacatggtagagaaaggaccttcttaagagtgagcaggagatcctggtactaatatgacatcaccttggatgactggtgtcacaggcaaaagcctcagttctatgctttgctggcctcacaggtcccatactcacttgacatgccaactggataatcaaattgtgaattttgtggaatgggagagtttgcagagaaatttgctcgatgattagtttccttcactatttcaatttctttccagagttgcatatggaaagcatagtgtcataattttaaggatgtggaacatgttctttaaatccacccttcatgagcacatagggtcgggactttacctgactgtttggatcttgtcaccaactttgtttaattcctaggtcatgctaatgtggctatttctaagtcttaaactttgcctttattacttgtgaaagagcaaagattctctctgattgtactattgtgtgtgtgctcagagagagttggggcaagagagggagtgatggggcaggagaaggaatgagggggagagagagggggaaagaaagagatctaatatattccacgcatcaaataatgttcactgtttggagtccaaacagtccaaataatgaagaatttgtccaatcttcaaaatacatgaaatcaagaaaagaaagagaatacaaaccacagaagttaaatatatttattttctattgctgtaaagttataacaaatggagtagcttaacttgccctacatttatttttcattcattttcggaggttaggagttgtgtggtctatgtgatttctctgaatggtgtcttcaaatactgctgtcaaggtgttggttagggagatggtctgatacacacctttgaggatacatcttctccgaagataattagctcattcaaaaaatctgtcccatacatcttcagtcaaacagggcactaatacttcctagcagcagtaatccatggaatgacttctacagcttcttgtaccatagcctcccacctttgtaaaccagagtataacacattgattctttcaaagaagcagtaaataaatatacaatatgcctatgaaagtcttactcaatgtagcataacaggttgcttgttatcatcacatatcataaatagccacacatttagaaaaaagtgacaggagcaacagaaggagtttatgtcaggggtgaggatataaacctgaggagctaacttgccatacttgggagtagcatgtatgctcagtactgttcttactgattttgccatggaaacaacttaagaatgttggtagaatttattgacggagaattgttttcagattttttttatttgaattagaaacaagattgttttacatgacaatcccagttcccttctcccttccatcctcccctaccacccctccccctaaataaaaccctacctatcacatatcctttctgctccccatggatggtgaggccttccatacggtgtcatcagagtctattgtatcctttgggacagggcctagcccaatcccatgtgttttggctaagggaatattcctttatgtagaatgggctcccaaaatccaaacatatgctagggataagtactgaactactacaggaggtcctgtaaatttccaaggttacctcaatgaaatccatattcctggggtctagatcagtcccatgctgttatcccagctatcactctggggatcaagagttcccagaagttcaggtcagttgtttctatgggtttcaccagcctggtgaaaaccctttgctcttcactctttctatgcatctggattccagttcagttcagtgataagttgtgggtgttggtttctacttctgctggatgagggctattgggtgggatataagtcagtcatcaatttcattatcaggggagggcatttaaggtagcctctcctctgttgcttggattgttacctcttgtcatctttgtagatctccagacatttccctagtgcctgatttctcagtaaacctaaaatgtctccctctattatggtatctccattcttgttatcttctattctttgcctgactcaacccttctgctccctcatgtcctctgcatccctcctcttctccccttctcattctcctagatcgcccacacttcccgtgctctcaattggatgaggggatattgaccctttctccttttccagaggaccatgtgtgtctctcttagggtcctccttgtttactagcttctctgacagtgtggattgtaggctggtaatcctttactctatgtctaaaatccacatatgaatgagtacatatcgtgtttgtctttttgtgattgggttacctcgctcagaatggtttcttctagttccatccattttcctgcaaatatcaagattccattttttttacactgagtagtaccctgctgtgtaaatatataacattttgtctatccattctttggttcaggggcatctaggctgcttccagtttctggctattacaaattcaatgttatgaacatcagatcagatgtccttgttgtatgaatgtgcttcttttgggtgtatgcctaaaagcagaattgctggatcttgtggtaacctgatttccattttcttgaggagtctccacacttgatttccaaattggctgaacaagttggcactcccaccagcagtcgagaagggttcccctttctccatatcatctgcggaataaagtgtcattggtgtttttcattttggccattctgacaggagtgagatggtatctcagagttggtttgatttgcatttccctgatggttaaggatttgaacactttcttatgtgtctttcagccattttagattcctcttttgagaattgtctaatctcaaaattgtctaatctcaaattctcttttgagaatttgagagtagttctgtattctattttttaattggattgtttggtgttttggagactagcctcttgaattctttgtatattctggaaatcagccctctgtcagatgtgtggttggtgaatatcttttcccagtctgtgggctgccattttgtcttgctgaatgtgcccttagccatagagaaggttctcagtttcaggaggtcccacttattaattgtggatctcagtgtctgtgctactggtgttatgtttaggaagccatttcctgtaccaattaactcaagggtatttcccactttatctaatagggttagtgtggctgggtttatgttgagatctttgatccattttgtcttacattttgtacatggtgataggcatgggtctaactgtagtcttctacatgtccacatccagttatgccagcaccatttgttgaagatgctctctttgttccagcatataaatttggattgttcatcaaaaatcaggtgtttgtaggtgtgtgtgttaatatcagtgttttcaactctattccattggcctacctgtctatttttgtgccaatactaatctgttttcaggatgatagctctgtaatagagcttgaattcaggcatggtgatacctccagaagttcctttattgtacagagttgtattggttatcctgggtcttttgcttctccatgtatagttgagaattgttttttcaaggtctgtgaagtattatgtttggattttgatggggattgcattgaagctgtagatttgttttggcaagattgcctttttttaatttgttgatcctgcctatccaagtgcatgggagatgtttccattttcttatttcttctttaatttctttctttagagagtcaaaattcttaaggtacaggtcttttactttttttggttagtgttacctcaagatattttatgttgtttgtggcaggtgtaaagcatgatattttcctggtttctttctctaccaatgtgtcattggtatatagtagggctacagatttttttgagttaatcttgtatcctgccacattgctgaaggtgtttatcagctctagtagtcacctggtagagttcttcaggtcattaatgtagactatcgtatcatctggaaatagtgagagtttgacttcttcttttctgctttgtattcccttgatctccttttgttgtcttattgctctagctagaacttcaaggaaaatattgaagaggtatggagaaagtagacacctatgtcttgtccctgattttaggggcattgaactgagtttctctccatttaatttgatgttggctgtcagcttgctgtatattgcatttattatgttgaggtatgttcttgttatccctgatttctccaagacctttatcatgaaggggtgttggattttgtcaaatgctttttaagcatctagtgagatgatcatgtatttttttccctctgtttatattgtggattacattgatggattttcatatgttgaaccatccttgcatccctgggataaagcctacttggttatggtagattatttctctcatgtgttcttggattcgatttgcaggtattttattgagaatttttgcaccaatgttcatgagggatattggtctgtagttctctttcttagttatgtctttgtgtagcttgagtatcaaggtttactgaagcctcataaaaagagtttggcaatgacccttctgcttctattgtatggaatactttgaggaaaattggtattagctgttccttgaatttctggtagaattctacactgaagccatctggccctgggcttttttttggttggaagacgtctgatgactgcttctatttcattcgttaaaggtctatttaagttggttatctgttcttgatttaattttggtaagtgaaatctgtccagaaaattgtccatttcctttagattttcgaattttgaggaatataggtttttgaagtatgaccttatgattctctagatttcctcagtgtttgttgttatgtccccttttcattcctgattttattaatttgtatattctctctctgatgtttggtaagtttggataaaggtttgtctatcttgttgattttctcaaagaaacaactctttgttatactgattctttgtattgttctcttagtttccattttattgatttcaaccgtcaatttgattattttctggcatttgctcctctggggtgtgttggcttcattgttttctaaagctttcagttgtgctgttaattctctagtgtgattattcccctgtttcttcatgtgggcacttagtgctatgaaatttcctcttagcactgctttcaaagtgtcccataggttggggtatgttgtgtctgcattctcattgaatttcaggaaatttttaatttcttttttatttcttcctggacccaggaattgtgcaattggttgttacttaatttccatgagtttgtaggttttctgaaattggtggtgttgttgaattctaactttaaagcatggtggtctgataagatacagggggttatttcaatttttttgtacctgttgacatttgctatgttgccaattatgtgttcgattttacagaaggttccatgtggcactgagcagatggaaaattgttttgtattttgatggaatgttctaaagatatctgttaagtccaattgtgccataacttctattagttccttgatttctttgttaagtttctgtatggtgttcctgtccagtggtgagagtagggtgttgaactcccccactataagtgtgtgcagtttcatatgtgatttgagttttggtaatgtttcttttacaaatatggatgcctttgtgtttgaggcataaattttcagaattgagacttcatcctgatggatttcccctgtgatgagtaggaagtgacctcctttgtctcttttgattgattttagtttaaaattcagtttgttggagattaggattgctacccctgcttgtttcttgggtgtttttgactggaaaatctttctctaacctttaaatcttaggtactgtctgtctttgaagttgaggtgtgtttcttgtgtacaacaaaaggatagattctgtcttcttatccattctgataatctgagtcaagattgagttaaaactgttaattttgatggatattaatgaccattcattgttcattcttgtttgtttttgatttggtcatggtggtgaaattatgtgtgggattctatctctttttccctttggtggttggtaaagtgggattatctattgcctacatttttctggttgtagttaacttccttgggtagttttccttccagaactttctgtagggttggattgtggatatgtattttttgaatctggttttgtcatggaatatcttgttttctccatctatattgattgaaaactttgctggatatagtagtatgggctggtatccatggtctcttagtgtaggtagactatctctccaggaccttctggatttcagagtttccatggaaaagtcaggtgtaattctgataggtttgcttttattagttacttgaccttttcctttgctactcgtaatattttctctttattctgtatgtttggtgttttggttattatgtggtgaggagcccttttattttggttcagtatatttggtgttctgtaggattcttgcattctcattggcatgtctttatttaggttgggaaacttatcttctatgattttgttgaatatgttttctgtgcctttgaattggatttcttccccttcttctatacctaatattcttatgtttggtcttttcatgtatcccatacttcctggatattttctgttagggatttgttggacttaagatttccttatcttcaactcctgagattctctcttccatctcttgtattcttttggttatgcttatgtctgtagttcttgatcatttacccagcttttctatttccagcattcccctctgattttggtttctttattgtctctatttcagtttttggtcatgaactgtttccttgagtgatttgttgatatcttgtattttttggttggtttttcttccatttcttaagggattttctcagcactcaggacatcatctataaagaatcttgtgtttgaagccattcttgctttcacagcatgtcccaggtaatcctgcagcacatagaaggcactttgttaacaaaggaaagcaaaacatcaaataattaaatgagagaaatacttattaatgttttattatgctgagactagacataagagctgaatgacaaattttgacaaaataaaaataggcacatgttttgaggaggttccatcagaaccagggactggtaggtaaacatgatgtcactggggaactgaaccttactcatctggcagttataaagtctagtcatttacttgtgtcttatacaactatgtccactataatttttattttttactcaaatccaggtgaaacttcctagtctatacaccttgacccctacatacaggcaggagttcagaagtagggtactgatgaagactccagagcatagcttagctcgggctggggctggatctttcctttctttctgtgttcctgcctggaatctgaaaccaaccatttcaaggctacttccatactaatatactgggtgtgactgtctttttaaacaaattactaaatcatctttgatatttgatcagtatattcattttatgattgtcaatgttgaggatgctatctcatagaaatgcatacataaaatggcagaaatatatttatagccattttagaaattgttacaaattctgtttttaatacaagcccaaaatttatataatttgcaacccaaaaatttatataaataagtaactcaaacaactgtctcagaattaagcatttaaataaaataaagtcccaagaattagtaaatatatatctatacctatatctatatctatatctatatctatatctatatagatagatagatagatagatagatatcaagtaaaccattatgtatgttattatggttctggaagaggagaaatatttgtatgttagtaagagcactgtagttcatttcaaacagcaggcttgaattcaagctgaagagtttcagacagtattcacagtcatcaggctagtactgatacatgctatttcagtgcatttacatgataaaacactggtagatacacttcagatccattccttttttaaattaattttaaatcaattttttggattttttgcattctgataccatttactactaccaacactttaactctacatctgtagtcctgaaattcccccaaatcatcaggcttatagagtaagagactggggacttaaggaagatatgtcacttctcacttgctggtgtcaagatcttagtgtttttggcttggatgggatgagtttcacccaagctgtgtctttagggtcaaatagagagagcttggtttaatagctgtgaagcattggcagcacccatggaggagaaccccaggctctatgaagttgagaagtatccacagtacctgggacagggctcaatactaccaaaacttgatcttttactaaattttagtttatttatgcagtatttttttcttaattgctggattttttggggggtggttgaaaggtcggctcatgaattgagacctcttgctgctcttgaagcagggctcttcctggttctcataactcacatggaagcttgaaaacacctgtaacttcagttctagggactcctgtggcctcttctgaaaatatatggtacttgaatgaacattgtacacatgaacatacacacacacacacacacacacacacacacacacacgtcttcttatccattctgataatctgagtcaagattgagttaaaactgtgttttaataagtgaaacaattaataaaatatctaattacttgatactcttaatattataaacaggtgagctttggaaataattttatcatctttgtttatacttctgggaagagggtctacagagcttctgaatttaatatccaagaagtagaatctttggccttagcttttaacattgatgaaataatgatacaatactcaaatcaaaaagggaggtcaaatataatatatgcttaagggtttataaggacaaccagatattataagttgtaattattaccagtgatcaaaggacatttggaaatatttatttgaggcaaatatatgtcttctgaattaatgtgccttttgagtcttgctttacaaagagtgatgtaggaaacactgcagggacaggaatttgaaattaagatcccaagagtttccttcacctttctacacagaataatataaaatgagtataatacatgccttctagcttttttaggcagactgaaatataaacacctgaccaagtgtttctgggtaagcatctgattgttgtataagagaatattttatagagaaaaattgaaggcaattatgcaaattcaactaagattgtattttatagtctcattatttgacatttatataaagttgttagagagtgatgagtattaagctatctacacacaagcttacatcaagtacagtttttttttatttttataatgatcccatgtataaaggacatgatagggcaagaggaataatcaaagtgggaaatgttggacaagtaacaaaaaggttgagagatgtgttggctgtatggaagttcattatgaaattaactattttaacatttagattttccttgatataaaatattttgagtatctagagtaatgcctggaaaagaaaaaacatggtaaatctttgactatagtagcaatcacaatgcatgtcaaaactcattccaaccagacgaagtttaaacagtaggaatagttcaaagttgtttcctcattaagctctgttactatggacacatcagtcacctgcacatggatatattttacatatatagtatcattctcaaaaatccccagaatttcaacacacaaattcaaatatttttacagacttgtgaaaaattaatatttaaaatttcattccaactggagcatatttgaacattaaattggatgatatttctagttatatgatggcataggagtacatatagaaatatcaaaagcaagacaagtcatcacatcacatggtcattttataccaggggaaggaataaactatatatccatgtaatttttctttaaagatggaataggtgtctagagatatgttcttcacttttctttctttctcttatacccttccttttgcactacttccagatctcagaaagtggtaatgaattacctgacattattattagtttttattccagttctgctttgttttgctggatctatttgagtcaggattcttgctctgaagccccgattcccccatcttacaccacacaagcactgggtgacaggtggaggccatcatgtctggatcaactttttatgtaactcacaaaagattcagaataatcatgttagctggtgacaagaattatattcattccacttagtaaataagcagagaaaaattgaaatgtaaaattcaatttatgtgtccagatttttaaatagcaataatgtattactgagtgattgtgcaatgagatgccaaatttgtctgccaataatttaagcacatgaattttaactactgagatcataaaagaagggttgtgtaataaaaattgggaaggtagtgttactcaaacacaagttagaatcaaaagtaaccctgggaacataaagaatttgaaaagcttaagtatgctatttaaatttacataacctcacagatgttgactattttctataattttataataaattgcttagaattctctgtactcactaggaatgatttctcagaaaaactgaaatacttgaggatgggtcatgtataatggtcatctctactttccatccctctccagtaagggtccaaagaggatggcttcccagacaccaagggcttgagtgcatattactctgttaagaaagggagagtcggacagttggccttttgtaactattaattatccaggaaaccagaagatgactccaccataaatattttttctaaagagatgcgcttaattatctatttagttgcatccttctagacacccttcaagggtccctccatctttcaacgtgacttcattataggccaagattatatatagcacacgaagccttctggaaaaattttgaacccagtacaaattgtgccactgtacacactagtgtgtacaaattagtacacactaatcttagaaagttattgttaaaaattaatagtagttgtcaactaagtgtgctaatcattgttgctcacattatattggctttcatgctgcatttggagttttcttggttctgaaaatctcttctttgtaacactgaagagctggcagtggcaggtatctatactataatctagaaaccaagggaatgtgctcatcacaagtatctaagactagacagaagctttctctccaaaatcaggttatcttacaatcctcagtatcagagttgagcatggagtaatatcctctgaaaaattttcatttatccagtgtcttgctccaaactcattgtgtatagtacttactattgagtatagcaggtacacactttaactgcatgaccatcatgtagaaaagtgcctaagtataccctcagctacaatatatagactacaaagacatgaatttaaatgaaagaaagctaaatcaggcaaaataaaaaatttgcaaaatctagcatattactgaaataatcagtatttagactaaatagactaaaattatgttaaaggcaacacagaaaaacatcattcaaaaggataaacaatcaaatcacaaatccagggtaaatctgactccaggtctctctgggggattcagtggcaggacaggaataggggccacagttctggagactcaaacagggaaaggtgagcaggaaaaagcctggcagtcacctcttccactgggtgccagtccaagatagatactggcggcagatactggatgactctgtctgactccagttctctctaatattggagaggctaccttaaatgaccttgccctataatgagtatgaagaataccttatatgccatcctagagccttcacccagtagctgatggaagcagaagcagaagcagagatccacagctaggcactggcacaacacttagaatccagttgtagagagggaggagtgatgagcaaaaaggtcaagaccaggctgaagaaacccacagaaacagctgacctgaacaaggggaagttcatagacccagccatacagctggagaaccagcataagactgaaccagaccccctgaatgtgaatgacagataggaggcctaggtagtctatagggcctcttgtggtggaaccagtatttattcctagtgcatgactggactttgggagtccatttcccatggagggatactctctaagcctaatttaaataaaaaatatttttaaaaatccaggataattttaaccacacttcatcaaaacacacacacacacacacaaaagatttcttcacatcaaataactgatttccatttaaaaaccaactgactctaacattagaatattttaaaatgtgttgttaactgtatgtatgttttcagggctgggcatttggcactggagagtcaatagatacccaccaactcccaattttcctcatttgcctattgtctttttatagggtgagacattgcgggatgttcccagtccagtttggcatgtccactggtgtcattcacattgtacagcttcttgtacactaacgttggtgagattttatgagtgtagcatctgacagttctaaaagacaccacctcacaacaaacaccctgatcctctggcttctaaaacctttattactgcacttttgcaatgttccaagagtcttagggatgggaaacaggttatacttatacatatgtatgtgtgcatatgcgtacaatacatatatgcatgcaataacaattactgaataaagagacaaaaaaattaaggagattggagaggggtatttgggaggatttagagggaggaaaagacagaaaacgtaattataatcgcaagtactttaaaatgtgttgtgctatttagcttttcaaaatacaaattagcccccaggatttctgtttcctctaaaaattactgtgttctagattacttaatctaagtgtaaagctcacatgaggttatatgtaatacaagagctcatataaggagcaagttatagttctaagggtactcatgatttttagagcagttaatgaatcaagaatccaacttattcaactttaggcaaaggaagatacttgaggtggtggcaggcttaaggcccaggctgacaaaatctgctgctctgcagactcacattcaactctttgagtctgtctactccaacatcaactcattctatgaactgaaagagctcatggaggggccagtcctgttgtccctgactagggccagtcttaggctgattggctggcccccagtttggacctgctttgactagagcctgtgcttcttgctctgttggaagatggagagcatggggaaatggtgctgcctgaaggatacaaatgcaaaggtagacctcagcaagtgtcagggaggctgacatcagggtagagagctatgcagcagtctggagctcccacaaaacctgccccagaatctttgcctaaccacaggattaccctgactttagacaacagcaaggtatctaagatgagaccctgcaactgttcaggatatatggtacaacagaaatcagaaaccttgaaccataccaacaactcatctcaatgaagaattccatgtaaatctgtttggggaaaagtatatacagtgatacactacagtttccaatgccactacaaggaacaaatatgcaaaaaagaggtaagaaatatgaaggaatggagagatgtatgtggtggagagaggcagaactctaccaagggccctgagcatgccactggtaggtgctaccacttgaatccatgttgatacccatgacatctgcatccagggactcttgatgtctgtggcccatgttaccattgaaaatcatgtagatgtatgtgcctgaagccatgttgatatctgtgattcatgctgccatagggatcctattggtgtccttggccctgaggcattttgatatccttggcctttgctgttgctaaaggctgtgacgctgtacatggctcacactgcagcatatcacaccagtcaggagaacaggtaaaagctacactagcaagaaaaacgtaagtgaactaaggcagagactcactgctggaccaaaggacatgatagccccaagaaccttaggtgggcagcccacctgtggacctcctccaatctctcagtacccactttcgtttcactatccccaatcccatttcacttcccatcatcctgacccaccacaaacctcagtcagaaagctccttgaggcaccaaaggccaagctagcaaacagaaatctagacacaatcttggacagagactccctgctatgccagaaatctggttaccagaaatccaggccacaaagaccagaagaacaaaggagaaacataaatgaaggaagaaatacccatccacgctgggcgttggtgccgcacacctttaattccagcactcgggaagcagaggcaggcagatctctgtgagttagaggccagccgggtctccagagcgagtgccaggataggctccaaagctacaccgagaaaccctgtctctaaaaaccaaaaagaaaaaaaaagaaataccatccaacaaagacaaacttataaattgtcaactagacctttaaacatcccaaacccaatgcctagatgccagtgcaaaaacagagtcaacaacaaccagggcaatatggcaccaagagagcccagctatcctattagagcaagctctgaatattccaacatagctgtgtaaaaaccaatattttgatattttgaaaaggtagatatcttgtccttgccataggaaaattgattcaagctaaagatggcatccatttttataatcgtaaaacaggaagatttcggcaactttaaggacagcttgatctatacagcaagttgcaggctatccagtaccacagaatgagaacctgtctgtaaaaacctgatttatacataagtatatgcatgcacatatggtctatcaggatattgttgctactgcttgattaatttttttgttggcaagatctcagtgtgtcatctagacctcaaattcttactcatcctgacttaatttagttagggtttctattactgtgatgaagcaccatcaccaaaaggcaagttgaggaggaaatattctgttcatcactgaaggaaatcaggacaggaactcaaacagggcaggctcctggaggcaggaactgatacagaggccatggagggcagctgcttactggcttgcttcccaccacagcttgttcagtctaccttcttatagaacccaggaccaacagtcaaggtttggtatcacagcatcatggagtgggccctcctccattgatcactaattgagaaaatgccctatatctggctctcaataaggcatttcctaaactgaggctccttcctctgaggactctagcttgtgccaagttgacacacaaagccagccaatacaacagattaaagaagtctgtagccaagtctggagttcatgttttttttttttttttaatgaacatatattcagtggaggataacagtaggtaacataacaaaagtcaagtaacctaaaatatttacaagtaggcttagatgcgacatgaaatgtacaacgggatcagggtcttgaagaagcttgctatagaacagaaaggctacaagacctgcctatgcagaggatggtggtgacaaagcaaaatgaccatttccttaatctcaagaataatctgaaatgaagtgagacagccactgcaggaatattgatcctaggatacacattttaaggacattaaaaagaaaaggaaaagaaaatttacctaccagtttatctgacagaatatacacttcaataaaattaagagaatttaaaaaatcaaaaagaaacaaggcaaggtccagaaagaataatcaagtaaagaatgttggtaatagaagccacattagaagaaccaagctgaaagctttggaacaatttggaagcatcaccaggcttgagaactgcagaataatactcctaaggaagaacttcagtgaattacttggaagaacaacacatagttcattgaatttatagttgtgttccagaaatatatgaagatatggaaaacatcagatatctcccactttccttaaaattatagcaaataatatagaagacagaaaaaaagtaggaaagaggagggtggctgggtttaaggaaaataaatgcataaatcttttgcaggaaaggggatacattcagtttatggcttgcttaaatgatgaataattatactacaaataagaaaataaattgaacaagggctaggtctgtgtcatggttttaaaaatacagcccccagtaggggtggtactactactggcactccctgtagggaggtatggctttgctggagcaaatatggcctttttggaggaagtgcatcactctggaggtaggctttgaggtatcatatatgcttaagccacacccagtgtctcagaccacttcctgttgtctgtacaagatgtagaactctcagatgcctctccagcaccatgtctgcctgtaggccaccatattctgacatgatagcaatggattgaatctctgaactataagtgagctacccaattaaatgttttcctttgtaagagttaccatgaccatggtgtctcttcacagcaattgaaacagaagttgttcccaggggttgggttatttctttggtaggccataccatgttactatttagaagaatatcgacttttggagtttgggttagcaaagcagtggaatgctttaagtgcaacttaatgggccatactagtaggaccattgaagatagacatgctaagagttatttgtactgtggagtgctgtctcaagaggttacagagaatattaatatgtggtctagagaatgttcctgtgatattttgatgaagaaccagactactttgtgaccttttctaaagagtatatctgaggctgaagaggagagatttggattagttctgttggcaaaggaaaatctcaaaagagcctagtattgcctctgctgtatggctactagtgttcatgcttgcaaagattcatgataaaaaggagcaagctgagtaaagaaaactagaaaatatacaatttgatgagaaaaggaacaccaagtagagaatggaggtaagtcctgtgttcaaacagataaacatattaagaaatggcgtatagggagtggtgacctcagggctagatcccgccaagctaaatttacaacttgtaaaaagggattaaagaaaagcttaaggaagtgtatggtggtgcatgtctttaatctgatcacttgaaaagcagaagctggtggatatctgagtttgagtcaaatctggtctacaaagcaagtttcaggtaatccaagcttaggttgataaggactccattagaaacagaaagctggtgaagattttgttgaatgagatacccatgttccaaccccaacaaacagcaaatcttggcagttctggccacatggttttggctttagagtcaaggatagaagaaggctatggacattctttggagactaagggacgccacagaggtcaggcatgaattagaggtgcccctgagtggaggtctggagatgctgttgtgtcaaactgtgaaagtgaagcctggattgccttacagaccccaagatgttggagatgccagagccatggggtacctgtccaggaaatctgctaatgtaagatccccggaagctcaggcctccagaatctcagcccaggaccaaggtcaccccaatcaccaggaggattcgaaagcttgatgcaaactgcatgaggctttattgtttaacaagctaacaccatgttagctctggcctttcatccacccaccagggcgaatggctaggaaagacagctcaaagcgtctgcatagagaacttatagggcagtgtaaggggattgtctaggggtatgcacaggttcaggattagtgtgcctccaggcttggagggcttgccctctattgattagtcaactggttgttatggcccataggccctccaggggtggttgcaatgctctgctcatcattgctgtgcacctgttgtaaagcacaccccaaagccataaagcatagcaccaccagctaacttctgattggttccttgccacgaggcaggcatctaacctgttagtgactaagacaaggtcagataagcacgtgtttggctgttatggctgctgaaagggggagctggtcccttcattaacagggagtataaccagctaagagaaagaaagtgtgttgcagtcaacaaggctgaacggagttggaaatctgaatagcattttgacataagatatagacatgcatagttaggagtttgcccagctggttttcaatcttgctttgttcaaatatttcttcactatcctcccttccccatattttgcagtggtaatgtatgtcctttgccattatatgttggaagtatgtgatctgccttttgattttgattccataggagattacagttaagagattgcatgaaactcagaacagactttgaactttagacttttgaataaaattgagactataatagtctaggagacttttgaggttggactgaatgcagttttgcattataatattgttacaaacttttggggggcaaggaatagaatgtgttagtatgaaggaaaattgcccccaaaggaagcggcagttttaggaagtgtggatttgttggaggaagtgtgtcactctggagacaggctttgaggtctcatctatgctcaagccatgcccactgtctcagatcacttagaattgcctgtgtatcaacacatagaactctcagctccttctccagcaccatgtctccctgcatcatgccatgtcccaccatgatgacaatggactaaatctctgaactgtaaggcacctaactgaatgttttttttttataatagttgctgtggacatagtgtctcttcacagcaatgggaagcataactacgacagtctggttgagtggaaggatgaggttttaagtaaggggatgtatgtgagtctctaagagcaatactaatgctgcaacaaccaccactaattcaatgcttataacaagtggcacaacttgaaatcatagaaatttattagcccagtttagcagaataaaggatacagttaacaattattgtgtatatgtgcagatgaagaacatgatatggtcaagtttaaataataggtccaatcataatgtaaaagtataatctaaattcctattcagcatattaattattcaaattactgcacgcagaacaatacataattattagtggagagtatgtaaccaccagcaattctctatcagtgaagaccaaatataatagtcaagatatccttgtagagatggaatactaaagaagactgtcttataggcatttgttattaacattgtttaatgctctcaattagtcttagtctcaatactttgatgacagattatctgttaggatttggtgaaataatctcctatttgaatgattttgaaaacaaattatatcttaaaaatgaagctgtgaatcaaatcagaacaatatcaagcttgatacagtaaaatcacctgtgatatcagtcctaggggcatttcaaattttattatttgcattggtataatattacatacatttccacctctaggatgttcgtttcttacactcacttcaagaagattaacaattgcatttccagttgactcttggggctgggaggtggctaaattggtaaagggatatgctacctaggctcataatctgagttcaattctattggtgagctaaagattgttaggttctttgccaatgtagaagatagaataaagtcaggatgaatacctgaatatcttgacaacaattgtagaatgcttgtgtcaatgcttcaaattggcaatacaaatgttgttcccttaaagttaaacaactctaagagaagcagattgaggctgaggtccactacttcagtccagtcatctaagagagtagtgtatgaaaatcctgtaagtgaattgttcctttagggatggctatagacatgcccatcctgatttctggattccatacaaacaagcataaagattgtggcccaaccacaagtctaaggagtatgaaccaccatgaattataaacctatttgaaaagaatgacttttttgtttgtagtttaaatatatagtcctcaatttgatatctgtaatagcaacaaaaaatctgttaaaacacaggacacgtctattaggacttcaaaaataggcagtaaatattttcaggaaaatcagtttatttgtttcccagacaaagtcagtttgcctggcatttcttttgtaagatctcgctgatccctgatatcatgtcattgtaaaaaatccatcccaatgcagacagataatccaccatatagattatgacccagtagagcaactacagcatttttatggcaccttaatttgaaaacattggaaagagttcatgaaggaaataattttaaagagtctaagaagtagaatttatcaaaggctgcacacctttttatatgaaaaactgtggtagagatgggaactctaacaatgaacaagacatgatcccatctttcatcacattaattgtatacaagaaacatgacaaataaaatgtgacacacaagatagactttgtgccagaactaataggaataggatgaggcaggacactgcattaagctgagaagaaccaaaagcttttttactaagagtcagacatagtttctatcaaggtgacatcccaccaaaggtgggatctagtagagaactaagcacagaccttgaacctatctaagttataggagacagcatctttgagtatgttaacaatagaagaagcctgacactgtaggaaaacataaggacaagcaggccctctaaattgccaagtccaaatagcgtggaataaacataccttagattgatggaaatctgtggactgagtcctcagagcaggtgtctgtgttccaggcttctgtgatggaattactggtcatgaaaactctagttttcctagggtgctataaaaatgttcttggctgtctttttcaattttgtagacatttcgaaaagtttgaattcttgagtataatgaaggagagacataggtgactgtagacaagaaggtcaaagtcagtttatatgctactttgaattatgtgataaagcacctaaaacttaatggacagtcatttaaaaggagtgaggtgatttagtttagatttgacaaggtctgtatagttgctattcatagaggttgcaaataaaagtatctgaatcaagaaggattccacatgacctgtaaggaaacctttgagacttgcaagctgaagttctaatttctttatgaagtcatcagagattgaagcttcaccctgaggactcatcacaggtgtcttttaatagaaagtcagacaatgccattgttagctctgagaagggcaacacataaagaggaaatgctcatatctactattgcccccacacatcccaaacccccagttatctgtgtgtgaacaacatcttaatagtacattaatcttccccaaaagataaagggattgtgaaatgctggggagagctctgacactgatcagttcccactcaccatgccaacttagaataaagacaaacatccctagaaataaatatttatccatgacattttttatcaattaactttcttgaataaaccacaaagctgtctattatcccagagatgataggacactaatcttcttgctgccatgttgagcttttctgactaagtgttttagaaataaaacatgatagaagttgctagccatgccagtagacgtcacatatccacactcaatgacagtgcaatttacagattctatggatcatcttctcaacctcaccacacaagaaacaccacttgtttcttctttgtttaatgagttttctcagacaaatagaataaagttttattttcttttcttaaaccactacaaagtatcataacattagccattagttaaaagtagattctgatatctgtatattcaatgtttcaatatagaaaaatttctattcttctttcttttgattacagaatattattttaatgcactggagtactgaagtatttaatgaaaagctttctacagtgaacaagaaaaaaaaacagagctggaaaaggatgatatctactgactcacttgatgtctttagggtgcagtgggggttgatgggatgaatagatgtaatatagaaaagaaagtagtaggggccatgacatccttgaaaatatgagagacacaaaagtaatggtggaacatgaactcaaggcctttcattgaatcaaagatagatactttatcaattattacaaaatacaagaaatatggccatcttgtgcaggtatatggggtatgtagaaggtgtacatacaagtcttagtttttaagtatgaggaatatattcacatcaattatgttaaaattagtatgaaaataaaatgtacctgactgggtgggaaggatttttttattttcttacaatagttcatatggaaataccacaatttatgctatcttgtaaaatttatgttgatcttgaaaagtaataaattctcacatcaagctatgtattctgttgtctgtacaagatgtagaactctcagatgcctctcgctttatttatcctgttgatgagccagcacctcaggctttgttgcttctgatatatcagatgttttttctgctctgcttcttagtctggctaaagggaagctgactgtttcaaccccaccaagttagatggactcttagtatacttttgtaaatagaatatctctattttaaaggctatttggcataacatttcatatgtttattcatttactcaatcaagatttattaattccccagaccccttaacagacacagatcacaaaaatctataagaatataatgaacattttattaattagaaaaatatattctctttaaaatttagcattaattaagcattatctttacatctgcctcttatatgatttctttccatttcaattgacttttgtatttcaaggtgtaactgtgattttttacctctaactgaaggacctgtggtggtcagtttcaacaaattaaaacatgctacaaggaaagataattttttcccagtttataaaattttaatgtaccctggacaaatattgtaaatattttcatagactttcaaatcattcttggtagataggtgtcatgtgctatggaatattagtttaatgatgtaaagatgtgttgctgtttgaccttgcctgcctaaggcacctgatgaaataaaaagctgagtggccaatagtgaataagcaaatataggagtgactttcaggtagagagtaactatgaggaggaatctaggctccagcgagagagagggagagtgggaggcaccaaggagacaccatgggccagccagacaaggaagaagaaggaaagcataaaatacagaatgaaaggtaaaaagccctgaggcaagctgggtggtggtggcacatgtctttaatcccagcaatgggaggcagaggcaggcagatctctgtgagtttcaggctagtcttatctacagagcaagtaccaggataggctccaaagccacagggaaaccctgcctcaaaaaaacaaaaacaaaacaaaacaaaaaaaaccaaacaagtcctgaggcaaagtggatttacatgagaagaagagagcaacaatcacatctctgtcaaatataggaattttgaacactaaggtaaggttgaacattcataattaataaaagttctctgtgtcattttgggagaaataattggtagcccaaagaaaattccaactacagtcttggtcaaagaaaatcaccaatctccctcacttagataattttgcaacttttgtgatattcatgtttatttctatgcatgtaaagcccatattgtattcacagtaagcctgataaatatatgtacaacacaagccatgttaaatgaagctgcttatattattcatgctcctaatataggatatttgctgcagtcatcaacatgtcctctctactaaaaagcatcctcttacttagtaaatgctgattgtgagagaagagatgggaaaaagaggaggaggaggaagggatgtgggcagcagtaggggagacacaatggtgctcacagactagggctacatctgggaagacaaatttaaacagaaccacactaacaaaatccacctaactggtctgactttgcatctatatggaatagatatattcacttgcatagatttatatggggtctgcacctgaaccagtgaactgtttaacaactaccaagaagacttgtcctcggcactgtatagttttctcatttgtattttacattttgtggctcttattttttggaaacaagtcattctgtcacctaggatttagattggtggaactgaacatcctctcacttcagccacctaaagtgcatggattagtttttcttgctcttcttaatttgagttttcaattattcattaagatatttggcctgacttggctggtattttaaagtgtttttggattcatgttcatatgggcttactggaaatgtgcagaaaatccaaatatcagtaatattgagagctcattgcttacgcatctgcttctcaaagacttagagagatgagatgcaccattggaaacctacagtctttctatttataaaggttagcatcttctgccaagaatcacttagtgaatttccatgagaactgcatatgtttcatactgcagttagtatttaagctttttaaagtacattattgtcaaggggactgcagagcctcagtatgcatccttatttatttcaggttaaaaaaaaacattcaaagttagattgcacacttatcttccataaaaaaaaacattatactatcacatgtgcaaagtagattcacatgagagaaagagagcagcaatcacatctgtgtcaaatataggaattttgaacactattaaataatatttagaagataattttcatctcatttttctcactgccattaatatggcatgatgtctctatttgtctttaagggcatactgaatcaggttgtagttagcaaaacttattttttaagaaagaaatccatagatatggtttctgcagatagcccatggcatccatgttttcaacagcatgcattatctcatgaaatactgggaattgaacctgggcttcctccatactgggaaaccactccaccagctgagaactgccccaactttcctaacttcatggatctcttagtttgaaaatatatttggcttaattcccatctaatttttcaagtacacttaattgacagaccagtttttatttttcacacttgtaccataaagggctctagctggaaaaaaatatttggtgaaaaggatgaatcattatcaagaaaaagggaatagaaaatgggacattcttgtgaataaagttctatgtcattaaacaagtccttacagtttgctggcagtttagttaacaaacaggttctgaatattaatagccctacttatacagtataggatgagcacacacatatgtatatgcatatatgtgtgtgaacatttttttaatttttttcactttgaatttcacttgctcaagtgttatttagattcacttagcttatatttattttgacatttctgtagttgttgtttcataacttagttctttggtgttttgaaaacatactttaaatgattttaatccatgtaaatttactgattttaattgagaaaattatacatatttatggtatattgcatggtgtttgatattaggattggagaaatgactaaatggaggtaactatacaatcattaccttatacacttgcagtttcgagagagtgataacactccctctaactttaaaatgcccaatgtactgttagtactcatagtcatcagggcatcattagatctctaaaacatttgaaaactgagctgttgtgagttttagactgttgactgtatcttcctatccccacaataagtccccagaggcctatgttctaattttgctttgcaccagtgtaatgtttcagattttatatgtgtataacatcattttgttgactgcataactgaactggagaccaggaagattacagacagctatttcttacagtcaagtggacagggatgtctaaggttgatggacctggacctgacagggcctttctgctaccgaaggcaacaagtaataaaatcatgatacataacagagagtggggctaaactcatctttttcctgtggcagtgaaaagtttctctggccatgatccactgatgaagacagctcacatgtatcttagtggctcagattcttagtatagtcaggaactaggtacaaagtttccaacacctgaggctttggaatacacactgtaccctaacattacattgttggtcccctgaatgtaattttcacatacaaaatattgattatattttattaaccacaaagtcttcacttactatttcacaaactcagaagctcaaaatctacagtgctgcctaaattaaatatgagacagactcaaggcacaatgcatccctgggcaaatatattttttcccatgatactgagtatcatggaaaacaaagtacttccaaaatgcaatttgagtgcagacgagaaaagatagccccatatcagaagaggaaactaaccaacaagaaaggtaaccatgcccaagtaactccaagagatgagagaagacagtattatcctacattctcagtgaaactatgtggagaaataaacagcctaggccctcatgggagatagcagcagctgtctcctctcaggctgaactgctttcacttagcatctgtatgaaactggtgcctcactcctgcaatttctcaaacctgaagttgcattttagtgacccagctctcagggcttcactgggcatcactgtatgacacctgcagtggccttgatccctcaggggtttattgagtatcttcagaccctcatttttcccttttctgtgattcattctgctagtgaagcttttcactgattttattttttattatttatttatttatttatttatttttctttgagacacagtttctctgagtaacaggcctatccatcctagaactgattttgtagaacagactgtcctggaactcacaaagctccacttgtctctgcctccagagtgctgagactaaagccatccaccaccatggcaggttctgattttatttttatttaactaaattgtaaaatttccaccttcattttattttgagtgttctctggtatttctaactctgttgacttctgttttgaaagcctggatcgtccttatgtcattcagttgcttcttggtgtcttctctgttgccaaacatttcattcccatcctcggtgaggtcattgaaatgcttatcccctatcttctgtgagcagatttatattttttttttagttcttggcccttagttttacttacattgctctcgtgtgggactgttactaaggtatctgtggctcttggcaggacagctgagcatagctggatggcagcagccagtgctttagggagtcctgaggcaagagatgacagggaatcagcaagggccctcatcatgctgagagagctacaggacagtgacaaaggacaagatgggggcttggggagtagcaagtcgtgaggtctgcaaggaacattagaggcctgcttactggccctaggggagtggctgaaagggaaattcaaagggaagcagtgattctgcagctcagcccacagccaaattgagtgttccgtgttccagaaggaaaatatctgcaaagacaaggcaactgcctgtcagtgattgactttgtgtacagtattgatgaagtcttctaaaccctgtcaggtttcctgtttaggaacctaccctctgcaagctgaataatgaaagtgctgttgagatttttttttttttttttttttttttgttttttgagacagggtttttctttggcactctctctggagaccaggctggcctcgaactcacagagatccgcctgcctctgcctcccgagtgctgggattaaaggcgtgtgccaccaacacccggcctgagattttcttttttctttacacttagtcactagcttctttgcagatgcccagactgcctttgtgtttccctatacacacagtcacagtatctttgaactatttcactttctcctctagtaatgattctagttacttaagtctttattaattttgtatgaattatattttcccaccattctaccttcatcaatctgtacttaagtatatttcttatagatattgagtggttgtgtcaactctagctttttagtgggagattggtatgtttatatttttgtattaatttactttttacattccaatccgagttccccttccctcctctcctctcattctcctcaatcctgcctcctcccatctgctctgcagagagggaaagcctccctccaggaagtctacaatgtctgttccatcatctagttgaggcaagaccaaggcacctcttcacccccacacccctgagtctaggttgggcaagatatctccccgtatagaatgggctccactaagtcagtttgtgtactagtgttagatctttgaccaactgccagtaacctcatatattgttccagtcacaccattgtcacctatattaagggagtctagtttggttttaggcaggtttcccatttgtcagacctgactcagtgatctctcactagcttgggtcagtggattctgtgggtttccccatcatggtcttgactcctttgcctgacaatgcatgtcagggtgtgctgaggatgaggtcaggatgaggaaagatagggtttaaagtgacagacaaggcaaaggggagccccttctctctggcctccctgccttgctgcccctggcacgttctggcttatgtttggctggcatttatctaataaaggatatcttaacctcactgattactaatatccctcgttagctgttggtatgattctaattaatgcccttaacaaattattcacaattttttgggtgtttgatatatatattttaacttttgtaatttctgagatacctctgggcaatctgtcttgttttcacatttctgtgacttgattttttttaatctggtattcagcaagttctctgtcatgtctcactatgtagccctgactgacctagaatctcctgtataaaccaggccggcctcaagacattgaggtccatgtgcttctccatccaaagtgttagaatttaagctttttattaaaggataatttgaaaagttttatcctttggcaatagacttttagtatgtggtttattgtgttaaattatgttgaaatatagaattaaattagttggctaactttgcacattcatggattattctaaaattaaagatagaattgtgactggctaacccagctgaaatctagcatccatatgtccatgaacaggggaaattaataggtgctttcctatgagtttcactcctacatggaatagtatatacatatataaaacacaagctcagccattacatactttattagtgttaaaatgtttctgctcaatcttttgggtttcctgaggataaacagagatactgcaaactcaatacaagatacctgagttcttatgaaggttttaatattctgatatcataagtgttacatcataagtgttacattttataatttctgatttattgtctcttcattggggtatatagaaaagcaattattctttgttgattttttcacatcatgcaccccaatatcaattacctctgagttcctccacatattcccctcacccctcaactgtcctcccccaaaaccgctggaattaattaagaacaaaacaaaacaaacaggaaatcatctttgtcttccttattttccatctcccaatcacttcctactttgtcctagtggtattgggagctgcactgtatcagacaacacacacttttgtccaatcaaccccaccaccaaattacaataagttacttgtctggttctgaagggaccagctccccattttggcagccttaacacatgcttgcctgaccttgctttggtcactaggaggtcagatgcctgccttgtggcaaggaaccaatcagaagttagctggtggtgatatgctttacggctctgggtgtgctttgcggatatgtgcacagaaatgacaagcagagcatagcaaccaccctgggagggtctatgggccataaccaccagtttatcaatcaacacagggcaggctctccaagcttggaggcacaccaatcctgagcctgtgcatacccctagacactccccttatgctgccctataagatctctgtgcaatggcttctcactgtctttcctagccatcggccatggtggatggatgaaagaactgaactaacatggggttttgaaaggttcatgctttaaggctgatcaacaatatctctttaagagacagactccaccccctgacaacagtcagggttacgctcaagaaaatgtgctatgtcatcaccatgtcacccgccacgcattacggcctgcatgaggactctgggcatgtgggaaacatcagtgcacatgcacagtcttccctttaaaagctataacttcccagtttatctttactctctaaactctctctctgcttctgcttcactctatattctcccacttacgagttctctctgcctcgctatggcgaccggccatggccatcagccattacccctgttcctcttctctcttagtctccctattctgccgggcccatataataaactagttaacatgtctcatctgcctttctcttttcctctttttctacaaaaacataacagcttgttaaactactacaataaagcctcatgctgtttgcatcaagttttctcctctacctggtgattgggttcgtcggggtcctggactgagatcctgggggcctgagcctccgggggtgtttcagataaaggcctctggcctctggtacaccatcatcatcaacagactgtcaccaaatctcctgcaatatatcctgctgttgtcccatgtcatgaggatctcatggttatctttccacaggaccagtcccttcatacactccaccaggtcatagatgggttaaatattaaggtgggccaacccaaagcccagtatatgggtctgggtagtggctgagttgggaccaccaccctcaggtaagtagaatacccatgccatctagaccagccatttcatgcctgtggtgagggatgtggctatctttcaccagtgtaggatgccagctctccagtgaagtgtggtaacatgtgccatggacgtcagctgtagtgggaccactgacccaggcattgcctttggcagaagctcaggcctgcatgctatgatggcccaggtggtagtacaagtcacccagaaatgtatgcccctccttggtggcaatatgtcccttagataccaacatgagaacaggtggctgaccagacccaagacactaacaaggccctcagtggtagcaggaatcatggacatagctaccgtattaccatgtgccggggcctggcttgtatcattcccatgctacataggcaatctgttcaggactgatgtctttggttctgtaattggagccatcagaacagcctcaggtccatccctgagtgggggtgtgtggacctgggaaaacgcctagctaccccttggcattaaggatgagatacagatacatcttgtcatctcaggagggctctcagtccatgcaggaaactggagtctctggtttattcaagcatccttttaaatagctttccaacagtgggggtcactgtagaagacatctgctcttgttagaccctcggaaactcaggtatccggggtcccaggccacgacctcagtcaccccaatcaccaggcagattagagagcttgctgcaaactgcatgaggctttactgtaaattaacaagctaaccccatgttagctcaggtcttttgtccacccaccatggcggttagctacaaaagacagtttgaaccagctgccgagaaatcttatagggcagtgtaaggggagtgtctaggggtacgcacaggctcacgattggtgtgccttcaggcttggagggcttgccctgtgttgattggccaactagttgttatggtccataggccctcccagggcggttgctttgctctgtgtgtctttgctgtgtgcttgcccgtaaagtacacccagggtcataaagcatagcgccaccagctaacttctgattgattccttgtcacgaggcaggcatgtgacctctaagtgaccaaggcaaggttatggtaagcatgtgttactgtcatggctgctgaaatggggagctggtcccttcattcccccattttcttttttggaaattccaatcatggaattgctgtttctctagcgaccccatcagggagtgagagatattggcatccccatgcaagggagtcccttctacagatttggcctagaagcatgtacaattttcttctgtccagagagccaggtatggattggcgcaattgatactaagatgtctgccagaagcagaaacctgtttaagacatgtttaaactagaaacagaggttaaaacttatttactgaagcccacagtgcagaaaaagcagatatctggatatctgttcaaacagcannnnnnnnnnnnnnnnnnnnnnnnnnnnnnnnnnnnnnnnnnnnnnnnnnnnnnnnnnnnnnnnnnnnnnnnnnnnnnnnnnnnnnnnnnnnnnnnnnnnnnnnnnnnnnnnnnnnnnnnnnnnnnnnnnnnnnnnnnnnnnnctttaagtttgtacttagatgacaaccaaaataaacttaaaaaccttgagcttgtgcctgaacagtagatagtcactattttatcagctaacatgctgactatagtctatagtggatctgactgtctgatgctgccaagttgacaatcattaatacttcagagatcttagaagggtatattctatccaaatctcctaaaagtgacagaaaccagtccatatacagttagtcatacctaagtttctccattaccgctggaggcaggtgtctcaaagaacagcaatctttgccaggcctataaggtgagaggttttttttttctctctgtggaagagggacatggaaaagactgaccttgttttgtctaggcaaagggggtgcaatcaattttccagtttcnnnnnnnnnnnnnnnnnnnnnnnnnnnnnnnnnnnnnnnnnnnnnnnnnnnnnnncttggcagaaggcagatatcacatctgagcatctcgctcactggtccaggtgcagtaactgaggtgcctcataatcttctttggagactttgggtcactgtcaggatctggcagtctgtctgatattataaactttaaagataacaatttaaatgccatattctgcagatctctgaagcattaggtctgtttggttatttgccttaagcattcaagaagcatacaggtggctaggtaaggtcttacttctgtaattaattttctgcccgactgtaactgggcagaaagtattaacttagtaaagtatttgaaaattagcacagctgaatttaagactacaaagagttaccttatagtacttaaacagtagctataggtacatattttagcagcttgctcaaatgagacagggttttctctgtggctttggaccctgtcctgcaattcgatctgccggaccaggcaggccttgaactcacaaagatccatccgcctctgcctcccgagtgctgggattaaaggcgtatgccatcaacgccctaaacttaacttctgaaaacataaactgtaacatcttataatagattagcaacttttataaaatgagaactttacattgtcaggctttgcttaaaaatgattctaaattgaagctctttaactaaaaacattaataaaaactaacattttttaaaaaactggtttaaaaaagaaatttaaattcccttaatgtctttgtgtaatatatagaagcattaacattttaaattttaactgaaaaacttgtttctaagatggtacctctaatttccatgtggtcacctttagtcaagatgacagtttaagtatcttttttcaacttcagcaaaatggctaccagtcagccatgtgaccagtttgccatgtggctggctacaaaatggaggcaacttgcaccatttatttagctacatgcttttaacagaacttaggttataccaggaaacagaacattttaaaacaagtatatataaattacatgagaaataaacaggactttttaaacaaaattagcttaatatggttaaaattttaatttatattaccatttttaaaatttactatttgtatacatgagaaaccatagcaaacagtttacaattttcacttttaacaaccttttctcagaccttctatgacttgctttaactctctataattttctatatacctttagttcattcctatgattttcttagacattcttagacaaatttcnnnnnnnnnnnnnnnnnnnnnnnnnnnnnnnnnnnnnnnnnnnnnnnnttcgtacattctcatgtctcagtcaatataaaaatttttatcaaagtcctttccataattttttttttttgaacatataaatcagaccagatagttcacccgcctgagctccatgtgctcagggaagagacctgaggtgggggtgctgctggtaaccccagaccctcggccaatgtaagggtgggaaaaagacccccgcagcccccctgtataccatgtatgtggagcacagagaaggccaggcagtcatgcagatggcggccttgcagccatgttccctcagagcatggaaactcccgaggcaggccacgacccatggcaggacggcagctggggcagagacagccccacttcgcatgcctcatagacccacaggtggggatagaaaaactcacctacatcggccaggctcagctgttagtgccacagcaattgtcaagagttcagagcagcagcctcagaggactctgccgcagcacattctaaccctaacccgtggtgtatggcagagaaagtcccgtcctgcaccacgtgctcagagcatcaagaaaagacccctgacccatgcatgccatgtgtgtgggcagtagggacaaaaagagatgttaacatagactagggtcctattcggaatttcagatggctagccccatggagatcaacttggttcgaaaccaagtctcccctatagatttcagaaggctgccacccaaacctccaccctaaacaattcttgtacgcctacttgcagattttgccagaaaccccaacataggacctccaaattcacaaaattaacagaaatagtaaaactgacacacaagcaggcggtgagggcgtggactacagcacaccagataacaaacctgctcagtcacccagcccgttctaaccctccaggcataatagccgccaacccaatgcgtctgcaccgcttataaggcaatggcgccaggaagaccggcggcagaaccaggcagctacaattgccgctaactgaggagggtccaagtgtccttggcctccgttcgttcctcctgggtgtcctcagagcagcagtctgtaatcctcctggaacatctgctgatcacagttgaggtggaatccaaggatggagtggttagtccagagacagacacaaacagcaaaaacaggatagacatcagacaagacaaaccgctaggcaaaggaatggtgccccaaaccaaaattacaaacaacccttggactnnnnnnnnnnnnnnnnnnnnnnnnnnnnnnnnnnnnnnnnnnnnnnnnnnnnnnnnnnnnnnnnnnnnnnnnnnnnnnnnnnnnnnnnnnnnnnnnnnnnnnnnnnnnnnnnnnnnnnnnnnnnnnnnnnnnnnnnnnnnnnnnnnnnnnnnnnnnnnnnnnnnnnnnnnnnnnnnnnnnnnnnnnnnnnnnnnnnnnnnnnnnnnnnnnnnnnnnnnnnnnnnnnnnnnnnnnnnnnnnnnnnnnnnnnnnnnnnnnnnnnnnnnnnnnnnnnnnnnnnnnnnnnnnnnnnnnnnnnnnnnnnnnnnnnnnnnnnnnnnnnnnnnnnnnnnnnnnnnnnnnnnnnnnnnnnnnnnnnnnnnnnnnnnnnnnnnnnnnnnnnnnnnnnnnnnnnnnnnnnnnnnnnnnnnnnnnnnnnnnnnnnnnnnnnnnnnnnnnnnnnnnnnnnnnnnnnnnnnnnnnnnnnnnnnnnnnnnnnnnnnnnnnnnnnnnnnnnnnnnnnnnnnnnnnnnnnnnnnnnnnnnnnnnnnnnnnnnnnnnnnnnnnnnnnnnnnnnnnnnnnnnnnnnnnnnnnnnnnnnnnnnnnnnnnnnnnnnnnnnnnnnnnnnnnnnnnnnnnnnnnnnnnnnnnnnnnnnnnnnnnnnnnnnnnnnnnnnnnnnnnnnnnnnnnnnnnnnnnnnnnnnnnnnnnnnnnnnnnnnnnnnnnnnnnnnnnnnnnnnnnnnnnnnnnnnnnnnnnnnnnnnnnnnnnnnnnnnnnnnnnnnnnnnnnnnnnnnnnnnnnnnnnnnnnnnnnnnnnnnnnnnnnnnnnnnnnnnnnnnnnnnnnnnnnnnnnnnnnnnnnnnnnnnnnnnnnnnnnnnnnnnnnnnnnnnnnnnnnnnnnnnnnnnnnnnnnnnnnnnnnnnnnnnnnnnnnnnnnnnnnnnnnnnnnnnnnnnnnnnnnnnnnnnnnnnnnnnnnnnnnnnnnnnnnnnnnnnnnnnnnnnnnnnnnnnnnnnnnnnnnnnnnnnnnnnnnnnnnnnnnnnnnnnnnnnnnnnnnnnnnnnnnnnnnnnnnnnnnnnnnnnnnnnnnnnnnnnnnnnnnnnnnnnnnnnnnnnnnnnnnnnnnnnnnnnnnnnnnnnnnnnnnnnnnnnnnnnnnnnnnnnnnnnnnnnnnnnnnnnnnnnnnnnnnnnnnnnnnnnnnnnnnnnnnnnnnnnnnnnnnnnnnnnnnnnnnnnnnnnnnnnnnnnnnnnnnnnnnnnnnnnnnnnnnnnnnnnnnnnnnnnnnnnnnnnnnnnnnnnnnnnnnnnnnnnnnnnnnnnnnnnnnnnnnnnnnnnnnnnnnnnnnnnnnacaaacacacacacacacacacacacacacacacacacacacacacacacacacacacgcacgcacacacacacttgaaaaaataatacctatcacaagcagaatggtgtatgagtctaggaatgataagcctgagatactctatttataagctatgatcccaggtcctgatcagaggaaggaatgaagctgtgatacagtcacactgaagtctcagtttgttttattgggggtccaaatgctatcatggccttttagtgttttgctgaacagagctaaaggtacttagcctttacaacctcttattcgcccgccaaaatgtaggctatcttatgatatgatctcaatcaagtctgaaggtaattccaggagtaatgtggctgccagctatagcattcccatagctgggaaataatatacctcaggcttgaaagagaatctgtggtacacactatagtgcccactgtcaatttctttccatccactttaactgaattttagtgatctctcttcctgggtacttttgtatttcttgactctgatttttttctctttattgctactcattacctaacatgcaatgaaattgtatttgtttatggcatatcttctactaggagatcagctccttaaggtaataaatttctgcctgtttcactctctaatattcaaattgctgcttttcacagggaaaaaaataaacaaatagtttctctgacaacagctgtggagcttggcataggcaatttctgccttcagagttctttttaaaaattgacatgatgcttgcctaagaagggactcttactagggctatgcttgtgactttagtcattcaagaactctttgttaaaatcagaaactctggaaagaatcctactactctgaaagaaatctctctgcctgtgaagaatatatcacagtcatcccagtttagagaaagattgtatttgatcaccaaataaacagaaatgaagaggctgataaccctcatgacaattagaaataattatcagtggtttcatgatttcatatctcagagtgcttagagatttattttcctaataaaagaagcagtgttgacaatgaagacatatgagacctggatttgcagacactaagttgatagagaaaaatacctttatcagatcagatgtctcaataatggggggtcaacaactctgagaagttgggcactggcaggggtcttcatagctatattgatatccagatatctgctttttctgcactgtgggcttcagtaaataagttttaacctctgttcctagtttaaacatgtcttaaacaggtttctgcttctggctgacatctgagtatcagttgctaactacaggctgttctaagtagactgcgagccctaaacttgctgtggatgtgaaccagtctgctgatatggacaccccctatctctgcaacaannnnnnnnnnnnnnnnnnnnnnnnnnnnnnnnnnnnnnnnnnnnnnnnnnnnnnnnnnnnnnnnnnnnnnnnnnnnnnnnnnnnnnnnnnnnnnnnnnnnnnnnnnnnnnnnnnnnnnnnnnnnnnnnnnnnnnnnnnnnnnnnnnnnnnnnnnnnnnnnnnnnnnnnnnnnnnnnnnnnnnnnnnnnnnnnnnnnnnnnnnnnnnnnnnnnnnnnnnnnnnnnnnnnnnnnnnnnnnnnnnnnnnnnnnnnnnnnnnnnnnnnnnnnnnnnnnnnnnnnnnnnnnnnnnnnnnnnnnnnnnnnnnnnnnnnnnnnnnnnnnnnnnnnnnnnnnnnnnnnnnnnnnnnnnnnnnnnnnnnnnnnnnnnnnnnnnnnnnnnnnnnnnnnnnnnnnnnnnnnnnnnnnnnnnnnnnnnnnnnnnnnnnnnnnnnnnnnnnnnnnnnnnnnnnnnnnnnnnnnnnnnnnnnnnnnnnnnnnnnnnnnnnnnnnnnnnnnnnnnnnnnnnnnnnnnnnnnnnnnnnnnnnnnnnnnnnnnnnnnnnnnnnnnnnnnnnnnnnnnnnnnnnnnnnnnnnnnnnnnnnnnnnnnnnnnnnnnnnnnnnnnnnnnnnnnnnnnnnnnnnnnnnnnnnnnnnnnnnnnnnnnnnnnnnnnnnnnnnnnnnnnnnnnnnnnnnnnnnnnnnnnnnnnnnnnnnnnnnnnnnnnnnnnnnnnnnnnnnnnnnnnnnnnnnnnnnnnnnnnnnnnnnnnnnnnnnnnnnnnnnnnnnnnnnnnnnnnnnnnnnnnnnnnnnnnnnnnnnnnnnnnnnnnnnnnnnnnnnnnnnnnnnnnnnnnnnnnnnnnnnnnnnnnnnnnnnnnnnnnnnnnnnnnnnnnnnnnnnnnnnnnnnnnnnnnnnnnnnnnnnnnnnnnnnnnnnnnnnnnnnnnnnnnnnnnnnnnccccccccatggggaacctccgtcccaaggtcagccatctggacgcggaggggggaattgggtctgttgtaccaggtgcagaccttgagaatatactgataactctgtacctcattaaattgtccaatagaatccctgtaactatgctttcgcttctgcactgtgctttttagctatataaggacccctctcccttggctcggggcttagcctacccaaaagctaagccccggggtaccagcgctactaataaagcctcttgctcttacatccagagttcgtggtttcgctgattcctgggtgcgggtctcctacgaaagtacctcttctgaggtctttcaccagaacacatctgctttccctatggtccaaatcaaacgacactcagactttcatccaaagcgggatctctgggtcttgaaacatgcctgtttccccctgaggtccaaattacaaattcaaataccagtacaaattacaaatatgagtcctgtgcaggttcagatcaaattcaagtcatagcaccaaaccaacaaaacagcaagagacataacaagcaaacatgtaacattgaacatataagtttcgagctcgaatcatcttacctccaagatcgaatccactcaggtgaggagtggtcccaaatcaaggacaagcccacaaatgtgaccaaagcaaggttatggcaagcacgtgttactgtcatggctgccgaaatggggagctagtcccttcactctcattgtataaagctgatatcaaaaaattcttttaatcctagaggcaaacctaaacagaccctaggcaggtaaacaaagctctcagaacaggtgtgggcacacccaaggcctagatctgttgttatgcaaagtaggagacattctccactgagaccaagccatccagcagtaattcgccagacatctgaaagacaatgggagattcaggctcctgaaaatagagtgaaggtttgcacccagacaaccatggatgcagacatggcccacagcagcagccacaggcccaacggacaccatggccctatgtggtaatgcaggctactctgatcagcatagccccagcagtgacatggtcctcaaacaccagcatggacacaggttacagcctagatcatccatgtgacctttggtggcaacatgagtcatggacgtcaacacagactgttgctatgctaggaccatgtacccagacacagtgcttagcagcatccctggctcagaagttaccatggccccaggtggcaactgagggcactcagatatattattgaaggacttaaaaattagcaaagaaataaaataaggagacttagaaaaacctcccacactaaaagcagggtggcctgacttaaaaatctaaccaaagtcacaatgacccgagtccctggaatttcctagctgcagcaataactcccttacaaggccacaagatagcttaactaaataccaagactttccagcaggccaccctgccctggggtcatgaagataagaacagactatcccactgtgtcaggagaccatccggccccaaagataagagacctccaaaggacctatgactcggtcatgtacccaaaccccctcccctccctaaaagcttgtggtttcctcctataaaagaggcctgcttttgaggaatggggcttcctttgtctgttggtctgggaggcctatttgtgcaaacatcctgcaataaacttacctcttgtttttacatcagctggactggacattgagattttttgggggaccgtctgatttgtggagactcctcgatctgagggtctttcaatatggctcctactgcaacatgaccctcctgtcctcaggtgatagtcaagtcttcaggtatttgcatagcctttggtggtaacatgaatcatagatatcaaaatagacccttgatgcagaaggaccatggacccagacatgaccatatgccacagcctgggagcagatgtcaccatggcctgaaggaggggaggtagcacagcccccagataccaacattgattcagatggctgatccacatgcccttcagtggacatcagcatagacctacctacactgctatatggtcacagactcagacatagccttggcagcagctctggtctagatgtcatcatgtcaccaagtagcagcacaggctaaccatatcagcatgatcctagcaatggcatggccctcaagcaccaccatggccacaggtgaaagctaggactccaggcattcttgtggcctgtgtgaaaggggaaaattaatgaatgtctaaaacccagattccaaagcccaaaaagaaaactctgagttcccaaaaaggcagctcagcagacaaggttaaacaaaggtccacaggactcaagcccttagaccagatatcacacccttgaatagtgtccacattcctttggtccaaagagaatcagatagttatcaatagtagaagtccccagcccaggagacaattaacaaactcgtttcctctgcagcatcctgcttaattgcaccttgcccaaaacatacaatctttgtcctgtcctctgtaaccatggaagttttgtaatcttggggcttccagccctacaattttgccttgtaaaaacacccctcagtagaaagtgggtactccatctgttcctgaacaatggggtcttgctgcagctcatattcttgagtcaataaagaaaactttgccttgcattcgatgagtcatctccttgctggtgggttcttttggggttccgaaatctgggcacaacactttgttggtaacatgggttatggatgtcaacagagacccctgctgtggtagaatcatggacagacacatagctcttggcagcagcctgggcccagatatcatcctggccccaggtggcaaatagtccactaatgtcagcttgtttttcaattcttcagttcctcctctttctacagcacatgaacaattctgcttctcttcctttcctatttctccaccacatattttctcatcataatggcatctgccaacctggtgctgcaaggactataatgacccagactggcccatgggtgtcctttatccacctgtgctgagtggcacaagatgggctccacagcagcacttataaaagaaaccatttcagtggggcttgcttacagttcaaaaacttagtttattatcagtgtggcaggaagcatggcaggaagcatggtgacatacaggcagacatgatgctaaagaaatagcagggagttctacatccaggtccacaaatagcaggaagatagagaggcactgggcctggctagagaattggtcattattctataccaattgactatttatccagataatttgaaacaaaatagataaattgatataatttatcagttgacagttgtaaattttctgtgccagataatatttaagattaataaaaacaaatttccttcatgaatcttatgtttcatttttttcttcctttcttgaccaaagactcatgtatagtgttaaatagaattggtgaagacaaataattttgatttattattattctctaaacaaagcttttattatcatataaactattatatttgttgattctatatttgtatattctatcagaataatatatcgattttccctagtttatgaagaattgtttacatcattcattttagttgtaatttatcaagaatatttaattatggacttccttcctaattggattgttataaaataacagattcttaacttaatcatctgagaattgttgacatttaaatcaattgaaatgaatgtgtgctctgtactagatgattgcgatttctttccaattgctcatggttgttaattatcttcttcagacacaatggatttttctataatatctacttgtgatatttctctgtgttatatttgaaactatcttaatgattcatttaaactttgctgccctgacagtaagaactgaggcatctttctgggttggcacagttactctgtgttctgcctcacatcttactctgtaactgtgagaatcactgtctttacaccaatctcttttcttatgaacgctggttcttgtaaggatggtatgaaattttctttttaaacacaagtctaggcaaagtttgacatcaactgatttttgtgagtttattttgtatacagttacttggatgaaagtgtttatcagctgttggagattccccttgaaacttttagggacacctatgtattctatcaaatcatctgccaataaagattctttacaatttgtatctccttgatctccttcagcccttttgttgctctatagaagacttcaagtactatattgaatatgtctggaaagggaggccaaaattgtttttttttcatgattttaacagagttattttcagcttctctccatttaagtatatattggctataagatttttgcaaactgattttattatgttgagaaatgtccttggtatccctaatctctctaagaatttcattgtgaaaatgttttccaattgcacatctgaaatattattattatgttctactatcagctttgacattttctctattacttttactccttaatgatgtttccatgtgaacataaggacttcccctcttgtgcacagctcagattattggcaagcctctacagcaaagggcatacagtgttctagtgtgacactcccctacttgattattggatttgacacaagatttcagaaacatgtgttctttgttacttatctattactgttacaaaatgctatgaccaaggcaactcataaaataaaatatttgattagagctcatggttcctgatagttagagtcattgtgattgatctatagttgacaacttacatctgctctaaaagtaaaagccacagatggagagataactgggaattacatggtcttttgaacactcaaagcccacccccagtaatacccccccaaacaagggcatatctccttaactttcccaaacagctacaccagttggagacaaagcattcaaacatgtgtgcctctgggaaccattcttattcaaacaaacacaggtgtttctcagttgatgcatttttaaaacaaacactactcacagggttctaacatgactgcaacactgaattactgcaaaaaccatgagagaattggatcagcgtttcattgctatatcctaatttgctattttctgtacactgcaccaaataactaaaactagagtaaggagcagtgtccaacatctactgctattaaattaatcatcaaataagataaggccctcaaagcatttatctgtctgtcatctatctgtctgtctgtctattgatctatctatctatctatctatctatctatctatctatctatctatcatccatataaatatcttcatttatagagatgtggttagatagcttggttttcagccaacggtattatttgagatggttccagaaccattaggagtgtggcccacttaaagaaagtgtctggtactgagtgtactctttctatcctttcttgtatgctgcaaggtggaaaccttcttctctacatgcctgttgtgaagtattattttaaggtgtgttacatttgtttatgctgtgaaacatttgtttaatgatgcaaatatatgttgcattctttaacattgcatttgtataactatgtgaaactgtatttctgtaactgtctaaaacaacccattggtctaataaagagctgaatagctaacagcaagtaaggagaaaggattaggcagagaggaaaaaataggagaaatctgggaagaggcatcaaggagtgagaaaagaaggggccagaaacacagacacacacccacacagccagacaggaaagaagaaagatgggttgggagagattggtggggaacatgggaggataggagggcaagggaatgagggggatagatatgtaaatatgagtagtaattaaagaatttaaattaaaagaaaaaattccgcttagatgtcctcatattatagcagcagttattcgtggtggtatgttaactatttggtacatgaaaatgttttgagctctacattaataagaaacctccagatcaaaacacaaatatacagaaatagaaaaaggtaaaaacacagagacaaaaggtagagaggataattcaagttaagaaaagctggcaagagaaaagccgaattgacgtttggcatttatgagaaagagcaagcccccatgtatgacctatttgggagttgcaagttgccccccccaaagagtaaagagcaaagaaagtaaaataaaaaacaaacaaacaaaaaccaatggcaacaatgcactggcctctgtttacatggtatacttctacaccacacacacacaggacataagaatggtgcctctaaaattgagctgaaatatacccctcatcaagtatttttgtcactgtaatatggaacctgactaacacagagggtgagtgctggggaagggcacagttcctgtgactaaacctcatggttttaaagctttggaccttagttgaaggaataatttggaaggggtgaaagaaacagcagtaataagggtgtggcaacaactctgtggatttttctggtaggagctcagcagagcaaaacaccaaccagaatggaagataaagaagggatccatacagtgtcagaatcagaacttcttgggcatcagacccaagcacactactgtactttgtatactgaaatataagggaggctgatttttaagcaatggatgaattaatcaggctgaaaacatgttgaaacagcccagcaatccagcatatgtgtattgctggctgctctttgatagatttacagcgagaatttgtggcaaaaaggtttacaaaatgtgtgctttggtaataaaggaatggggttaaagctggagtccattccaaatagacagatattctcccagcctagacatatggaagagggtcttggccctgctccaaatgatatggcagattttaagatcccccatggaaggcctcaccctccctggagagcagaaaggggatgggttagggggttggtgggggcaagggaggaggagagggagaaggaactgggattgacatataaaacaagattgtttctaatttaaatttaaaaatagaggaggaaaaaaatggaagtttctaaagagattatcacacataaaccaatcattttccatggggacaataggaaaggcactattttataaaatgaccataaccaacacacaacagtctaaatggcatagaaaaatggacttattggaatggccttcatggatctcctggcctgggaactacaggctggtctactcacccccattggatcaagcaatcttgagtctgctgatatcgctgtgctactcctgtcctcactcaggggagaggtgagcttaggctcttgtctcaggcctgacttctgcttgcccactctggaatttattggcttggagactgaaggaaattcaagttgtccccagaggaccaagcaacagcaagtctgctgacattgctgtgctagtcccactctcatccatcagttgagggagtgtctcagacccacctgcagccacccatcagattattggacctgcttgcccccactggaagagaaccttggaccagtaaccaccagaagagaaagagacagagataccaactgcagccactggaagaaaggataggaagacaacaatataagaacacattcaacaacagaaaaaccaatatgacatgacatcaccagagtctagggactctacaccagcaacacagataaaacaaaagagaacaaccttaaaaacaacttcaacatgatgatggaaaccctaaaagagaaaataagaaaattcttttaataaatggaagaaaagacaaaccaaaaattgcaagaaacaatgcaaacagtgcaaggtttgaaagcagaaatagagacaataaaaaagcaatctgaggaaatgctggaaatagaaaagatgggcaaatgatgaggaactaaagatgcaagcataaaaaacagaatacaagagatggaagagagaatctcaggcattgaagatacactaggagaaacagattatcaaacaaagtaaatcttaagaccaacaaattcttaccacaaactatccaggaaatatgggacaccatgaacaggccaaacctaagaatattaagtatagaagaaggtgaagaaacccaactcaaaggtgcagaaaacatattcaacaaaatcacagaagaaaacgttcccaacctcaagaaagacattccaatgaaagtgcaagaagcctacagaacaccaaacagactggaccacaaaaaaattccctcccacataatattcaaaacaccaaacatagagaataaagaaagcttgttaagagcatcaaaggaaaaatgtcaagttacatataaagacaaacctaccagaattacacctgctttttccatggaaatcctcaaagccagaaggtcctggatagacattctaccaacactaagagaccatggattctagcccagactgctatacccagcaaagctttcagtcactatagatggagaaaataagatatttcatgacaaaaccagatttaaacattacacatccaacaatccagacctacagaaagtactggaaggaaagcttcaaactaaggaagttaactacactcacaaaaacatagtgatgacccaattgtgtttaacagatatctataaaacattccatccaaacacaaaagaatatatcttcttctcagggccacatgtaaccttctctaaaatccaccacctactcagcaacagagcaaacctcaaaaggttaaaaaaattgcaataaccccctctatcttatcagaccaccatgctttaaagttagaattcaacaacacaaatgcagaattccagaaactcatggaaattgaacaaggttcgattgcaccattcctgggtcaaggaagaaataaagaaagaaattaaagactacctagaattcaatgaaaatgaagacacaacatacccaaagtcatgggacactttaaagcagtgctaagaggaaagttcacagcactaagtgcccacacgaagaaactggagaatagtcacactagagaattaacagctcacatgaaagctctagaagtaaatgaagcaaactcacccagaaacaaataatcaaatttagggctgaaaataataaagtagaaacaaagaaaacaatacaaagtatcaatgtaacaaaagtaggtacttccagaagatcaacaagatagacaaacctttatccaaactaacaaaagacagaacatgcaaattaacaaaatcagaaatgaaaaagggacataacaactgacacaactgacactgaggaaatccagagaatcttcaggtcatattttgaaaacctgtactacataaaaatcgaaaatttaaaggaaatggacaattttctggatagatatcatttaccagtattaaatcagataagcaattgaaatagacctataaaccctaataaaacaaaagcagtcatcaaaagtctctcaaccccccccaaaaaggctagggccagatgtattcagtgcagaattctatcagaaattcaaagaagagctaagaccaataatctccaaattgttccacacaatagaagcagaaggttcattgccaaactctttttgaggctacaattaacttggtactcaagcaacataaagacacaactaagacaaagtactacagaccaatatccttcatgaacatcgatacagtaaaactcaacaaaatactggcaaatcaaatccaagaatacttcagagaaatcatctaccatgatcaaatagacttcatcccagagatgcagggatggttcaacatacaaaaatctgtcaatgtagtccacaatataaacaaaccgaaaaagaaaaaccacatgatcatctcactagaagctaaaaagaccttagacaaaatccaacatcccttcatgataaaggttctggagagatcagggataacaggaacatacctgaaaataataaaagcaatatacagcaaaccaacagccaacatcaaactaaatggagagaaattcaatgtaattcctctaaacttaggaacaagacaagtctgtccactctctccatatctcttcaatattgtacttgaagttataactagagcaataagacaacaaaaggagatcaaggagatacaatttggaaaagaagaagtcaaactttcactatttgcagatgatgtgatagtttacatgagtgtcctgaaaaaagggaactcctacagctgacaatcaccttcagtaaaatggaaggatacaagattaactcaaaaaaatcagtagccctactatatacaaatgataaatagactgagaaagaaatcagaaacattgccctttacaattgccacacacaacaaataatatcttggggaatgctaaccaaacaattgaaagacctgcatagcaagaactttgagtctttatagaaagaaattaaagaagataccagaaaatggaaagatctcccatgctctttgataggtaggatcaacatagtaaaaaatggcaatcttgccaaaagctatctacagattcagtgcaatccccatcaaaatccaagcacaattcttcacagatcttcaaagaataatactcaacttcatattgaaaaacaaaagacccaggatagccaaaacaacactgtacaataaaggaactcctggagagaccaccatccctgacttcaagctctattacagagccttagccctgcaaactgcttggtattggcacaaaaacagacaggtagaccaatggaattgaattgaaaaccctgatattaattcacatacctaggaacacctgagttttgacagaagctaaatttatacaacggaaaaaagaaagcgtcttcaacaaatggtgctgtcataactggatactgacacgtagaagattgcagataaattcatatttattttcaggcacaaaagttaagtccaaatgcatcaaagacctcaacataaatccagctacactgaaactcttagaagagaaagtgggaagtacccttgaaggaactggtacttgagactgcttcctgaacctaataccagtagcacagacactgagaactacaattaataaatgggacctctttgttggagaaaaggagaaaaaggaaagctcgaggagacgctgccaccgcagccaatggagactggattcgttccaacaatctgttaaaacatggtggattactatgaagatctgggcatgcagagacatgcctcaactgaggacattaaaaaggcatatcagaaacaggcacttaaatggcatcctgacaaaattcctgaaaaagaagaggcagagcagaaattcaaacaagtagctaaggcatatgacgtgttatcagatgcaaaaaagggggacatccatgacaaatacggcaaagaaggattaaatggtggtggaggaggaggtggaagtcattttgacagtccatttgagtttgacttcacattacagaatcccgatgatgtcttcagggaattttttggtggaagggactcgttttcatttgacttctttgaagacccatttgatgacttttttggggggaaccgaaggagttcccgaggaaatagaaaccgaggtgcaggctcgtttttctctgccttcagtggatttccttcttttggaggtggatttcctgtttttgatacaggattcactttgtttgggtcacggacatgagggtctcacttcattctcttcagcatcatttggtggcagtggcaagggcaacttcaaattaataacaactcctaataagattgttaatggcagaaaaatcactacaaagagaattgtggagaatggtcaagaaaaagtagaagttgaagaagatggacagttaaagtccttggcgataaatggtaaggagcaccttctatgcttggataacaaataattcaacgccacatttcacagaaatgttaaaaccataaccagcaccatttgaggaaaaacagaaacctttttgaagatttcaaatgaactcgacttctgtataactatacctaaagtatttataaaacagctcattggagcccctatttgtcatagacttttgagttcattgttggggctacaaaataggaccatttttttgtctttaaaattgttgtaatctctgtatgcactttgctttaaacaaaacaagacgtaatctgaggtgagccctgtgactcttaaatagtgctaggacaagattgttctttgacaccagcctggatctgcttcccattgtgttgaaacgtgagtaagtaatatcaacctgctgtgacgttaacattgccagatgaagcttctacagaaatatttcaattttatcttcagtatttagtaacaaaactattactgcatcaatggcaacaaatgtgttaattaacgatgttttctagttgtgcatagatgctggcaaaatcatcagttctgacaattgtttaaatatgtaatgttaagcttaggtttaaaaaaatctggtaatttgggtttttgtcatttgcttaaataaagaaaataaatgtgaatgtgtttggtgcaaaaataaattacataaataaataaataaataaataaataaataaataggacctcctgaaactgagaagcttctgtaaggcaaatgacacagtcaataagacaaaatggcagcccacagactgggaaaagatattctccaaccccacatctgacagagggctaatctctaaaatttacaaagaactcaagaagctagtcaccaaaacaccaaacaaggcaattaaaaagcagggtatagaactaaatagagaatactcaatagtggagtctaaaatgcctgatagacacttatgaaagtgctcaacattcttagccataagggaaatgcaaatcaaaacaactctgagataccattttacttttgtcagaatgtctaaaaccataaacaccaacaacagtttatgctggagaggatgtggagaaagaggaccattccttaaacaccaacaacagtttatgctggagaggatgtggagaaagaggaccattccttaaacaccaacaacagtttatgctggagaggatgtggagaaagaggaccattcctccattgctggtaagagtcccaacttgtacagccatttggaaatcaatatggcagttcctcaggaaaatttggaatcaatctaccatgagatccagcaattttactcttaggcatagacccaaaagattcatacaacaaggacatctgttcatccatcttcatagcagcattatttgtaaaaggcagaacatggaaccaacctagatacctctcaactgaagaatgaatagagaaaatgtggtacatttacacaatggatcactattcatcagaaaaaaaaatggaatcttgaaatttgcaggaaatagatggaactattagaagccatcttgagtgaggtaacccagtcacaaaatatagatcagtatttgtctttagtatacaaatgaactttgtgagctcattccacatggagggatactctctgaacctagacacatgggggagcgcctaggccctgttccaaatgatgtgacagactttgaagttccccacagaaggcctcaccctccctggagagtaaaaaggggatgggataggtggttattaggaggcaggggaggagaggagggagagggaactgggatggacatgtaaaacaagcttgttagtgatttaaatgaaaaaatctggaaaaaaagcttgacaaaaacaaaaaacaaataaacaaacaaaaaagaatggccttcatctgggaatacagagcctccaacaggttctactcccacacaacagtgtttcccaaatatacttccaccaggatcaactcaccaggtgtctatagtcctctcttagccactgttcattctattggcagattctggtatagacaggtggtgttttgtcagacatgccaaatgcaagaactctgatatcaggagggttctattcaagtttcaaagtaagagcctatagaccaggcactgtatgccaggataggatctctgtaagaagtcctggcaagtggtttcctaaagttgtatggatgaagccttaagctctcgtggacaaatcagagtgctggagatgtatgggtgtggaatatctgttgaggaaagtcactggcaatcagaagcatgtgagaaaccacatgtgctgtgagtgcaagagctgatgacacttccaaacatattgaagctatctcatgacatcccatgtcttctatgctgcatgtaaaggagacagaatgctttcattctacagcttatgtcttgctctgaagctgtaccttcttcccttattcctagtccccacttaataaggaagggttttcactatgtcactgtatcttaaagagaccaaagcacactgtcaagaccatgacacaaaagggcacatgtgcacttcatacatgtagggagtgatctatatgaacacactgctcaggatgtgtttactagaaattaaacttcagtcttggtgtcatgaaaatgattgttctcaaacactccccagctacagaggacagatgatgaggaggaaagcacctgtgccaatcttaaaaaggagactgactacatgagagaagtgaaatttttaaatgcttgcctacctttgttttccctcctgtataacccgctggctaaaaatacatgcaagagaggtatttgccaagatctcggtgtggaaatagggacacgatgctctgatttgtatatgaaatgcttataggatattatatcatttattttctgccattgatgctattggggtgaaacactaggaaatttagatgggaaatttcttcttgtggaagaaaccaagtcaattgtgtcctgctttcaaacatcccttaccaattccatgttttcattgtgggattgtgtaattatttccccctcacaattctaacacttttctcatgaaacaaaatatacaacatttgaacgagcaactagatagtgcttctggccatctttttaaagcaaatgcaaaatatgctttcataaggctcattttgtcaatatctcattataagtgctaaggttatgataaaaggcaactcaataaaggagagtgtgcatagtaatgagataacagggtgtccactcctaatatagaaagtctacagattccaaccacatatcttttgtttgagaaattgcatcaggtgaactatgtcatatctagcagattcattggaagaggagtgaaagctttagaaaaacatgtagtgagtgccactcctatactaacactaaagagtacctgggggtgacaaagagaggaaggtgtataatggacaaatcatttacagactttaaatggtaagtttcaacctgactaaataaatgagttatcctgaaagatatttccccctcacagaatgaaagccaaaacattttattatgattatttacaaagtaatttggaataggaagcatatttacacttgtatttgcttttgaaattaatcactgaccttgaagttaaaaatgggttgaaatgcttgaattttaattgtgaattctcccctgagctgtgtcttagcaatgtcagttctctttttcaaagcctctaaaatactgtaattttccatttgtttacataaatcaggacttcttaggcattttctagttttaattgtcttgtgcccattgaagatttacattgggtatgtaggtacataaaatacaaatgcaaataaaatttttgctcacaatgaatcaaacaatttttagtttaaaacaattcagtataggtatgattttatgccttaatacactaaagtcaaatttgcattctggatagagagatgtgcttgttatttttatggaaaaaatattggctgagtatttattactatggcaaacagagcatattcaatgcttttaggagttgattgatatttttgatttattctttttagggccatttcagaaattgctagtaattatttaccaatcataagccaaaattcatttaacattttttgaaaaactaaagtcaaccactcaaacaattacataatctacaagtataatacagaacactcaaaaaacataataattttatatttccatgcaaaggagtgacaatagaaaacaagttgtcttatatatttataattaaactattatgttcttctataaagtctttctgcctttgtaaaagtgggaaaattgtagctgagaacacactagtctaaatagttgctggttgtgtggggtgataggatatgcaatctatagtgcccaccctgaatgtccagaaacaatacaccagaaacaacactgttagatttttgtttaaattagaaataaagaaagagaggaggaagagacaaaagactattagacatattaagcactttattataggcccagcagagtagagagactaagagagaagaggaatgtggttaatggctgacccccatggccagtcaccatagagagagagagagaagacaagcagaagcatacagagaagaggagaagaggagagagaaaacaaaaatctaacaaacatgactcatgaattaattttggctttagttatgactattgaatacagaaagattttcttcttgcaaaaattttcatgactttggcatttagtatgtacatttcaattttattttcactagaataaaatcttaaaaaacttagactgtgtgtatgcatacacaccttgtgcccttccacagaaacaatgggagctagaagagatgtcactctagttcacatgagctcctgaggacacagaaaggtgtcatgcggccccagacagctacacagaagacagtgtttagtacatcaaaaggggacagaggattagaactgaaaattcctgctagctccaaaaccagggtctcaaggcatgaatatgaaatttttctatgtgaaaaatataagataattagttgcttaatttagctgcttcttctgcattactttcattctgacaaagaaaagcttgtttttttccattgagaaataacattcctcaaattaaataatcagaatcagatgaggttgacctacttcatggctcctgactattgggcagcctctgtatcccaaaaatcaccaatcagagtgttacactctgcaaccacagagcatgattcaaacagggcaatgggatctgggaaatataaatgggagtcatttctcaaattcctttggaactaatgtaaaagagactatttgcttccattaatgatgccagtggttgaaagggcttctaaggagggaaatcatgcctgaaatgaacctaacagggtgtaaaggagaaatgaaaaggagaaaagaaaataccatcaaaatattaattgtcagtacagtaatatctcccgtagaaatttctgccttcccaattatttttctcttgtttaagtcgatttgagcttgactttgggattacccgacagcatagtgtcaagagaagattaatgtcactaagtttttctcattgcttaattactgaataaatttgacagtaccttgaagaaactcaagagtgtgatgtctgtgaagagaaagcttctcagagaactttccagatggagctatccactaggtcatgggaattaatctggcacactgccaaatagccaaagaaacatgacttccaaaagtggagatgatgagtttccctctgctgattctgcattggctttctgttttcaacatctcttctgtggaacaagagttaagagacatggtcagctagatgcttagtgatgactgagtccttctggctgactccttttgtggcttgaaaccattttgctggcagagataaaaaaaatgacttttaattgctaatctctaaactccatgaagtttgggtataaatttttgctctgagaaatggggaaaaaacttgatatatttctaacattataactaaggtactctattttgtgctgagaatataacaatgagaagaaaataggaattttctaagcaggtgtggttacagtagtgtctgctgtagttatttgggtttaggcatctaactatgtgctgtgaactacttttgcttgagttaaataagtacggctctttgatttatgatggagtactaaagattaggcacagactcctgttatatatacgtagtcatttcatcacaacatagataaattgatgctcatacatatagttctagtaacaaatataaaaagatgaacagagatggagtggatgtcaaaagtgaaaagtaacaaatgtccataacagcctagaaaaagtcatgagacacctctgggtagggttgataacctcagtatttcaagcatagatcatgtgttacagaaacagtgggtctagtgttggtgcaagaaattggaatttgatcttgtgaacatcctgtgcacctaatcatacacactggaaagcgagatgttgtgaatcaaagttgttgttcagataaactaaagattttgagaaaactaaatttgttagattatttattatgtcattttatctaagcagtatttcaaattatgttattaatcgactgaccagacatctcagagcttgtattctagtgaatggaacagattatgtgttatagaatgacatctggtgtatatcagtaatagaagaaaatacaggatgagacaagaggaaaggtggaggaagcagaggccatggtagggctcagcaaagtcacatgattagctgggttttaaattgacccggtttgcctttcagtttctgctgatgcaaaccatatcattgtgtggtggtgaaatgatgcaaataagcattcaactcagtttcctgtcctttatatttcactacattggtgtcagatataaatgatttggagatgataggtgccattcttggaatctgtcttaaaattcttagcaagtaccctatatatctgcaatcatttcaaaataaatttcaaattttaacattttggtgaaaggattcaagaataaatgcaggaaggtcaacaggttgatacaataaagtacatgagacaatggtgacttataccagtgcatcattttagatgttttaaggacagtttgaaagtgatgtgatttgggggatcaggagacaaaagagttattatgcacaggaaaaatgtctttagaaattcttactaaaaggattgttttagaatctcaaaaccaaatattcaactcattaaaaataagtagaagaaaaaacatgagtaaaatgcaactaaacacagtcagttgcagtacttcagggagaggaagtaaagcatcctaaaggggaaatgactgtgaaaacctactctcaaagtgaagatgctttgattttagagtgaacttttttgagagttgaatgtcacagaaatttaatttatgagggacaccatttgaaaacaaagttattgagaaaagtgattatcagttcacagagaaccttaaactgctccaatggtcacagaatatcaagctaaggatgataatgaaaactattcaacaaacagtaagttcactgtgtagttctttccttgcttcagtgttttttgttttttttttcacttttttatctttatttcttttgtaagaaatacatacttaggattacactatttcctctgaattgaagcattgtatcctggatgaaggcccttcaggcccatgaagaaaatattgaaactcatgacattcaccaagtttcctcctctgcaaggttacacaaggaatggcacctgctggagaaaagagatgctagggtccacaggcaatgttcaaatcctcgaggagctcacagcttatatcttcagtgccatctcacccattgtagggtcatctagagtccttgggattacccaccctgttgtaactaaccacagcaaacacacaagttcagaaaactatatcttggtgccttgtactgtatgagttcagtttgcaacaagcacttggtgtattagtattttgtttatctgaacaaatatggaaaggaaactaacacattaagtgatgatactcactgttatcctgacatggagataaagattcagaatttcacaactcatctatacttataatacaaagcattaaggaaagtgcacctggcttacacagcatcctttcactgtgtaatgacactaaaaatttccagggtgatagaaacatcactgatgcaattcctagctaactgtcaagctgttgatcttcaagccacattatccatttcctgcataaatttaaggagtgatactaaaggaaaaatatgttggtaggttttagaacaacgagcaggttttatgtcactggtatctctcataaagctattcacttatttgtgtgtgctagaatgctccacgctcctgacctcaatttatctggtaggtagctatgaatcattagtgcattttaatccactttagatcaggatttgatgatagtgatctgagcattttgtgtataacctaaaatactatgaatctcttgatagccaagtaaagtgtttgtttcaagcaagaaaccagaattgcaattcttgtttatcaaaggggagcccactcctatatctactggcaaagtctttaaattgggtaggaaataagagtgtcaacaagctgggcccttgtaagtcacagggtcaagaagcaattgttttctattcagaaatgaatttgtctttctaatgtctagagtctaagatctatcaaggtttgtcttgaatatatcagagttaaaataatgtactctatagaatttattatcatctgtctctctatctttgttcctgtctttatcccctttacacccctcacatgaccagactggcctgcatttctgttgtgtatgagggtggctgtcaacttctgacccttcctcctctacctcccaagagaaaggtgacataatttgcattttcacaaaaatattgtctggaaaggctctcttccttctcttatttttacacttctctacatctatccactttcatattctttaaaattttatctcttcataaccagctaacagctcttattctgactccacagttgttgaaacctttaattaaactaaaatgaacaagtcattaatttgaaaacaccaaaacaaataggatgacttttacttaactccagaattttcccttttgtattttaatttctatttatatatttaatatttgtttctttttgagacagagagacacagtgtaggttatgctatcctggaattcactatgtagcttagactgtccttgaattcaaggtgatattcctgcctcttcccacaaatgttttcccagttaccagtgtatggctacacacccagctttcccattctattgctagtatttagaacaagctacatccatgacttgaaggttttctttgatataaatttagctacaacaattatcaatggactatcaaattgctcataacagaataatacccagtgtgtgcattcctctttagtgtatttaattcactaatattttattggacttttatctattttgattttgtagcattctttaatctattgtcaatttttatttgaaatcctctggggagaacatactgcagttcattcagcaatgctgtttttaaccagtccttttcagtctcttcactcttgtagagaacttttccataaacacgattgtatatgtttcttggaaacttccttgagtttttcttgtttttatgggatgtacatgtccaacttttgtacttactgtcaaaccatcttcaatttgtattgttttcaaatgtatgaatagactccattatcatgtttagttttacaatttttcatttctatctgatatgtatgaggtgtgacttgacatctttgatttttattggaatatgtggattttaatgattattaatttgatatgctctagatttctaaaaatgtatctagaattttcttatctctgccgattttaataaagttttgataggtagaaattgttaacatagtctgaatttttcttcattgtcaacatttttaaaaacagctttctctcttctattgtctcttccctgtctttaaaatatttggggatttaaggaatttttaattggatttattttttctgcctattttaaggaattttcccacactgaagggaagaaaattgtatttagagtataattttaaatttcctgtttgggaagtttccatgaattattctagtacaaaggacattccattctgtgtatagaatgaggtgagaatccactcccatttcacttgtggatgtcagagttccccacataaccatttacaaggctttagagttgtttctgcagcaaaacttactgcttacagactgcttatatttgacttctacacatcctctgatgtgaaaccaagttaccaagtattttttatagtgacttgtcaggagcagcttgcatagcatgctattaactcccgaactgaaactcttatggtgggatcccaggatgtctctgcagtatgaaagttactgctaaataccagagaagtggggatgtgtagttaggaactgagtggaatgtaactgaggagatgatgttattaaaggcatgtactctagtgagttataatctcagtgagctttgctacctttgtctgatggatgtccatgctaatatcaatcatgtgcattgtaaggaaggctttaggataaaacaaagaaaatgtgacagaaattttcttaagtacagtcaggtatagtggtgctctcctgtatttcacttcccagtctcatccaattggacaggtatcagcatccagtattaccatttatcaaggggttgattaaactgtttgccttgctgaatacttctcacatagtattccataaaatacttgttactattgcttcatgaatgagccctgtgagattgccggagtgatcagcatgaatttacacagaggaatagttactttaatctcaatatacccgaacccattcgtgtctagccattgtgttagagtcaatccaggtttatatgcttcacaaacatactaagacagtgacaaacagggtgagcgctgatgtgaagggatctgctcctgtatgacttcaaggcatggttcagttgtgctcttcctattgtttttaaggtgatactttgtttttactttgttttgaatgtgcaataatgactagaggcaaaactctatttggtatctttgaagaaatcattgacatctcaagtaactataagagaaattcgggaaaaaaatccagaagagaaaagttgagctgagtgatgcctgatcagactgtgaggctctctttcctctcgtttccttcttcactgcggttagaagtcattacgtagtgagaaccctgttatcatttcaaagacatggttccagtttgtgtcaagtgaggaggaaatatgtacatttagcacagatagaaagagaagaagataaaacctgaaaaaaagaaaatgtgtgtctcaatctgagataaatcagtcaccgacgtcttcggaagctatcagcctgctgcaacagggcagaacatccgacaggtggttataaatatgaatttgtttctagcaagagtacaatttccatgtaattcgcattgcaatttgcttattttaaagtcacacatctgattaaatcatgtattaattatcactaagatagtctgaatcacaggctaatttgatcttcagatcaggccactaatatcaacattagctttgtgccctgattgatggttaacaacagtgagaactgccatgaacataatcagtcttcattgcttactgaataatgtttaccaaactttgaagctaatgtcctgcagtaaaaatatcagtacctaaaacactgagaaatgtagagtatggatacattcccactgttctgtacacattctcctgctattaaattatattatgatctgtaaaatagctcacagaaatagggcatcctttagttattttggtggaccttctgtttgctacaaagttgttataaactgatttcatatatagtatatttgcgtattttaaagcaagtaccacttatagtcaaattgtcctatttatgtatgcttagttcagatatattgctgtaattaaaaacatgatttgcttactcacaattactataactgaaatatgttttaatatttgcctttatacatttggatatgactatgttgttatcttttctaccttgttagaatcacatgctttaagtgtgactactttattcttataaatataaagttcgaaaatactggctggtagtaattgagtgagttaatcaatatttccctttcagctttattaatcagttattatatgtcccaaaccatcatttttttaaagaatgtaaatgtgcttctacatagcttaagttttttctagtagtaattgatgttcttcattttagaatttccatatctatcgttaatcatgtcacaaagacataagagcttttagacgaattttttgcactgatgatgtttaaatctcactggagatgtcatcctatgttcatcagaaaatgtaggtgtgatgagtaaggcagcatgtgtaaacaattaagcaaaaggtgttgtgtgatattttgattggattctgacaaagcttgctctgaatcagagggcagagctagcccttagctgaccaaagttaagcatagaggttttgcaggactgagggcacactgagacaggaaatagtgagacgggactaggagaggatcttagtgcttttggatggagaataaaagagataggaggtcactgatggcttctctgctgcttctctgatcactcaggttcttaccttgatatctgtctcccaatgttttactgatgaagaataattagataaccacatcatttggcattcaattcagggaacaaaatcatgagatagccactcgcccctgactttgcagccactggagccacaggtaccggatccactgcttttcttttcttccacaagccttctgagcaagtctaggattttcctgttgcagcttccctataacaccctccagctactgcccaaactccacaggtctctgggctccaatgtagttagcagcccttgactgctggctttgcctttgggcagctctgtgctatcactttataacatgtgcttcttctgcacattcccctgtgttcgttttcagacaacaggctccttcttcccctggttacaggcttcccctggctaccgtcctctgggacactgccacacctggtaagtcaccttgatacccactcaggcttctattgtatttgtaactgccacacactgttggctgtagctgccctcagtcaggctgtacactgtttttttttgttttttctctgcccagccctgctacagaatgacaatcagcctcacacttcactgtcattgtcaacagacatagtgagacaactaggaaattttaaggggttgggaattagtttttataaatattttccacattaaaaaatgggaaacattatgattcagggaattaggtctctggatagttccataatggatggtttgaaaatggaaaaattagatgaatggataatcaacttaactaggactgacataattgacacaatgtcaatttataatcatatcattttgttaattcatccttacccctaaaactgttgtgtgctaacagtgccaagcatgaaaaattgacagataggatacaatccttagaaagacatactaatgaaactaagaaaaatattcacacacagaaagaagagtttaaaacagaagctactgcacatttgcattatgaaactgaagaggaatggctctaagttattagaaaactagccttaatttatccagttaccattcaagaagaactaccagatgatttgtacccacaaggttattcaggagttaactgggatcctatggaaatgttagatttgaagcaatttatggaaatgatagtttcatatggtaggcattcacgtgttgggaaggatatgttaaattaatggactacttggaacacaattgttctgcatgtctcaaaggaattatttatagcagtattggaagctagtcctcagtgaaggtgaagaacatgctggagagatgaagccaggatcatcaaacaatgaggtatggatagagtatatgagatttcccaagatcaaatcctggatgagggttattatgctgaggaataaaagattacatttgataatctcaccttcatcctatgctatctagcagctttgaatgctttggacaagattgaaaaatgaagaaagaggactgacccatatgctaaaattatacaaggctaaaaagaatccttcactgatttttttttaataaagattgatttcagctgtaaataaaatgatatcagatccagaagttagacaaatattaattgaatctttggcttttgaaaatactaattcagtatgtaaaagggtgatcaggcacccatagatgaatggataaatacagctgatattggatctcatgtttatcatgatacttggataagagaaattgtttctaaaaattttaagaaaaatcaaaaggttaaatgttttaattctggtaaaccatgtcatattaaaagggattgtaggcaaggtgttcctaggaacaatgatttttttttctagagataatccaaatagaagacaacagtcttctggaatatgtaggtgtggcaaaggtctacattagactaatgaatgcagatcaagttggggcaggataggaacccatttgtcattggaaattgcctttgtgggcatccataggccacagtgtcaaatatgattcaatcattctctgtcagcattggggaaactcctctacagaacaattaaaaacaacttaatacctattatggaaaaccatattgctctggatggcagaacagctttagaagataaaaaaaattcagtagaaaccataaagaaaatattttgccaaagttctataaaagatcatagactaaagttaaaagtatagataaatggcattgaaattgaagatttagtagatatgggggcagatttaataatacttgcaaaatcttggtatcaaaattggcctcttcagtaggtaaatgtttagcttttaagggattggaacattatcagaggtaaaaaacacaagacaggtgaaatttatagggccagaagaacagagaggaaaattaaaaccatatgtagctaaaataggagtgaatttatggggatgtgatttgttataagaatggaataagaagattaacatttctccaatcccagaaacaaatcataaactagcatatgtttctgagaaaaatattaacaggtattataaagaatggtcaccaaccattcagtttctgcatataagtagggcacagcagctgcttatatatgttcaaggtaccaacagtcctacctttaaaatggttaactgacaaacttgtctgggtggaacaatggcccttaaaaacagaaacattacaggcattagaaaagtttgtatgagagcagctagatgttcaaaatattgaggaaatgaccaatccttggaattctcctatatttctcattaaaataaatatgcaaatagagaattttccagagcatcttaaaatagttattgactctcaatatgcagaaagagatgttttacatattgaaactgctgaacttatttcagatgattcaaaattaactttgttatttatacagcaatacatagtaagaaataggaatcatcccttgtatataacatacattagatcccatacaggtctactaggccctctagtacaaggtaatgatgaagttgatctgctattggtaggaaatgtgttaaaagcctcagaatgtcataaaacaccatcctaatagcaaaacaattctgtacaataaaagttcttctggaggcatcaccatccctgacttcaagctctattatagagccatagttctgaaaatagcttggtattggcacaaaataggcagatagatcaatggaatagagttgaaaaccctgatattaacccacactcctatgaacaccttatttttgacaaagatgctaaatctatacaatggaaagaagatagcatcttcaacaaatggtgccggcacaactggatttggacatgcagaagattgcagatacatccttatttgtcaccatgcacaaaaacttaagtgcaaatagatcaaacatctcaacatacatccagccaaccctgaatcttctagaagagaaagtggcagatacccttgaacaaattggcaaaggagactgcttcctgaacattacaccagtagcacagacattgagatcttcaattaatgaatgggacctcctgaaactgagaagtttctttaaggcaaaggacacagtcagtaagacaaattgatagcccacagactgggaaaagatattcaccaaccctacatctgacagagggctgatctccaaaatatacaatgaactcaagaagctaccaccaaaacacaaaacaatgaaattaaaaagtggagtgcagaactaaatagagaattctcaacagaagaatatgaagtggctgaaagacacttaagagaatgctcgaaatctttggccatcaaagaaatgcaactcaaaacaactctgagataccatcttataccagccataatggctaaaatcaaaaacaccaatgacaatctatactggagaggatgtggagaaaaaagaacactcctccattgctgatgggagtgcaaacttgtaagaccactttggaaatcagtatggcagttgctcagaaaaatgggactcagtctacctcaagatccagaaattcctctcttgggcatatatacaaataatgcacgtccatacaacaaggacatatgttcaaccatgttcatagcagcattgtttgtaatagcaagaacctggaagcaacctagatgtccctcaactgaagaatggatagagaaaaagtggtacatttatacaatggcgtactactcagcagaagaaaagcaatggaatcttgaaattcacaggcaaatggatggaactagaagaaaccatcctgagtgaggtaacccagtcacagaaagacaaatatggtatgtactcacacatatatgaattttagacatagagtaaaaggattaccagcctacaatcctcttcaccaaagaaactaggaaacaagaaggactctaagggaaaaaatgcatggaccccttagaacgggaagatgcaagatctcctgagctaattgcaagcatgacagggacagggaactgccagaaatagaggaggaggaaaacaggggagaggaggaaatggagtagcagaaatgttgagttgggggaagaatagaagagagcagaatttgagataccatatcagaggagccattataggtccgaggagagatctggcactagtgagatttccagagatctacaaggatggcatgaactgacaatctaggctatggtggagaagataatctaaatgcccttccctatgatgagactgatgactacattttatgccatcttagagccctcatcctgttgctgatggaagaaaatgcagacactgacagatatatattgaacctagttgcagagagggaggaatgaagatcaaagggattggtaccagggtggtgaaacccacagaaacagctggcctgaacaagggggagcagatggaccccagactgctgcctgggagactagcatgggactaatccaaacctgtgaacatggatgtcaatgaggaggcctctgaactctatcgggcccctggaagtagattagtatttttccctggtgtaagaagggactttgagagcccatcccacatctcagcctggacacatggcagagggcctaggctcagaccacgatgtgatgttgttgtggactttggggatcccccgttgagggccctacccagcctgggtagtggagggtggatgggggacaggtgggaggttgggcgggagggttgggggaggagagggaaagggaggagggattgacatgtgaagcaagcttgatcctaatttgaactaataaaaaaattacaaaacaaaaagaaaaacaacaacaaaagatttttctaacacttgtcaacaagccaagaaaaatataaggaaatgtcatagttattctttgtgtaaccaaattccactcctgctggaagtaacccaaagggcactcgtagaactgaaatttggcaaatggatatgattcattttgcagagtttagaaaattaaaatatgtgcatcaaagcatagattcaggatttcaatgagcaactgtatcaaattctgaaaagtctgatcatgtaactatgcatttatttaaaattatggccgtcatggatatacatgaacaaattaagactgacatctagtatatatctttagtaaaatgaagcagtttttgcatattacaattatatcacacaattctactgggcaagcagttatagaaagatctaactgaactctaaaatgtatgcttaataaatagaaaggaattttaaagaccccctagagatagattgcacaatgttaattcattttaaacttttaaaatgctaatgacaaaggaacaatggctgtgtaaagacatgggctgatagaaaaaaaaaaaaactgctgaattaaatgagcctttataatttaaaaatgtgttgacctcagaattgaaaccaggatatgtgtttcattggatgagaggttttgcttttgtttccagtggggggaaaaagctatagataccatcaaaattgataaagattagattcaagcaggagagacctagtgattgaaaaggtgatagttcatcaaacaccatgacgaatcactctaaactaacatataagactaccaaatgccttttctttgatgatatatactttgccaaatatgatatttccaaaagctagggttggggcaggattttgtttttgtctttccaagagagtgaagacatccagctaaggaatctgaagaccaatggacaaataagacttctgaagaaaaaaggacaaatcatccagagaaaatgtcccaacaaaaagaataaattggtctaatggaaatggcacaattccaacatgataaaacttcataaatcttctcagatgcttgtttctgctgttctctgcagacatgtaagctgaatggtctctttgttgccccagttcaattaaaaataaaagcttgctaaacactgagacaaactcttagaatcaagttatagagagggaggagtgaagagcaaaggggtcaagaccaggctggagaaacccacagaaacagctgatctgaacaagtgggagcacatggatcccagactgatagctgggaaaccagcataagactgatccagaccctctgaacaaggctatcaatttggaggtctgaacactctatggggcctctgatactgcatcagtatttatccctggtacatgaattaactttgggagcacactctacatagagggatactctctcagcctagacacatgtggaagggtctaggccctgctccaaaagatatgacagacctttaagatccccatgaaaggcctcattctccatagagagctgttgggggcccgggaaggagtggggtggaggagtgtagggagagggaactgggattgacatgtaaaacaagtttgtttctattttaaattaaaagaaatcaaagctgcctttggagtttggagtatgaatttttccttgtctaaaactgagtatgattattaaaagaaaatcgaaaatctctgtctcatgtcagaagagccatctgatacaggacagaagaaaagccaaaattaaggtactattctattgccaccaatctcataaacctttggttttattttgaatctttaaattttttaaggtataaatattatctcaacatttaaaaaatgtatgtgtatgaatataatgtatatacatatacaccttccattgtgatgttaatggtcatatagattactaattgaagaaaaggcttaatctagcttcctatacatgattttgggcttgagtctgaatcaggtaactaggaattaagtttgtatattccagatgctcttaacaaattttgtgcctttaacttctctgagatctgtatccactgacatttaaactgcttaaaatttctgcagtgaactgtggccattcataccagtgacttacaaaaggatgatggggctccagaacaaaaagattccatctgaatagttataatgccaatcagctgagaaacaccacccaaatatcatctttggactacaaactgctcaggacaatttcaaggtaactagttaagatagtgcagcctcacagactactctagccatgacttgagctaaaccttgcacttacccattacacagagaatggacaacaaatgacatagctagctctcccaggacgtgaaaattatctcaattttctcaccatccctcagagaatccattgcacccaaaacaacgggaagcaatctagagtacatgacacccacattcccaaggggtgggctgtgtgggtttggtaattcaattggttatagatatttgtcatagtttaggtgggttgattacaagttgttactggtaatggtcaggaaaaaagctgagcaaaggagattagattgatctcctttggaaaagataaaggaagatataaaaatgataagataaaatgatagactattgaatctacttttaaactaaagtagcaactactagttttaaatattttacattggtatgaatttttgtatattggtacaaatttaagaattttttgttctactctatatatttttctattcttatttaatatagacttgtacattgatacaattttaatgtattaattagaattaggttttgttagaacctactatatatacatttctaatcttatttaaggtattgttcctatgcagctcatttaacaatgtaatgtaaatttctagaccttgaaaattattagtacaaattattttggctactaaagctaggaagatcaagctttacaatcaagttttagtcctgttaggtatgtttttatggtcaaacagagacatatcttagatggacaggttgtcttcaaactcttcagagatttacagaccatggaatttaagattttttaataatatgaggctttttatgacaatgagacttgtctaatcctggcatcactagtcttcttcaaaaaagatgatgggcatcaaagaaactccatttagagtttgctttctttgtagcaaaaaagttatccattagttaagaaactgctcatgcctcaactgctgacaatatgctgctcaaattggacaagcagcacacaaaagagactgtcaaattttgccaaggcaggagagtccttcaaaactccagcttcacagaaggcctgtcagatattctaggcctgtaggcctaggatggatgccccaatgttatagacaaaccttgggtgattgtctaggcagccagctagttctgtcatttcttagttttgaaaaatgttttctttgtatttcctgtttactcaggtaatattatatcactctcagatttctgatggagttgaagactagttagttatagctacaaaattttgtcataaattcagaacagaaaaaaaaaggtgtaacatgtataatgttgagagacattaagtgattggtaataaagattaggatagaaagtaaataaggtacgaaactttgggctcaccaatataaaatagataatgaagtattttctctgaatttgctaaatacaaatcgaatggaccttgtgaatgtaattcttacctgataattacacttgttgtataatattttactataatagagttaaaaccttctattttcatttagacaaaaatgaggaaatgtgtgatatttttattgaattctgacaataaagcttgtttttaatcagacagcagagctagccagtagctgaacaaaactaaccatagaggttttagaggactgaagatagagaaacaggactttttttttttttttttttttttttttttttttgaaagggtttggaagctgacctggaactagctcttgtagaccaggctggtatcgaattcacagagatcctcctgcctctgtctccggagtgctgggattaaaggtgtgtgctaccaccgcccggccaagaaacaggatgtagtagggcagggtttctagatgatctcagtgctttgtgaggggggaatggagaagacaggagatcactggtgccttctccaaaacttctctgatcattcagaatctcacccaaatatctgacttcctattttattgattaagaataattagataaacacatccaaaggagctctttatgaaacaatctcagaagtgattttacagtcagtatcccatgtgtcataaatcaaacatagggatgtagagagtggacctataaagttcttctgcatgagtatacaacactgtagcttccttgtcatcttgcagctaccctgaatactgaagatcactctgctctcttcactacttgtcttggctacaaccagggaaaaatatatacagcctgacatctttaaaatgagaaaatgtgagatgcttctctttattcccatacagatgtgtatttatctgccagcctgaaacaagcataatctgagcaatttgttacatggattaatggaaaggaagagtaggaaaaagtgtaattttcattaaacataatggtatttatctgtagatgagatgatataaataaagccttttgaaatcaaaagtaaataatcagaaagtaatatgtaaccactgggattttcctttttgtggtacattttcaatacttatctgtactacccattagattggtgtgtcaattatgttagaattttcatcatttaccttagagatcattatcattcatgaggtttatcatgttctccttttataggccaatgacctaataaagcaggagtttaatgtgaaattgggcttacttttcttattaaatcaaagactcacaaattctttaggttcacaacagttgctgatatgtcctatatctgagacttagatatctgtcagtaaataagaagcactcagtgttctgaatgtcagagggagtaaaatatcaacaatgtttatatgacttgcgtcaattgcccaagcattgaaaaagcattagatcagcagaattgttaagggagatggttttgaagatgctttgggtggcactaaatgtcttatgtttgcttttagtgaaatcagttattggatacatttttttagtgggataacattgactcatgcattctttggatacgaaaaggatacagaaacactaagctgagagttatctgtccatgtgggagatgacagtggtttgagacaagtgcaagtagcaaatgagttggtgaaaacacagttttcattggatagttcattgtggagttttctttcttaactgtataagtggaacaatccaacattttctaataaaatattagatttttgaggaagagttttgtagttacagaaagtggcaatgaatttctctaaatccccaacacaaaatatttagtagaaagttacttgtatgaatttcatgtaaaacagacccctctgacttaatgcacttctagaatgcataatcatataaatgaccatgagacaaaatgaagtcactttgctagctatgtataattattggcttgacccaaccaagaatatcctataagtatagtcttaatgaggaattgttagataaagttggccattgggcatgtgtgtaggggattgttatgtttcttaattgatgatggaatatccagtccactgtgggtgatataatctctatgaaagagctattgaaagaaacagaagtggagaaatctaggtgcaagcagggaaggacacatttattttattcttagtgttgactttagatgtgttgagattagatgtttaagttctacctttatttcctttcagttgacagtgtgtaaattggagttataacctgaaataaatcccattctcctttgagttgttcttgtcaggatgttatgccacagaaaaataaacgagaatagaatcttcactaagaaagcaagcgatcaaaaaagaagagaccataaatcatgagtattacaatgttttcagattagatgatgaagagtaatgaccaaaaagaaaaagaaaaaaaaagcgtgagctatgtaggaggaaataagagatataaagatactctggaacttttggaagaatatagatcaactggactatgcatgcttaacagaaaagcacaaaaatgagtaagaaataccttgcaagtttttgtaaacttgagatcattgggaaccaggtcaaaataagttcaattacattgacataggtgatagcctgaacgcagggcttcacaagtctatatggatagtggtgacctcccaagacttttctgctgtgaataaaggcagaacaaagaaccactttcaaagatgaatgaagaatgtatgaagcttgctaagactgctgaagctatgttcatttccatcctgatgtaaataaattttcagagaggattttttttttttttttacttctgagaggaaggctgaagatattccaaacaattgagtcctgtttcctcagagcattttaggaatctgtgagacatcataaatctgggtgataggggaaatgtggatgaaggggaaactgatccttcagaaagcacttgtactacagaggcaacagcccacattctgccagtagctatgatgtttgtgtccctcatttatgtagcacctgggcaaatattctgagtttcttgcccttaggggattcttcttcttttcttctaaaattgtgtcctggatgtatgatagcaaggacactgctcagcaatcactagacacaaaggacgaaccttcagaaatagaaaatattgatcccaggttatctcacttcaaattctaaaaatagaaaagcctaggtgccatggcctcatctcctgagttttaaggactcctttccaaagtgatctgttaaaattactgatcttgttataccatatagtccattgctatattaatgcacttagattgttagagaagaaatggaaatagaacaagtattttaaacaaacaactagctaaagatccagttatcttttcatgaaaagcatggatatgaatgagaaagctcaacagtttcaccttgtaaagtgacttattatgaaaatgggtattttcaaacagcagatatgctctatcactttggatttatttgccaagataactgatacttcataccaatggtttatcacaattacataaaagctaaagaggcatttctccctatattccaaagacatgtgacattgttttgtctttgttgggatttagttcctcagaaaattttcatgtataagctaaaatatttgacattattaatttaaagagttgtgtatggctgctagaaggggagaatatattttttacagaaacaaaatccctggtaggttatcaagtcccaagtcatccaccataacacatgttcacatgaataacactaaaagcattccacagtatatatggtatttgaatgtaattatcctcataagctcagaaggcactattaggaggtgtggttttgctgcaatacatatggtcttgttggaggacgtgttttaccgttgggtaggctttgaggtctcatatgtactcaagccacacacaggaattagactgtttcctgatgcctgcaggtcaagatgtaagaactctcagctcctccagcatgatgtctgcctgcatgttgccttgcttcccaccatgatgatattggaccaagcctctgaactgtacgtgtgctactcttttactttataagaattgtgatcatgttgtctctccatagcaatagaaaccctaaatctctctctctctctctctctctctctctctctctctctctctctctcttgttctttttttcttccacccctccactgtctctctcattatggaagaatagggatgagtttgagagaatatcatggtcagaattgcaaatggaagagggaaggtggcaatgatgtaagcacagtacttatgtatggacttctaaatatatcccatcacatcttggaaattttcctaaacacataagcagtgtgtttaagtttatgttcataatcatttacatacatacactgagggagaatggcataggaaaggagggatggtgggaaggagaaagagacatacagagagacagagagacaaagaaacagagacagattgcaaacagacaggtttgagctatttccaagtacaagagaagttccctatattcctctctcacagtaagaaaggaaaaaataaaacaacattcaaaattcaacaagccatcttgagtagtataaatgtatattgcagactactagataaatatagtaatgtactcagtgttaagataaactaaactgtaagatatagtagaacttaacatatcttaaaagagcttaagcagatattctaaaatataagttaatatcaaaaggtcagtattaatcataatgttaaatattgtcaaatgcatcttttaataaatttcacattaatgaaatgtgtgtactgaaacaagctaaagctctttatctgttcatagattgagaaatatcataagaaatataaaatcaataattttaatttatgaaaatgttgtataatatttacaaatgcaatatgtatacaagtatatagaagccaggagaataattttggatgaattgcaacatgacatgaaagcaataatcctactattttatagtggcctatgaaatataactatatgtactctgatataatacatagtaggatgtaattaatgagctaaggtctggctagcaagaaaaatcagaatatattatagataaacaaaagatctcatttggcaatagagtttggtccagtatcattaattctttatctaaatttacgtgtgtaaatggacttaacacatacttaagcccatgcatacatttcctttctgtattatgcaagactttgactcacagccctgtttactggatcatatttgcaatttttcccaagtatctttgagaatttgatgctatctgtaagtgcctctaatgtaaaatgactgtcattaaatattgatcattggtaaaaatctgttaagatgacaacaataaatatcaacttttatatgtgtattatgctaagatgtatctattttactgtatccaatgaaattctctatatgtgagtagttaaatgcattaaaattatgaaagtttatcaattcaccaatacaagtgagaggcttgagactatagtgaacagggtcctgttatgccctcagggataagttaatgagtttggcagtcagccttatttcactactgatatatcattcagcttctcatcatattcaaattccttttgacttctagtgttagagtttcttacaaaccacaaacacatgcccagcttatggctcctcatggcagttgaaaactccaatttcttctttcattaagcaccatcagcaactacacagctacctagatcttccagggtgctgttcttgatgtttcattggtgggtatgggtggtatttggttattgatattttagttttgttttgtttttaatttcaaacagtaaccataaatttattatttccaccatgcacttttctcctccaacttgccttgtgctttcctgactcactcttgaatttatgaccaccttttctttaattattattgttacatatattttaattgtaacttacaaatattacctgctgagcacattaaatgctggttgaatacatgtgtattttgggctgaccgcttgagaatagataatcttttcagagactcaaccttagagaacactgattcattaattacccgtgctctatacacaagggatgggaccttgtgaaatttcccatccatattggcatgtctgctgttattattattatgcaagtaatgcttaggtgaccttattgctgagatttcacaggagcatcttcctgtcgtgtctagcagaaactatcttgcagcatgtgtatggtcttctgcatcttacaatcaatgatctctaaattttccctcccaccctcccttcaataattactgaagaataatcaaggtgcattatatagatggttctttactcagtcatatgcttgaattttcacacaaagcaaatatcagaaggcttaatttctgcatgcaggttggcaatcacaacactgagatttagaaaacatgtgtccttgattttacaaacttagttatttctgcttgtggatacagtatacagaacattggcctgtatatgaaggtaaaatagctttagaagttcagtgatatcatttttttattctcaaatcacactctatctgtcttttactttaaaaacaaaggttaataagtcaaagaaaaagtttctcactggaaaaagtgtccttaatgggaggttgaaaacaagttcctaaaaacctcaatagagaaattcttctctaatttagcagttgttgctgctgtgttagtcatttcacagcaagacttggcttttgtcctgggaggaggggaggtgtatcctcagctttttctggatgatttctggggtttgaacctgcagcaagccaggtattgctgttcatccttccagcggaagcattcagtggcatgtcacacagacatatctaagtgttttctgtttgtcattaaaaatcagaatggaatacaaataaacacaaagttagaagtaaccatttgtaagtagaatcaatggccataaatcagcaaggcagagtcataggatctttcatgggtttcttctaactgacactggaattcagaactgacttcagtgtttgctagagtggaagtcgtggtgttcactgtggggatgaaagatttttcacagaatgtagagattcatttatttgttaaaaaattgttttgtttattgatattataattacatcattttcagttcccttccctccatccaatgcctcccaggagtgtcctggttctctttcaaattcatggtctctatttccttcattgttatcacatgcatgcaagtgcacacacacacacacacacacacacacacacacacaaactgctgccactactacacatataaacacaacatgcttggttcatatgttactgtgccacttgtatgcttagatttcagggctgaccacatgataccagataaccaactgaggatggaagatagtttttcccaccctaaatcttccccatttccactggggtcatcattgtttgactcttgtttattcagccatgttgatgaaactttatgggtgtagcctcttggacattattttctcacccctcatcaaagaagcttctcttcataagagacagagatcattacagaaaaccacagctagtcaacatgcagagaaaaagaggtcgcatgctccttagctccaactgatacatgtataacaccatccttgcaaccgaggcacagtgttcattgtggaagatgggatgacatgatggtcagaaccagatccaggaaaatcatctatatttgtttgtaacttaagatgtggtatttctgtggtttctagcatgtaaaggaagaagatgaaacatggctcatgagcatgaggtgttgagattcatgtggaaaattaaaaaaaaaatctttttttcattgtataatgaaaggacaaacaattagccaaattagaagccattagcttgtttgctcgagatctaaacaagataatataattgctagcatcccttccccgccgtagacagtagacagccaggttcttctttttcatcaaagccaatcactgtagacagtcagtctgcccaaagaacattaaaaagatttctcctcaataataaaggcttttaaaaaatttgtttgtattatattaactactctttaagctctcatattcaatttgcctgaaaaggtcctgtagtactaaatcagaagtggaaatttcccaggacactagaggctcactgagcaatgcgagacagcagattaagaggcataggccaacgtgcagggttacaagggctgcaggcatttacttaacaaaacaaagtgctgaggcagctgcactgctattcttcaagaatgtttattacaagctctttacagtatcagaattttttctccttcctcttatcactagtcagtagaatacaattactcaactatcaattttgatttagcaacaacttctctatttccactatcagctgatcctcctggtaacagatgagctactgaaggcaatgcagcacttccttaaagcacagggactggaaaatggaataaaatttattttgtgcacacactctaaatagatgaaaatggcagaagctagaaatagacaagggctagcagctttgcttatttgagttttactaatagcttctgagaaaggatcattgtcaactatgcatatgtagtataaatgagttcataaatgagggcttctagaaacaatatcattattagaatatgaaagtcttacctgttatgctatttataattcatgtaggtaggcattgctgcatctatcagaatcactgataaagatctggaagatctctggatcatctcaaccaacatgcttgtgattttattatgaataagcaggcattcaaagaagatagaaatgcaccattaaccagaattaatgggctaaatctacctcacctgtttctgtgcagaaatttgctatatttgaacaaacatgtattcattgttttgcatgttatacatatcatatataccttagattatacatagaatatataaaatacagatgttaaaaattgcaaattaagagagcaaataccttgaaaatttttaaagtgccaatgttattttagagattcctcatttctaacagccacaatatataaggttttcaaggtttacactaaaaatgtgacatagtaactttgtatttaaaaaaagagtttaattgctatttactatgtgtaaacaattcaaaaaattctaaattctttcaaaataactagggtttaatatcccaaattgaatggatgactagagaataagaacttaagttctgtctcagaaatcagttacatttgattcccttcagaaatcaaacagtggcaatctgagtatgtggtggtgactactcctgtctttgtataaaactcagtgtctttataccactgaatgataaaataggccaaacggaagaagaatagctatacaattatgttggagaataatacatggtatttatttatttatggaaaacatagcaagaaagatgagagctttaaaatttttacttatttatgtgcattttgtcagcatgtgtgtatacatatcacatatatgcctagtgcttgcagagaccagaagacattggatcctctggaactggagtcacggatagtattgaaattctcaataaagggatgacagtggtctcaattggaaagaactttccctaagttaaaaaatgcagacattgataaacctgtgggatattttcaaagaaaaaaagttttatagtctgatgaaagtatgatttgaaatctgagaaatgggaataacaatgatgctgttcttaatccagagactcagacacacagaaagattattgggaagaagttgctaagcatcaatcctatacctacacaagttggattttattgtgagtaattgcatttacatggaagaacacaggatataaatatttccttgatgggtatcaaggtgaaagctgtgatggttttaggttcttatcaagctaccccaagttgatagttttctcacagctcttctgtatatgatatttgacttattaggtataagctcttagaagattaaatttcaccaattaacagtaatgaattaatgtaggatttcagatacacttatcatggtggatgtcacagaggggatccaacagcctgtaggcagaggactagttgatagacctctaaatgttgatgctcttatgaatttggtcatgctccttttttatttatatttatatttatataaaaagaccaataatggcagtatgttatgcatcagtaacagcaacagcttttgcaggttgtgcagtaatttgaacaaaattgtagagacatccagcacactccattttaaaaaaaaatagtaaaagtaaatgacaaaatcccagaaaacaatatagttctgtaactcttgtggtacctggcaccatttttttttttaaattagcttctcaattatcatctggaaggaaaccattctgagcaacatcattaaaaacagctctgataaagcacagtcaatactatgtatcataaagcaggtccacatatgagtgagtacatatcatgtttgtctttttgtgattgggttacctcgctcagaatagtttcttcgagttccatccattttcatgcaaatttcaagattccattgtttttttctgctgagtagtactcaattgtgtaaatgtaccacattttctctatccattctttggttgaggtactgataggatgcttccagtttctggctattacaaataatgctgctatgaacatggttgaacagatgtccttgttatatgaatgtgcttctttgggtatatgcctagtaatagaattgctgcatcttgttgtagactcattcccattttcttgaggagtcgcaatacagatttccacagtggctgtacaagttggcactcccaccagcagtggaggtgtgttcctctttctctgcatcctctccagcataaactgtaattggtgtttttgattttagccattctgacaggagtaaggtggtatctcagagttgttttgatttgcatttctctgatggctaaggatgttaaacactttcttatgtgtctttcagccattttagattcctctattgagaattgtctatttagttctgtaccccactttttaattggattgtttggtgtattggtgactagcttcttgagttctttgtatattttggaaatcatccctctttcagatgtcgggttggtgaatatcttttcccattctgggggctcccattttgtaatgctgactatgtcctttgccttacagaagcttctcagtttcaggaggtcattgttctctttaattctattttattgacttcagacctcaatgtgattatttcatgtcacctactcctctgggagagtttgcttctttttgttttagagatttcaggtgttctcttaatttgatagtgtgggatttctctaatttctttatataggtgtttagagctatggagtttcctcttagcattgcatccatagtgtcccacaagtttggctatgttttacattcattctcattgaattctatgacatctttaatttttctttatttcttccttgacccggctctcaaaaatcaggtgtatgtaggtgtgtgagttaatatcagggttttcaactctattccattggtctacctgtctatttttgtgccaataccaagctgttttcaggactatannnnnnnnnnnnnnnnnnnnnnnnnnnnnnnnnnnnnnnnnnnnnnnnnnnnnnnnnnnnnnnnnnnnnnnnnnnnnnnnnnnnnnnnnnnnnnnnnnnnnnnnnnnnnnnnnnnnnnnnnnnnnnnnnnnnnnnnnnnnnnnnnnnnnnnnnnnnnnnnnnnnnnnnnnnnnnnnnnnnnnnnnnnnnnnnnnnnnnnnnnnnnnnnnnnnnnnnnnnnnnnnnnnnnnnnnnnnnnnnnnnnnnnnnnnnnnnnnnnnnnnnnnnnnnnnnnnnnnnnnnnnnnnnnnnnnnnctttacaggtctttcacttttttggttagtgttactccaaggtattttatgttgtttatggcaattgtaaagggtgatgctgatttctatctccaccaatgtgtcatccctatatagtagggctacagatttttttgagttaatcttgtatcctgccactttgctgaaggtgtatcagctgtcggagtaacctggttgagtatttcaggtcacttatgtagactatcatatcatctgcaaatagtgagagtttgaattcttcctttctgatttgtattcccctgatctccttttgttgtcttaatgtgctagctataatttcaaggacaatattgaagaggtatggagagagtggacagacttgcttattcctgattttagaggaattgcattgagtttctctccatttaatttgatgttggctgttggcttgctgtatattgcttttattgtgttgaggtgtgttcctgttatccctgatttctccaggacctttatcatgaaggggtgttggattttgtcaaaggctttttttggcatctaatgacataatcatgtgatattttttcctcagtccatttatatggtggattacattgatggttgaaatatccttgcatccctgggatgaaccctacttaattgggatggatttctctgatgtgtccttggattcaatttgccaatattttattgagaatttttgcatcaatgttcatgagggatattggactgtagttctctttcttagttttctctttttgtggcttgggtatcaaggttattgtggcctcataaagagtttggtaatgacccttctgcttctattgtgtggaatactttgaggagaattggtattagctgtatattgaatttctggtagaattctgcacagaagccatctggccctgggcttttttggttggatacttctaatgactgcttcaatttcattagaggttataagtctatttaagttgcttatctgttcttgatttaattttggtaagtgaaatctgtccagaaaattgtccatttcctttagattttcaaattttgaggaatataggttttcaaagtatgacctgatgattctctggatttcctctgtgtctggtgttttgtcccccttttcattcttgattttattaacttgcatgttcactctttgttgtttggtaagtttggataaaggcttgtctatcgacaggcgttggtgccgcacacttttaatcccagcactcaggaggaagaggcaggtgtgtctctatgagttccagaccagcctggtctacaagagctagttccaggacnnnnnnnnnnnnnnnnnnnnnnnnnnnnnnnnnnnnnnnnnnnnnnnnnnnnnnnnnnnnnnnnnnnnnnnnnnnnnnnnnnnnnnnnnnnnnnnnnnnnnnnnnnnnnnnnnnnnnnnnnnnnnnnnnnnnnnnnnnnnnntttccattttattgatattcaaccccaatttgattatttcctggcatctgctcctccggggtgtattggcttctttgtttactaaagctttcagttgtgctgttaattctctagtgtgattattctcctgtttcttcatgtaggcatttagcgttatgaacttccctcttagcactgctctcagagtatcccataagtttggatatgtgtgtctgcattctcattgaattctaggaaatctttaatttcttttttatttcttcctggaaccatgaattgtgcaattgcgtgttacttaatttccatgagtttgtaggttttctatagttcgtgttgttgttaaattctaattttaatgcgtggtggtctgataagatacagggggttaataagacacagggggttatttcaatttttttgtacttgttgaggtttgctatatttccaagtatgtggtcgattttagagaaggttccatgtggtgctgagtagaaggtaaattgttttgtatttggatcgaatgttctatagatttctgttaagaccaattgctccataagttctattagttcttttgtttctttgtcaaggttctgtctggtgtttctgtccagtggtgagagagggagttgtaatctcccactataagtgtatgcagttttatgtgtgacttgagttttagtatgtttcttttacaaaattgcatgcctttgtatttggggcataaatgttcagaattgagacttcatcctgatggatttctcctgtaatatgtaggaaatgaccttcttcatctcctttgactgatttgaaagtccaatttattggatattaggattgctacccccgcttgtttcttgggtccatttgattggaagaattttccccaacctttaatttttaggtaacgtctgtctttaagtttgaggttgagtttcttatatgtagcagaaggaattattctgtcttcttatccattctgctaatctgtgtctttttacaggggagttaagaccattaattttgatggatattaattaccattgattgttcattcttgtttgtttttgatttggtgatggtggagagattatgtgtgggattctatcactttttcttttgactgttggtaagttgggtatattattgcttatgtttttctgtttgtagttaacttccctgggttgcagttttccttccagtactttctgtagggctggattggtggatatgtattgtttgaatctggttttttcatggaatatcttgttttctccatctataatgattgaaagctttgctgggtatagtagtctgggctggcatccatggtctcttagtgtaggtagaatatctatctaggatcttctggctttcagagtttccaaggaaaagtcaggtgtgattctgataggtttgcctttagaggttacttgacctttttcctttgctgttcttaatattttccctttgttgtttatgtttggagttttgattattatgtggtgaggtgaacttttttttggttcattccatttggtgttctgtaggcttcttgtattttcattggtatgtctttctttaggttgggaaagttttcttgtatgattttgttgaatatgttttctgtgcctttgagttggatttcttcaccttcttctatacctattattcttaggtttggtcttttcacagtatcccatagttcctggatatttagtgatagggttttgttggacttaagattttctttgcttgatgaatctatttctgctattgtgtcttcaactcctgagattctctctcccatctcttgtattctgttggttatgcttacatctgtagttcctgatcatttacccagcttttctatttccagcattgcctcagattgtacttgctttattgtctctattttggtttttaggtcttgagtcttgtactggttccttgagagatttgttgatatcctgtatttttttgttttgttttttcttcaatttctttaagggattttctcatgtgctctttgagatcctctatcattttcatgaacatgtttttaaagtcattttctggttcttctgtttcatgatgtttagttcttactggtgtatggttcctagtctccggtggtgtcatattgggttttctgttgttggatgtgcttttatgttgtcctcttctcatcctttcttctggtgagtatagcaagtgtttcttgttctcctggtgggtgtgggaccaaggttcttttctggtagatgcaaacagatctaatagtctgatgtcggtccccttctagtggatggaggtgtcactgttacccgggtgtcggcagtgttcaggcgtgctatgtcccacaggcctggcagttggaggcaaagctgtcaccgggccctgggagtcagatcctgctgccgaactccatctggcaagcaggtcgcttgcctcagatgactctgagcagctacgatgatgaactggaaccagaaacacttcctggcctacctgagctggtggatggaggcccggctgcctctgggtgtttggtgttcggaacctactgctgccgaactgggtcctccatgcaggtcctggtcatgctcctttaacagcttgaaataatgactgtttgaaatagctgaactcacttttaatagatatttctgtcctcatttgcacattgcttttcgttaacagacatttggcatagcaatttacaatgctgttttttatttttatttttatattttttatttagaaacagcgccatttgttggaaatgctatcttttttccattgtataattttagcttctttgtaaaaacttaggtgtttgtaggtgtgtgggttaatatctgaatcttcaattcgattccattggtctacctgtctatttttgtgccaataccaagctgttttcaggactaaagctataaaatagagcttaaagtcagggatgatgatgcctccagaagtttctttattgtacagggttgttttggctatcctgagtcttttgtttctccatataaagttgagaactgttctttcaaggtctgtgaagaattatgttgggattttgatggggattgtgttgaatctgtagattgcttttggcaagattgccatttttattatgttgatcctacctatccaaaagcatggaggatctttccattttctggtgtcttcttttatttctttctttaaagactcaaagttcttgtcacataggtttatcccttatttggtagcattacctgaaaacactgtatcttgtttgtggctatagtaaagagtgatgtttctctgatttctttctcagtccatttatcatctgcatatgttgttttctgtatcagataatctttgagaagagaggctacctgaaagtaaactgataactcctctacattctgtctctgtataagagaaacttatgcttactatgatctgtggagtcctcataacaggttgatacaattatgaagttctctttgtcttgatataaattatcattacaaacagtaacattgcttagtgggtagagctgattgctaacaagcctgatgaactgagtttggttcctagaacccagagaacccaggtatcagagaatgaacgctagtcctccagtctctacatgtatgtctttgttcatttacacacatgcataagcctattatttttgttttctctagtaaatatacttgcataaaataagttccattctgttattacttaagtactgatgctttcagttgtgtttggggcaatgtgatatgggatgcaactgtcagatttgacatgatatagcctcttcaaatacaaccttagtagatagccatattctgtcccctctgtccctactgctcttcctattttataccttttgttcttataccaggagcaaagacttaccagttaagttgatctcattttgtcttccaaactgcaacactcacttaccagtggtggacaaattttcactagtcattaactatccgtgcagtccagaatccaaatcacttaaataggcgtagcacacatcatgaataggcatggattcagctcaatttctttttacttattccagttatttgtcctgattaccgatttacaagtcagttatatctcctgaatacattctatcctttttgttgtcccaccagtgtctcattctgaaaaatacagatttcttagtattcttatttatttaaaagaattgggtagaagtaaagacacctagtgatagtgagaattctgtgcctcatgcaatataaactgtgtatatgtgtgtatagagatatagcaacatttttttcaaactaatgttgaaactaattatataattaaaattaatggcctatggaggctggagagatggctcagctgttaagagcactgggtgctcttctagctatcttaagttccattcccagcaaccacatggtggttgacaaccatctataataggatattctgccctcttctggcattaggctgtatatgcagatacagtactcatgtacataaaataaacaaatctaacacaaaaattaatgttctatgaagtgcaaccttcagagaggacttagaaaatgtaaaagtttaaaaagagagctccattctaatcaaaattaaatacctcactttggcataaattccataaacctgaacaatgtccatgatcttgaataaaaattcagaatcaaagtatctggtaattatgcacaccctactcttttcatttctactcataagaatgtcttccttcctctcttctttctttctctctctctctctttctgcctttccctcccttccttccttctttcttttttcattcttctttctttctttttgttttttttttacaatagtctgtcaggcaaacatctcacttctttaagtgaagttatcttagaatgaagatatcaacacttgcgacatagatgtatgcaataaagtaagcaaggtctgcaattatgagcaatactaatcctgaattatcacataagtgtgtcatcattcatgaacacacttttgacaaggtttatcattgtttgccataattcagttttcttaaaatatgacttttattttgttttgaggactagagaacatcttactatgttttttttttttttttttctgggacccaaccttctcaacttatatcatttaaacaggagcctcttagtgtcgctgtctcttttgtagaattattaaatattttaaatgtgtttacttattgaactctttgaaaaagacaagttatattccaaatgcttaataacttacaaattttatttctcaaatgagtgtaccagttacataaagtcacaatctaaagtatgtgtatactgagttagtagaaagtcttttatctgtactaatatctccctgcagggcatactttgattctttaaggactatttaataatactcaggcaggaatattttataatacttcagtagtataatgaatattagatttttttttagtttatgcattctgtgtgtgtgtgtgtgtgtgtgtttgtgtgtgtgtgtgtgtgtgtgnnnnnnnnnnnnnnnnnnnnnnnnnnnnnnnnnnnnnnnnnnnnnnnnnnnnnnnnnnnnnggtgtccacacaatccagaagagggtgtcaggtcacttgaagctagagttgattaaaggctatttggaggctgacataggtgttgggaactgttgggagctgcaaagtaccatgcctacaagatggcgccagtctccaccttctgccagcccgacagcgagtgctctctatggtaaacaactcctaatttggtaaaggccatgtatcctcttaattctgcttggagacaacccatcctggtgcgccacgtggggttagatgattggtagttgtaggctatatcaggccccatcttcctctacccggggccactccctgtaaatcaagtttcctgagtaaaactgtgagaagattcctcggtgtcacgtcgttcttgctggtcaagggtggtcgagacaagtggtggcccgtacggggactcagaacttctcacagtcggggtggcgccagtaagttcccaaggtaagtgggacaagtaggtccgcagtgaatgcggcaataaggtctctagtaaggagcaataaggaccttcataaagaggcaataaggtctccggataggagcaagactgttcgaagccgaagcaaaccgaaagtaaaaggcctcactcctgctttaacttgcagagtgagagtaaagtaatggaccccgctgttatagtggtgatttggctgctttttaacattgcagtgtgggctttcgttttttggtggtgttatccaacttgtacgtctccggagtgcacaaactattataagttagggaaagttaggattttgcctgggaacaaggaacattgaagccgcgtgttcggcaggtatggtgactagtatgcagctgtctagaggatcaagagggaaataagaaannnnnnnnnnnnnnnnnnnnnnnnnnnnnnnnnnnnnnnnnnnnnnnnnnnnnnnnnnnnnnnnnnnnnnnnnnnnnnnnnnnnnnnnnnnnnnnnnnnnnnnnnnnnnnnnnnnnnnnnnnnnnnnnnnnnnnnnnnnnnnnnnnnnnnnnnnnnnnnnnnnnnnnnnnnnnnnnnnnnnnnnnnnnnnnnnnnnnnnnnnnnnnntgaggatgaggacctcacggaggatgaggagggggagattattgagcccatggaaaaacgttccttaaaagtaccagaaaaacagcgccctaaaatggcaactgtaaagcaagggcaccgccctactgctcctcccccctactgctcacaagaggaagtaagagctcctggttgttccaccttctgtccagaagtgtggcatactgttcgcactgagttccagattgctcgaccactggcttatccagtttttatggatggtaaccaacagagatgtcatgagccaatagactttaaaatagtcaagctctggcagagttggtacgcacctatggggtgatggcagctttcacagttgcccaggtaaaagcactcaattgcttcagtatgacaccttgcaactggatgaatttggtaagagcttgtttatcgccaggacagtatttagattggagggctttccaaattgaatttgccaatgatcaaggtacggctaaccatgcagctggtcatccagcctgggatgtggacatgctttttggtcagggacattttgcacagcaacaaacaggatacccccctcaagtgtatgatcagattaaccaaacaccttctaatgtcatttttaaaagaacatccagtcgtttttccaaaaatgactgcagctgctcctattgttggagccccaaacattttcactgatggatccaagacaggctgtggagcctatatgatagagcatcaggacccagtgtgctttcaatatcagcctggctccccccagattattgaatgtaaaattgtccttgaagtgtttagaaattgcccgttcccctttaatctgatttctgattcggcttatgttgtgaatgctgttagggccatggaggttgcaggacctatcaaacctaatagtacagtttgcatactcttacaggagttgcaaaagttgatctggcatcgcgatcagaaattttttttacaacatattatggctcataccaacttgcctggacctctatcaaaaggcaatgagatcgtagatcactgtactagaggggaatatgtattttttgcttcccctgtggagcgggcacagcaatttcacaaacaattccatgtatctgcaaaaactttgcaacaaaggtttcaactatcccgagcggaggctagacagataatattgaattgtcaacagtgtataacctttttgtacccccctagcgtgggggtcaatcccagagggctattgcccctgaaaatttggcaaatggatgtaacccatttttcagaatttggaactctcaaatatatccatgtgtctgtggaacctgttcaggcatcatccatgccacccctatgagtggggaaaaggcttgaaatgtcattggacattgccttgaggcgtggactgcctggggaaaacctcagcaattcagaactgacaatggccctgcttacacagctcaatcttttacctcctccttaagcagatggaggtccaattaaaccatggcctaccttataatccccaaggacaaggaatagtcgaaagagctcatgcacattgaaagaatgtttattaaaacaaaaagggggaataggccatggtagaacaccaaaggaacaagtatgcttggctctctttactctgaatttttggaatttggattctcaaggcctttctgctgctgataggcaccagactcaggcccccacctggaagggatatgtcaaatggaaagatgtaatcacgggtctatgtcatggaccggacccagttttaccatggtcaggaggttctgtttgtgtttttccacaggatcggcaagatccggtgtggattccagaaagactgatgagacggtgcaacaaacaagatgaagcctccagtattgatcctgctgatgagtctgatgtctctgctgctgatctaggccaggccacaaaccctgtgggccatagctaaagcatggccaattcctttacctgttcatcatacatctaaagtcttacctgccttcttctctactagttgtgatttgggtctgccctgtgtgaattgggatcctgacactgcccagtattcagccactaatattactctccatgcagcatttacttcccttgaaccttttgcggttctccagaatctcaccataagacttcttaatgtatctggtactagggatgagaagggaccttctcttaagaatctatcagtacataaaactttggataatttcactgttccatctagcccagtatgtttaaaagctccctttttctttctgctctctaatgctactaatgctaacaaaaacgtgatctcgtgtaattcgactaacgtctcctgtattgctagtcaatgttggaatggtactgctaatacagcagtagtgatgagggtccctacgtatgttcctattccagttaaagtggatacaggaacatttcccattacggaaatcatcagaaccaaacgggattttggaataactgcagcattggttactgccataaccctttctgcagcagcggctatgactgctgctattgccatggctgcacaggttcaaacagctgagatagtcaatgacattgttgaaaacatggccacaacattaaataccttaagatctattgatggccacttaaaagctggcattctaactgtgaaccaaagagtggacctgttgcaggagcaagtggatgatttagtaaccttaacttccataggatgcattcattccttttcttnnnnnnnnnnnnnnnnnnnnnnnnnnnnnnnnnnnnnnnnnnnnnnnnnnnnnnnnnnnnnnnnnnnnnnnnnnnnnnnnnnnnnnnnnnnnnnnnnnnnnnnnnnnnnnnnnnnnnnnnnnnnnnnnnnnnnnnnnnnnnnnnnnnnnnnnnnnnnnnnnnnnnnnnnnnnnnnnnnnnnnnnnnnnnnnnnnnnctcttaagcaagcctttagtttagttaaggaatgggatggggtgggggttatgctttccatgatgttgttagacatttttgtttgcctgtggtgtctatgcaggatcaggaagtctcaaaaatcccaagttgcaatgttggtacaggcctttgctgctgtggaaacaggacaatcccctcaagcatggttatccatgctgacagactaataggtgtctgtctcgcccttattgagtgagtgatgtatatctgaatcagtcatgctcaatgacgggcacctacccttttgctgagtgaataatcatacatgtgttcccttcgaccttaaacatgagcctgtgagggcgacacagtgactctttgacgggtaagatagggacactggggttgtacctaagacagagatgactgaaatctgacaacagatagatactgatactcctataatattaaaacaaaaagggggaactgttgggagctgcagagtaccgagcctacaagatggcgccagtctccaccttctgccagcccaacggcgagtggtctctatggtaaacaactcctaatttggtaaaggccacgtatcctcttaattctgcttggagacaacccatcctggtgcgccatgtggggttaggtgattggtagttgtaggctatatcaggccccatcttcctctacccggggccactccctgtaaatcaagtttcccaagtaaaactatgagaagaagattcctgggtgtcacgtcgttcttgctcgtcaagggtggtctcaacaggaactgcacttagatcctctgcatgagcaacaaatgcccataatcaatgagccatctatctcttggggctcaatagtattattttattagcaacttcctatgagcatcaatccctatccctcttaacagacaggaatctgagacttgagaatcatttatgatgattggaatcacaagttagtgagcttggatctaatcacagtgagctgtattctcagacctgaatgccagaaaccaatacttttttcttcactatctttatctgtgtcttcttacaaaaagggggaataggccatggtagaacaccaaaggaatttggagagacctaggctagaagcagatcagatccgaatatgttgttttggcttgtcacagtgcagtattgagacatcatttgggaaatcttcagaaaacaatggattctcctctgtccagaatcaggagcaagtgcctttctatcttttcttccagggttctcttttccaacattggccttacaggccatttgttttcctgaaactatttcatttccctttcatccttgtgtgctgaaatgaaagtccagagcagttataaattctgtggctagtgaaagaatccatccccttgaccagatattgcaaaatgagctcctgaattgtggccatggtagtattagcactatcatcaggtccacaacagagtaagaaaataatcaagagttggcaccatcacaggcagaaaagaaggaatgtaggcacttaacattgtatagaccagtcccaatcctagaccaggctatgttgaagccatggttcttgtcacctttttgaagcagtcttcattttatagaaactctacttttcttcattcctgtatgttcagagaataaactacttgtatcaaaggtcaaaatggagcatgaactcaagtcctaatagccattgatagtttccagttgttaggggatggcaagatgcctcagtggataaaagtgtttgtgtcccaggcatgaagaccaaagttcagatccccagaatcaagaaaaaagtgaaggatggtcacaaacacctgtaactttagtactatggcagatggaaataaaagaaacactggggatggctaacatccagatccacttcaactttagtgagaaacctggtctcaagggaataaggctggcagaaacataggaaaatacctccattctcctttgctttccatttatatatggcacctgtactggtacagtactgcacacacacaagtagtgtgttttatgtactcaatagggttttggcaccaccacagaagctagagtcatttatgaagagtccacctcaactaatgaaaatgcctccattagatttcccataggtacagctgtagggtactgtcttgattaatgattgatgtaagagggcccaggtcttgggttatataaaagtaccaagctgagggttagttcatgaagaacaaaccctccattgtttctgcttcagttcctgccttcatgttcctgctttgagttgttgcactaactttccttcataatgaactgtaagcatttaggctaaataaacactttcctcccaaagtcttgtttatcacaatgacaaaaagcaaactgggacagtatgtaagtgtcaattcttcacttcactcaaagcttctagttctaacagtctgaacccttgaatgtacttcctatgttctcttcaaggtttaaggctaaacaagaacaaagtactaaaaatgagattctacgtccatttaaaagatgagcactacattactttaaattggatgtaggcatacaagtggctaaggaacactgcatttggtaagctcaaagtaagcaagccactgattgggttgtgttgcaaaataagaatggcactgagatacatgtttagaagaccttatgtgcatctcatatttgtttaaaagatatactatagaccaacaaagtagtctctgagaagcctttgcattgcctcattatgtaattccttttttctaatcagtgatctattgctgtgaagagataccatgaccatgacaactcttataagagaaatcatttaattggggacttgattatagtgtcagaggtttaatcccttatcatcatggtgggaagcatgacaatgttctgctagacagtgctggaaatgtagctgagaattatacacactgttccacaggcaggattaagagagagagactgggtctggcttggactttggaaacctcaaagcccaaccccagtgacacacttcctccaacaaagccaacaaagccacacctcctaatcattctgtagtagtgccactccccagtgactaagaattcaaatatgtgagcctatgtatctactgggcttatttacagtaaaatggatgactcataggcagctgtggtactactaagtccattccagcctgagggcagcttgaacaacctgtgtccatggattttcctgactaatgtgaaggcagctacttagaaaattctacttttcccagcaatgctttactgtttgcataaacatggagaggaacattgtgaattgtgtaactctatgagctaatgaagtttctggcctctgttcagttaagaggaagtagctctacaatatcatctcatcatacaagctttataaagaataagtagacatatctgataacaaagaactaaatggaagagtatttcggtaacttatttcaagcagatgcttattagcatttgtgtatttcttgctattgttttcctatggtctgcttcacaggttatcatctcccccatacctacacaaaataggtgtcaaaggaaaatgagaatattcaattaggttgaacaaatattgaatatctacaacagattgcaacaattttgcatttcctcctgatacactcatgagtaaagttgtaaagaacttatccactgagcacatattctcttagatgacccaggtggaaatatttacaaagaaatgtactatattatataatattacattatatatacttagaagaaaagcaaactttgtggtctcccacaaacacaaagttcagcattcagatctatacaatttattttacctcaaataaaaatcaagtataactgcagaacacatgtaaatgggggagaatcctaaacaagggacatggaacaagtattttccagttaaatgtgtctatagtgtgttttccctttgtgtttcatgtatctgaatagttaatgagatacaacacaaacagacttaacagtattagtacccttggcaacacgtttaagagaaatcagctggctgggcattggtggtgcatgcctttaatcccagcacttgggaggcagaggcaggcggatctctgtgagttcgaggccagcctagtctccagagtgagtgccaggatagtctccaaagctacacagagagagagagagagagagagagagagagaaatcagcttcacccactgtactttgtcttgcgttcacagcacagatatggatggtgagcatctgtgatattgggcattgggcatttcatcacagtctagcccaaaacaacacaacatactgctttaaagcatctctacttcttcgtcttatctaaaattctgccgttttccaactttctcacaacaatgtttttctgttttcaaagttaatgcaccgtatactgtgtcatcaattgtgcaggaactacaaagtggctgctcagaaaacaccccttcctaccattccccaaacagtatttcatacttatgaaattgttttccaatgggaaaatcttgctttctgttcagaaggagctgtggtccccagcagagctgtatgtgggcacacatatacaaacaaatgcttgtttctttctgctaatattgtcccattaatctagcatttcccatacagcttatatctgctcattgagacattttcctgttaaaatctgggttcttgtttatttttttttcattttacttccatatgagaagtcagaagcacagcctctaatctgagacttttatgtttttttatgttgtttttaaagcaggtatcaattatacagttatttaatttacagaccagcttagttttattctgaatatagtatttatagagtctgaagatgcttttgttttcttcaaaactgttggggaaaataataaaataaataaaattgcaataagatgaaaagtatgagcatgtcttccttgtcacactactccattttttatatgtctgacagagcaattgttctggaaaacaaatgattcttgtcacttcactgattataaccattccagtggccacctatcaccctggagaaaggtgtctaaaacatcccagcagagcacgagaaacccaatatctgtaattcaggttccatctgtgccaaccacaagtgcattgcagaatgataagcaagaatagcagaacatgtagtgtcccactatgtgtctcattgcctagaaagatgcttggcatttacctggacagggacttttatatttcaaggcagtttgaacacccttcccccaaagaagggtctttgaaatcataatcttttctcaaactattcttcagacagagcctgtaggttgttcttattccttgcttttaaattgtttgccagtgtctacctcctccttgagagccatttaaatatatttcttctcttgcactttacacatctttattgatgggggatgtcctccagtatgctttgaatatacgtttctctaattggttgatgaagaaagctgtttcatccaatggacaagcaggatttagccagatgggaaagccaaacagggatagagaaaggtagtaggcaagtcaagaagatgcaatgtagctgccgaggaagaaagagtcccaggcttcactggtaagccaaggccacaaaaagatacacagatcactagaaatggtttaataattaagagagagctagccaataagaagcctgagcattcagccaagcaatttataattaatataatcctccaggtgtttgtttaggactaaacgactatgagaccagccgggacaaaaacttccatctacagtttatctaaactaaaagaataaattacagggctggagaaatagctcaatggttaagatctcttgctgcttttgccagtgaatcttagtttgggatttgatgtcctcttgcagtctctgcatgcaccaggcagacatatggtgcacatacagacaagcaggcagacacatccatataaataaaaataaatcaatttaagaaacaatctaataaatgtttaataaaataatagtaatagtttgtgctgaaacttatttcacattaaactatttagtatattacttcccaaaaagctaaataaattaatgctaattcgtttatttaaaagtttttggcaagttatgaaagaatgcattaacatatgttcaataatgacatagtaacaaaaatatttttaatatgcatacacatgcatatacatatatgcatatatgtataatatatacatacataatatatatttctcagtgagatgtgtatacaagatttatcataaggaactgctttactgtatcacacagttaatccccatgtcagttttgtggaaaacacaacattggaaatatacttgtcagtgctgatcccaaatggcctgctcctcctctgctatgcctggagtaataccatgtaggtagagaaccccataaaataattctactggcagagagatgaagagaatattttctgccttcaaagtagtatttgctggggttggagaagcaactcagcagttaaagagtacaggattcccttccagagaacctggttttgttcccagtacacccatggtggctcataactatcaggaactccagatacagaagatccaaagacctcttctgactatatcagtgccagggacacatatgtatacatgcaagtatgcaagcaaaaccttcatatacataaatcaaaaaagacataaatcattataaaaggtgtatttattataacaaactaaaatagaaagtaagttttctatccatttaaaaagtagaaagtgaaagtttttcccacattgggatatggaactttgggctgtctaagccatcaagagtaaagttattttatactatggtagagaaagtcctaacatgaggtcttcttgaggaacataagtttggtaaaatacaattgacaacagtcacaaagttctgggtaataataaatggctagtagaaaatttacatacagaagttattctaggtcaaagtatcccacctctgacagtttctttcaaaatatttattgcctgtgatttccatattattaataacaatgtgtgctggctaattttaggtcaatttgatacatgctggagtcattgaaaaggagggagcttcagctgataaaatgtctccataagatcagactgtaggtaagtctgtatggcattttcttaactagtgattcaaatggataggctactcattgatttggatttctgggctctgtgagaaagcaggctaagaaagcaaagtggaaagaggagcaagtcagtaagcagcaaccctccacggcttctgtgtcagttcctatcaccagattcctgctatgttgagttattgttctgacttccttcagtaatggagtatcatgtggaagtgtaagccaaattaacctctgtctccccaagttgttttgatcctgctgtgttatcactaaatagttgccataacttagacaacaagttgaggtttactcaagacagagagccccaccgtgtttagaatgaagagatttaagccaagatttcatcacatggctccctttcttggtacagagaaactgtgagtttattcatgctgaaaagaaggaagttggtataagaaagagaaatctgtctgtaaaatcaacacatgtcagtgacaataggtttccttagattggtaagaaagcataacatggaaaagaatgagagctgcatttctctgatgaaactccacatagtttcaagtgtccctgtaaaataagatcttggaattttctagggagttctgttataatcacaatgggtgtttctggaagacactgacctttcacaggtgtgaatgggttcattgtttactctgttctacaggagaattctctctatttgcatgtgatctttaggcaacatagtcatattttctatgagctatctacatttcccccaaggccttccttggtttatagaatttctgatgtttgctcatagaatctatccatattattatccataagtattgtgctactagaaaatttcttctctttgtatcttcctgtttctagctgcagcccaaaccctttgttcggagcagaggtttttaacctgaggattgcaaccaatttgtgggtcaaatgacacttgcacaaaggtcacctaataccatcaaaaacacagatatttacattatgattcataacaatgacaaatattataattattttattgttgagggtcaccaccacatgaagaactaagtgtactaaagagtcacagcattaggaaggttgagaaccactggttgacagacatgcttgtctgtggtctcagtactgtgtatctgtctctcatcttatttttgagggttatcatagaaatagaattatctgtagaattattgatggaaaagataaacataaaaagaaccatttgaggtaaaattttaaatgcaaacactcttctttattagggaaaaaaactaaaatcagattatcctgttaaaactcttggtggtagtgctttaggcaaaagttagtaccctcctttatatctaattgaatatggactgagtgacagtatttgactaaaataagtgtttgctaacttatttctctgcaagatttgctattgtcagtgtcagtttttaaggcacttgggactccatattttcatttagtcaacagaaaatagacattccattatatatattacaatttttattattatatttactatattatatttatttggaaatatatatatatatatatatttccaactgatttttaacagaagaaatgatactttataaatggtgctagacatccactttggaaagaatatatactaggtttttggggttttttttcccattgatccctggaagggggagaatttctccctcctcttctcttctttcccatgtctgtctctgtgtctctttacctctcttctctttccttcccttattttcttacctccccctcaataaaacttccaatatgaaaataaagaatataggcatagatcttatgttttgtatagaaagccctaacaactcagtgcctgaagagcattatttttagcctgatgatgccatgactaatacagaactgagccaatgctgctgcccagtaccacagatgaagatcacaagcacagggcaacatcaacattagagtatgctctctctccactgaactcagagtgtgttgaatctttgtagagtttattctggactggatgatttttacccatttgattcactctcctggtttgagtctgccactagcatctgtaaggcaggtggtgtttaaatgcatccacggtaatcatataaaacttcgcatgggtcttgagcctatgtatgtaaaggctgaatagtgttagtggatgggccaggaacatgattcaggggctggcctgagtcctgagtctactctagctagcaaagggtggtacctttcacagaggggcacttccaagcactgaagtctctactaaactggactttgttactgtgtatattgtggcatagtcaaatggagatcattcagcttctgggaagaatattgaagttggaacttagggttttgtctataacctagacttatatgtactggcctggttcctgataacaatgaatctggattagtttttagaatcatttagactcttccatagggacttacctttcaggttggatgatgtctggcttggaacttaataggaattctttcaaacaataggttgattcctgggaacatcttggaacctcaaaataaaagaagcttcagtagtggaagtcaggttaacactgttgatactcacagaaaactggattctgggtccactagaacatgggactgcagaagccaggagagaactgagccacaagaagtagcccagcctgatggctctgtgagaattcatcaatctcgagtttggggaattgagacttaactgacattgggcttttattgggaaaggaccagtgtaggaatttgagatattatcagctttcctccatattgttggtgacgccatttccctgtgttctgctgtatttgttatggtgttatgagctgtggtaatgtaccagacaaaaataacttcaggattggtgttctggttttggtttttcatttggtttacagttccaaagtacagtataccatgatgggtaaataatggcagcaggcatttgaggtcactggtcacattgtctctaccaatatgtcttaagcctggagagaaatgaatgctggtgctcagatcatcttctcataattattcagcttgggacctcagtccacaaggatagttccaaccacattcaaggtgtgcctttccattgtaattaagccaacctagaagacaaatacagacgtgttctgatgtttgttccaatggagattctaaatccattcagttgttgatcaagacaataacaatctctatcagccttcccaaaactctgggattattgtctataaagagggagtgtactcaagtccagcactccccatcttacacataacaaataaaatataaagaaaagcatatataatggattaaaatgtagaaaatgattagatttactccttctcattctctcttctcatcctcattctgtaactctgcttttttaagtgccaaaggatatcaaatctagaacatcccatcagattaacccggtattaaaacaatgtgtaacttacctacctaaaatctaatgacagcctttttgttgttgttaaagttcaatggtcctatacaagatgcacatgttctgcctgcagttgtggggaagcaagaacagaatcccatagttccttactgaaaaggtaattaagtcactctgatttgcacattgctttttgttctagattcttcacatcatgtataataagaaagcaaaattatcagtatatactaactttatgatttgctaaactctaaagattggtatcccataggagagtaggtgttcagttacagatccaaaatacaatataataccatgaaaccaaatactgaaagctacagagactgataggagttgttgagtatatcatacctcctttcacatggtgtgactagactatggacataggtatagattagcttcatttatttaactgagggaaatcccatccttacctcatctgtactgggcaattctcagatattagtctatgtggtgatagcctgaaatgcagaaaattcaaattaatgatgtacccttctcccacataggatatattcagttccatgtcaggtgggggagcacctagttaagttaaatattaactactattattgggcaattgtctctcaaaaaaaaaacacacaggtatggacatggttaatttgatatctattattgcactttagtttctccttctgttcttttgtcttccttcctcttctccataagtgtccatcttatggtagctgccagtaaacacactaaacattaaaactggccttatattttgttatatagaaaactcagctggggaagaatggtccccaaacatactagctttacttttgtattaattttggatgtgcacaagctttagaagaatgcagattttctcataaattattcaccttgcttccctcaatgtaaacagagccacggtgcaattagaacaccaaagaattaacatcatttaatataattaaacaataaactgtttttgctttgttgcagtttttcattcacatccctttataattacatgaactaacagaagacactattattttttaatctccagttgcttggtttttcttgtcttttatattttaattcttttgaggaggattgctctaggctattttctgttcctgtagtaaataccacaaccagaaataacaggagaaagggacttatttggcttcctaggacatattctatcactgagagaggtcaaggaaggaattcaagaaggaattgagccagaaaccacagagtagtttactcaccttgattctgtttcatgttcatttagctttctcattcagctcctactctcctgtctagggatggtggtgccagcagtggactgggccattccacaccagtcatcaataaagataattccttacagacatggccactggttaatgatcaataaaatacaccagttgagacccacacagatgactctgggatgtgtcacattgacatttgtatctcaccataatgacagtcaacaatctaatcttgcaggaatacattgtgatataggaacttgtattttacatttgtctaaccccttataacatggctatttaatgacttacaggcataatgccataccctacatgatgtgatcataataaatattatttaaaccaaaggagagtgtagtaattctgtcttagtcacaagattcattggtcataacacagagcccactggacagaatctcaaagcagtttggaagataaagatgagggtatggtggtatcttaagagttagaatacacctagaacaagacttaggtggtaagttgattccctcatatatgaaatcctaacacttagaacaagtacacgatactctctctggaaaaatataccagctaaaacatgggatgagttgcagcagaactggttggaattactttttggtttaaggttctcccataagaaattatgcttccctaagttcaacaaatgctgttgcccagtagtaagtggagaaatgcattgaagtagagaaagggtctgaatgccacacaaacaagaagatatgcagatactgctgcaaggaaagagcagacagtggattctaggagtaccatggcagatgtcctcagctgtcagccatagcaaaaacaggcctgaaatatagatgcttttataccctcaacacaaatgtttcctaaatggctccacactcagtgacttagcagggttgtggtatagaaatgtaggcattgtatctaatatgagtattttatggtcctccttagctcacaaccccaaaaggccatcagccaatgtctgaaacagacttacacagtttagacttttgtctagtaaacacagctttcttcaaattcccttcacaggtatagacaacttataaaaactcctgcaccctgaattctgagtccatttctacttcaaagtgatctgatactgacagaatgggctaacactgtctactgaggttttagccaggatgtgaaaccctttatctttcatcatgtatttatttcagctcatagaatatgtatagaggtactacatgacttctcataaatgtttactatctatctcctgcttattctgccttccagcataaatccaagaaggctgaggctggtgttgactgccactgctacagacaggatgctttgtggatatcaggtgagtcacatctatgtatgtcaccacttaagcaaaaccccttaaagtgtgtcccagccactaggacagacagaaccttaagatggtgcaggaaaacaacaaaaccaagtttcattagaatgtgtatggatacaacttttgatgcctatccacccccctctctctatggctcactagtcttgtagttatagccttgaggtactgttcatagacccagggaaggttgtgaatgggaggaagctgttcacactgaggtcacacaatttcagcattagatgcggttcacaagactaaaagcttttctttctttcttttttttctggctatccaggcccaggtctaaccagtacatcattatgaactcattttcccaatctattcatttctcagtcatcatggcataatacccatgtgagctgaatatagatgtttttgcatcttttacactgtgttttggtatctatataaaaataggagacatggcaaagtttgtatttttctatgccaaacagatggaacaatacatattattgtgtacagagagcagcatggaaaaataaatcaaggagcaatcaatgcatattgagtagatttgtgttttgaaggataaacacattatattaaacattcaaaaatttttgagatttaggaattttatacatatataagtctagtgactcatacaatcacatattttttgcagaaacaataggcacttttttgtgtgactgagtgggtgtgtgttgtcatgtgtacacatgcatatgtagagactagaattggtatcaggcatttttctcaaatgctctgtaccttattatttttatcaaggtccctctccaagagctcaccaattaaattaaattccctggcaagaaataccaagagtccttcccaactctaggattacaagtgcatgccaccatgtctgacttttatctgggtgctaggaatcaaactacaatcctcatgttagtatggcaagcaaatacaaaatgtatttttttaaaggaaatattaaacagtctttcagttatattgaaagtaaatgtgtgttcataatgttgccacacagactatgtatgttgttatcaatggaagttttgttaagtatagtgacaagactatctcaaatgacatcctatattactatacatgtatttgtcaaagctgaagtctatatgaatccttctcctcaccatttacaatgaaaactgatcattctggctggagagcaaaggcatgctagtgagtttgtgaagtagaacctaaaattccttccagatttgggaagtacacacctgtccatacatccagtgtgggaaaataggtttccttctggtggcttggaaggcagatattaggtcattgtaaagatgacaattatccataatttaccaagaaagatatcacgctgagcttttgcctggagctatatctgtcacactctaacaaccagtataaatacaatacataggttcaaacattcaacaacaggacacaattagatttttattcacattgatcaagcatctcctttgcaaaggagaccccatgatccagacattttctatttaaggtacagtatgtgagattgatgtggctttaaattttatagtggaacagtaggatagaatctaaaatgtcaccctgaggaacttacagtcagacttaaacctgtcattcaccaccactcctcatagcatcacattgttacagcccagggataaaatgcaaaagtccttgaaggaaaactgggtagtacagtttcctccatgttcaccatcagaaatgtgatacagtttcctagatgttcacaatcagcactgtgaggtacagttacctagatgttcacaataaactctgtatggtatagttccctccatgatcaccatcagaactgtaatgcagtccctagatgttcacaatccgaactgtgatacagttccctccaagttcacaatcaaaactgtatggtagttacctagatgttcacaataagctaagcactgtatggtatagttccctccatgttcacaatggagaactacggtacagctccctagatgtgcacaatcagaaattcagaaatgtgtggtacagttccctagagcatcacagttatctccatgttcataatcaaaacaacacacacacacacacacacacacacacacacacacacacacacatatagaggaaatgaaaaaatcctcaatgaatgaattacaaggtttctaaaattactagaagactgttggatttttcttccacatttaaagatgtgacaacaattctatcatgctgttaagggttataaaagacattacctgtaagatgattgacatctaatctggaacataacagattatcaatacataatagtggtcattactaatatcaccctaagaattccacaaattttgatcaaatatcattgacaaataacaagaggcctgcaaagattgtctgtccaactctcaacaaagtccactgggtgttgggaatgagtaggagaaggatacaaactcataaaagtaatacttatgttgatgtagttgtgtttttaatggattttctagtcaatgttattaaattttgtggactgcaaagaaaattgcaatagaaaaatacaacagaatatgacaatataaaatgtaaatcatacacagaagttttcagaaaattttaccatgcaaaataaaactaatggtattctgtgcactatttagttttttgtcaacatgacacaagctagagtcatctaggaagaaggaaactcagttgagaaaatgcttcaatacaaagattaaaaacttggtgtcacatgcctttaatcctagcacccgggaggcagaggcaggcggatctctgtgagtttgaggccaacctggtctccagagtgagtgccaggataggctccaaagctacacagagaaaccctgtcccccccaaaaaaagaataacaaaaaaatgactcatacaactcatactcattgaaataaacatgaacctaagtaacagactgaagtaaagggactcagcaagagttgggagacaagtaaggggcaaatgtcatcaaaatacagtgtatacatgcattaaatgtaagaaagaaaacaaaacccaaacactccacactttctgtcttgtctgtattatctgcttacaggtattcaatgagatagatgagatagtcaataatttatgaaaatagcatatgccctgttaggtgcccaactgtaggccactctaagatcatttgaagtaggctttgctaaaccataactatgttcaaaatgggatgtgggataaatatatattttacttatattttcaatttatgataggtgacctatatagaacatcactggagaccaagcaacattggcacacaagtagttatttgtgtctaggccacataacaccactttctttttatgacatacagatgtgactgagggttgtggactataaataatatgttttgcagatgatggacttccgtactccccttcctgggtgcaatttttgttttcacaggtgcatagtgaagaatgactgcagtccaagtacaggtttcttgtgctcaacacatttggaaagttcatgaaaactccagctgaccagaaattatcccttagctctctggagtgaaggatgatttacactggtcatgtgggagacaactgtgtagagatgacatgctgccagcttatgctcaggtgagtgtatgtatattctatacattttattatgcatcatttcaagttatgtatggtgccctggtaggaaagaaagaatatttttgtctcagtgattcattggtcctcacctgtgagatatttatcactaataattaaaactcagatcctttgacaataaaaaaaaacatgggcattgttgtttacatgagatttgtgcaatcctctattgcagtggctctcaacctgactaacactgtgactctataagacagttctttatgttgcaatgaccccaaccataaaattgtttcattgttaattcataactgtaatttttctactattatgaatcacaatgcaaatatctgatatgcaggttttctgatatgagactgctgtgaaagggtcattcaactccccaaaatccgtgacccataggttgagaaccactgctctttcaatcatataatattgtagagatttgtgggtctctgagcttgcattcggagtcacaaataaaggttgattgcaagattctcacagctaggccaatagtttctgactggtatatgtagacttgtaaaatatactgtggcatggtctatgaaaagccgatggtaattcctactaccttctaacttagaaagtcttaagcctctttttcctttaatttatcttattgagggttttgtttgtagtcattgttagcaaagatgtacactctgtcttgtatacaatttttttaaagattttattcatttattatgtatacagtcttctgcctgcatgccagcagagggcaccagatctcattcaaggtgtttgtgagccaccatgtggttgctgggaattgaactcaagatctctggaagaacagtcagtactcttaaccactgagccatctctccagcccccgaaatgttgttttttatgaaaggagacattaatgacccacacagagtagttgagatctgaagtttacatataagttcaattcatttattggtgtatattcattgtacataatattgggattcaaacagatcattacttttatgtgaatcaggaacttgaactatatttacacccttatgtaatcccacacttaatttgaccctcccattttcccttccccactggtctcataccttctcctagtctttgagtgattatatatatatatgtgtgtgtttaagtaagcaaagtaagcataaagaattctgggtcttataaatgagagaaaacataaaggattagtctttcttcatctgactctcttaatatgtagtctccagctgcattcattttccaggaaatggcaaatgccatgcttctgaatgactccataaaactacattgtttatatatacaacattttcttttcatttgaatctgttgttagacattaggctaatttcctggctatgatattgtgactagctctgcagcacaggtgagtgttgaggtatctctgttgcaggttgccttagagtatgtgtaattaccatcacgtaagatgttacctgtgggaattttaaaatacgcatctttaatcaggatgcagatggtgcctacaattcatagaatgttgaggattttcatcatgaaaagttgttagaaatagaaatcctaaaaggattttattcatctcttgagaggctgctgtggcattttcttttcattacagtataacacattggtcagtttttatgttcaaaccatatttggtttctgcaatgaggagtaattggacataacttttatgtgctactcccttcagtttagttcactagtttgagttttgcatatctatatttaaagcatatatcagtgtgaagttcttttcccctatgaatgtgtctatctgcttcaatagcttcaatattagtgtgaagttctgtctttcctatgaatgtttctatatgcttcaatatgaggtaaggaacagcttttaaacaaattaggcacattcttgtatctataattttctgtgttttgtgaagaattattattgtgaatgcttgataaaatttattgaattatatgacattaatatagggctttgtcagtgcccataaagttggctccactccaacttgtctcaagggcagagagttcaaaactgtcctcagtaagtcataagacctaaaggtcaaaggtgtgactacagtaggatgtttgatcttggccttggctatcttatctaaataacaacagacctgatctgaggtgtggttactcctgtccttcaaggccaggtaacaagaagctgaatctaacatttggttactgagtctttggagaaatgaagaataaatgtctgttctgtatacagataccacgttcccctttttagttatggtatgaattgactgatttgccctcttgcctttattctatgttggtgtcttttcctttaacgtctttacgtagcctttcttcagtccacattcccactctcaggtacaaaacatgggctccctagctggctctgagtgcagttctgaaaagacagcttcccacaggacttcaagttttgtggttccctttattgttcactaattcattctctactgttatgggttaattacatgttattatattatagttttctctttaaggtcagtattaagctaatacaatcaggaatgaacaggtacctagttctccttgtttggtgtacacacatcaggtagtcagagaatgacatcagatgtcttctgggatttgctctctacctttttgagtcaggatatctctgtgtacctgcagcttgccatcatctaggcgagttggctcctggaatcaatctaagatccctagtgctggtttaacaagcaggagctatcatgaccagctttcatgatgatactgctgatttaaacacaagttttactactgaggcatttccttggccccaccttccctttatggctgagtactattccattgactatgtaccacctttcctcttttcttccttcacacaggggtggacacctaagctgacttcatatcttggttgttaccactagtgctatagttaacacaggagtgaagatatccttcacccagcaatttattttatgtaggtaaatgcaagtggcatggctaaagattatcatagttctccttcagtttgtaacctccacacctcattgtatgagtgctagacaaatttacaggcagatctatactatgcaaggctccatttccttgcaatcacttcatcatcttagccaatcttgctgaagttatactccatctctctgtattctcatttttccttattaatgaccaggatgtttccatatatcttttggttatttgtacattctttctagggaaagttcttgttagggtttttgtgggttttttgtggtttggttttttaaacttcatacaattcaaatttttactctggctattgatttcctaatttattatagatattaaactctcataatatatgcatgtatacacagacacatacacagtctgcaaatatttcctctctgtcattttcttgattgtgcttgctacaatggggagacttttcagtttagtacaacctactggtcaattgcttttctggctgtgttttgacaaattatccgaaaaatccctccccctccataaaagaaagatgggctggagagatggctcagccattaaaggctaggctcacaaccaaaaacataaaagaaagaaaactagaggtaaatataagtgaactccacagcacaaaaaccaatgaaagatattcctgtttctttgttaacttcaagttaactggtaaaatcaggaaaccattctatttagagctcaaaagaaaacacctagacattcaccaaatagagctaaaaaattgacaaagaagcatttagaataagtgaatagtgtttgttcattggctaaaagaattggtatttttctctttttagttattctttgaaaatttcatgcatagatacagtgtatcttgagtatattcacttcaatacatgtctctaacaattccatgtcctttatttttttaaactatgtaaattattgagttcagtcagcacagtccatatgtgcatgactgtgggtcaataccaagtcattgacaacctaccaatggcatgttctcaagaaaatgtgactctccttcacccttggtcttcttgtcttttactacatcaatttggtggtattttagactattacttggtagtgtattttgaagacagttgtatctgaagcttccagcgatgttctttattcagactttctttgggtgctcactaccttttatgattctctgtgaattttaagaaactttgtccttttaatattaaaaatttccattgaattctggtaagtgctgcactgcatctatagatcattgggaaatcagttcaaaaaattcttcccatcagttaagaaaagttgttttccccattatttctgtcttttcaatatctttaagcaaatgtttgtaatttttgttgtatgtcttctaactcttttattaatttgtgaagtatttgaagtttaagttgctattgtaaagaaaatttctttgtttgtttttctgattatttagcattagtatacagaaatagattaaattttgtgtattttactttacaccaaacatttactgattcaatctaccaaaatctaattaatgagaggataaaacatttttctgaagattaaacactggaaaaacatgaccaaaaatatcccaaagcagtacatgggaaaaaaaataaaacacacagcagaagttgataaaacagaaagagaatccaaaaaataaaacaaagcattgtctctttgaacaaacaaataagattgacaaggctttccccaaaattaacatttaaaagtgtagagaagaacaaatttgtaaaagtagacattacaatagacaccagggaaattcagagaatatgacagacatatttttaaaatgtatattactataacctcaaaatctagatgcttatgacatatcaaaattaaaacaagaataagtaaataatttaaacaggcttaataacaagtgatggcatagaagtagtaatgaaaaatcttccaaggaaactctaaatccagatggacttggtacaaaattctatcaatcttcaaagaacaccaatatgccacaaatgattccataaaacgaaaatgaactcataaattcgttttacaaagatggtattaccatggcaacaaaaccaaatgtagatgagaagaagagaatcaaagacacacagagcaagaatattgtacacaagttctagataaatatagaccctaaaacttttaataaaatacttgtctctgtttttcttttaattactggttccctcttttatatttatttattcttacttactcttaggatgatatttgtataggattttttcctttagattttctgaacattgtaaattttggtatcaactataacccagtgtacatgataacactttctacatgtctgttggctacatttgatgtctacacagatgaatttgtgtatgaagctttgtctttgagttttgtacagatgatctgttttattgaaatagggtattaaattatcatagtatcaatatgtattaaaacatgtcttctaaaatctattaatatttccttgtgtatcttctattattgggtacatgtatacttattatgccttttgattaaatgggtcttttaatattctatgactaaatcaatgatatagctcacttaggttttttagtatgatttggagtttagttacctctgttattgctctatttctatttgcatggaaaataccttttcatctttaacattttatttgtgaccctccatctgtatcatatctcctctaagcagtatacagtacttggatctcggacttttgtgggtcatcccggaaccacagtggcctattccaagcaataatagatagtctagcactggaccagcagacatccagagtttgtgggtgtcagattcatgccaaaaatatggcttatcatttgaaactcatggatctaaaaatcactggcgaataggctagaaccctgtgggctgtggctccagctccaggaaatgcagtgactgtcttctctccttagggagatgttcatatagactcctaccatatatacatgaattaaaaataaagagatccttaaaacataagagtttaaattctcaaagaacatcaccaccctactttaatgtgaaacacaattaatgtggatctcaatggagtcagaactagtttgaaaaacagattgtttatgaggaagtattcatgcaacagagccagtcctgtacaaccagatggaagagggaatagagagagccgtattcacgagaccctcatatttaaagccttgctacatcattctgatcatgcccaagtttgtgtgtggtcagagtctcctgtcccagtcccgaagtgagtgtggacagtgtcacctgtgccagccctcaagtgggcgtggtcagaaatcttatcaaggatgctggaggaatgcattctgtcttcctgggaatcatggaggaaatgctgaccacgcccagaacgcattcctccagcatccttgataagtgtttataaaatatatacattaagaaatcctagtcattggctaccagcattgtacctaatattaatctctgtgttttattttgggcaaccacgtggcaacagagctcagtggctagcagaaaattttattgttacaaaatggtgtcaggacatggttttatgaacatccacataaaaacttgacaaaagcttaaaaaaggattttagaagcaaaagaacatagaaaagtacaacttcttggtagcagcatttttttgtgtgtggtctctgtttgcaagagacaggcagaggctcacagctcctttatgagaagcttcctgactcagcctaagtgtcaaaagctgcagggctcttgctaagaattcaatggagtgtaggagcagcaggctccccaagccagcagcctgttgctttatagcagcatagaccaaggcagtgagcacaactctcagtgctggtggtaaacgaacccccaccatcttggaaagacagaacctaaaatagccactgctttcattttagcaatgtcggttagctaaaagaccaggtggctagaaaaaggtaaagatttacagtaaagacagattcagataaagaaaccctctaaaggtttacagtgtgttttaagatatatgtaggcttatgagagaaaagaaacacaatacagtaattgggagagagaaagaaagaaagaaagaaagaaagaaagagagagagagagagagagagagagagagaagccggtggtagtggtgcttgctggtaggatttgctgaaagaaacagaggcagatggatttcctggctcagggaaaaagaaaaaaatagaagtaagagaaatagaataataaataagtcacatgaagatgaaaaatacacagagtgtggataatatatactatattgttgtctttaaattgtttgattgctgaggaaggagcaacatctactaacagacatttcagtatcaatgtggttaaatagtccaacttacacattttaaaaatgctttgacttatccctagcataggaatggattttgggagcccatcccacatggagggatacaccctgagcctagatacaaggggattggcctaggccctaacccaaagaataagacagattttgaagacccccttatggaaggcatctccctcccttgggagcagaaagggtatgggataggtagggtgttagttgggggaggggcaggagaggagtggagggaaagggacctgggattgacatgtaaaataattttctttgtaattaaaataaaagaatgctttgacttcataagtctaaggagaggctacttgggaaaagaacttttgtttatgtttccatagaaaatggaaagctatggattccatagctaattccatagactaatatgatttgatcaaacaagaccctctgaagcagtggcccaactgatcctacatccaaaacagctgagatgatgtggttatagatgactacagccaggatttctgtgttttatcatgatccccatggtatggacatcaccccaaccagcaggaagcagtttggaatgaatgattcccaaattcccaaatattgtttataaatgtttgttttcatttaaatggggttggttataaatggtaatgatcacagtcaatctctttttaaataaaaaaagggaaatagaatatagaagtgaatactttgtattggtatggattttcatttattgatacaactttaaggtcaattttgtgatatgtatatttctcctcttgtttaggtattgtgttttacatatcttttaaaatgtaacacataattaaatatagattatatagtcacctataatagtcaaaacttataattaggttatttaggttttcgagatatacagagatgtatttagatggatagatattcttcaaacgtttcaaagccctacagaatgtatggcatttaaatggtttagtgtttttcatggcagtgagacacaactggctcctggcacaccaattacctctgagaggaaaatggtcgttgaagaaactcaatatggagtttgctttcaacattgcgagattaaccatttgggcaagaaactgctcttgcccagactgcttgataaactggacatacaggactcagagaaaagtgactgcttgtaggggaagctgtagccatgcctcctagggcatggtcatggtgacatagagtgagaggtggtcagatggctggtttcactttcggcttgctgtacagacttttccctgccggctggctaggtcactctgtaagtaaggctctnnnnnnnnnnctaggttgctctgtaagtaaggcttttccctattaaaatcccttgtatttctacctggctccatactggtaatttcccatattaactgctgaacttacaaaacaatatgaacagtcctgaaaagttcctgcttcactaagaagtctgccagacacactgtggcctattgactgaagatggatgccccaacattacagaggaactttgggtaactgtccaggtagcaagatgtctcagtcaaatctagagtttatatattatccttctgtggtctttgatggagttgaagacagatagtgatggttataggtttctttaactattataaaagataagctacatataagactttagactcacaaagataagatagatgatagaatattttctttaaatcttgctaaatgttaatgaactaaatatcataactatagttcttacttgataactgttttgttatatattttactatgttaatgttaaaaaccttctttttatttagaaaaaaggaggagatgatgtgggaggtccttctgtgtacatgtttatcttattggttgttgaataaagcactgttggtcaatggggagcaagataggtgggactagaagttgaagagaattttgggaaatgtagtaaagagaagtcttgtaatctaggcaggaagtgacatagcaagcagactcagaatataagcagggacaatcaagaaataaatctcttcctcctcctctcatctctggagctgccatgtgttcccaggaagcacatttcaccagcatccttgataagataagtctttataaaatatatagattaaggaatcctagtcattggcctgcagcattgtacctaatactaatctctgtgtgttgttttgggcaaccacgtggtaatggggctctggcagctgtcagaaagatttatcgctacactacttagtaacttacttaccccaaataatccaaatagggaaggatatttcatttagcaccacctgaatatttctaaaattgagggcttccttttataaactacagatagtccaaattgtatgccaggattctgctagctcagcagaaacaccagctgcctgaagcaggccattctcagccacaatttaggtagtatcctttgcacttagtcacaaacccagatattctgtcattattcaacattcatctaatgcccacaactgaagaattaacaaagtatggcaaaaataataacagtagtaagactagaaacaatgctacaattttctttgtatatgtccatttaaagtcacaattttaaacaacttgtcagaatgcagatccactgagaattagaaacatgatataaaatatattctaagcatctcatgaatggaactattcatcctaatttttcatagtaaaatctccattccaactgggaaggaaaggaaaccatctaaatgggtgatgattccaccagaaagataaagagccagaagtgatttagacatgaagattatgcaatttcagataggttgtgtgtagcatcaacagccactgtcataaagattaaaaatagacccagatgaagaaagaataagtgtgaaaggtatcgatgaattttatatacatatattactagttactggaacagaagatttatgtccttttctttgcaatgcactgggtcctatgtttatcatagaaggatgcaagcaggaagaatgtgggtttcccacctatgtctgcaggatcccgcaaaaactgtcaagagagaaacctccaaacacaagagatgaacactcctgtctgccttctattccctgagctggcaaacaacagggagcaattcaagatacatctttgtgtgttactttcataggcagcgtggagtttcccacgtgtcatgttttcagggaaagcacatctgtctcactggaaggacttgagatggatgtgttgccctcacattttcttgaatctttgcattctctgaatgctatctgcttctctgagcctatttcttcccaatggctctgagtcacaaatgtgctacttggccttctaaaacatatcgcttgggacactacatgcccaagaccaaggatgggtattaaatcaatttcaggctttacacattttcatcagatttgctctcatgataaaccattttatcttgaagatatttttgtacattgaagagtacctttcaaactctcaggagaataggagtcagcataaagaaatgccacagaatagttgttaagcataatggaggcatgcagtatttagtcaaggatgaaattatgcttaagagcttgaagtttgccgaggtattcaactatttaatattgtacttggtatagctattacagtgtctttgtagatttcatgaatgccaattatttctcttgagtattccttcaggactgacacaggacataatacctgaaatgacagacttttaatgttttaatgagtagagtaattaactaggaattaaaattttctctctgttacatccataattcatgtatatctagtttgagatgaggtggcagtgtctccggctatgaaaaactacattttctctgtgctccatcaaggcaaatctttccgcatcaccacacaattcttacccattgcatgaactgggaagcatcttcctgatgtgaaaaaaagttagtgttaacaggagaggttatctgatcttgccaccatattcaaattattctcttcttctgagttggcagttccccctttgactctccagtttcaccaggtagttaaggtttgggaatctatcaaaacccgtttgaatgctcacattgctgatatatgccctccctaggatatacttagccttgctgtcatattagaatgtgcatgtgtcccaggagccaactaggagtctattttcccactctgcattccccaattagtcagttctgagggtttttattgtcagcacctgtaacacacaatatctaatttgaatcactgttggaaagttaagaaaaagaacctatttgataggtaaggtccagcctcctgtgatgattaattttattagcagctactgaacccagatacttaaatcaccagtattctaatgacttataaatttgtttttaagctgaaaataacatttaaatcagtagattttaataaaacagcttccttctcatcctgtaggtgggtattatctaatcacttgatggcataaatacaaaaagacttatgcaccagaaataggaattcagccaacaagagccttcagcttgccatgaaagagtctcattgtttctcttttttaaactttttatttatttaaaaggaattttactatatgaatgtgcactctttgggtatatcccaagagtggaattgcttgatcttgacgtagactgattcccattttcctgagaaactgccatactgatttccaaagtggttgtacaagttcccactcccaccagaaatggaggagtgtacctctttctccacatcctctccatcatagactgtcattggtgttattgattttagccattctgataggagtaagatggtatctcagagtggctttgagctgcatttccctcatagctaagtatgttgagcactttcttaaatgtctttcaggcattttagattcctctgttgagaattctctatttagttctgcactccactttttaattgcattgtttggtgttttggtggctagctttttgggttcaatgtgtattttggtgatcagctctctgtcagatgtgagattggtgaagatcttttcccattttgtgagctggtgttttgtcttgctgcctgtgtcctgcaccttacagaagcttctcagtttcaggaggtcccatttattaattgtagatctcaatctttgtgctactggtgatatgttcaggaagccgtctcctgtaccagtttgtttgagggtatcaactaccttctcttctagtaggttcagtgtgcctgagtttatgttgaggtctttgatccatttggacttagggtctaccttgttacctagtttctcaggagttatggagggtctcattgtctctgagtatctctgaattcacatatcaaactttttgtttctctggagaactctaataaacctccttaattagaatattatgatttttataacaagattaaggttacactatacactatcaaatacagagttatcagtacaacatcataaaaagaatagtcaccacttttgcatatttttgatagactattaaatttaaaaccactccaccaattcacctaatgaagctaaaaactgcattgacattaagctgcaagacctggccctaaaacccacattagggccacaaactcagggtatataagactatgactcatcacacacaaaagggctgtttccttccttatcatttagaatgagatattacgctattatttttatgcagaacagaaccaaaatgactaccaattaaaatggaaggcatttcagtcttgattgttgtgaaaggattcatattctattaagtgttgtcagaagccttaaaaaagtttgtaaatgacagggcatgttagaagatctgtagcatacaggcaggggatgaatgcaaataaagtgtgagccctctcatttctttcaaaggaaacatcttccaatcacacattctgtcataaaaattcacaaggcatgatgaattagaaacaaattgcattgtcaccaaagtaataggctgactagattatacctcctgtatgaaaattatgctagatacacaaacataaagcttgaagaagcttctttgatgtcaaaaaggtaaaagcagtaaataccaattactgtcttaacagtcaagcttaaagcttttacatgacaattaggtgtcttagaaatcctaatggctacagttagaaagaggaaaatcttgaaaacctacagactatcctccaggttggatgtgccctcaatttcataatatgacataaaaagttatcttgtcaagaagacagatcatttagaagttggagtaatgttagtttctcaactgatcttactgtcccattgtctttgacaaaacactgtctgctggtctgtgttatagactagtgtggaaacattagattttggagaaaaggagaaaaatatgagctgggcatgtagaatatgagcagagcaggtagaatcacatgctacgcaagcaggaagacctgagtttgaacacccaatgcacatgtaaaaagccaaatgtagtggtgcaaagcctgcaactctaacaccagagcaaatgtggttactggtttgctagcttagtctagctctgtaatcagtgagtcatcctgagaggcagagcaggatatctaatgtcttcttctggcctacacacacacacacacacacacacacacacacactcatatgtacaagcatatacacaaaataaatatgtaccagtatacacatatacacatataaatgctcatgtgcagacatatacatgtacatagacagacattaaaaagtactagataaatacagctgtaagtatacaatggcattaccacataccactatatataaagacccttagtgtctctctgttttaaatatgtaattagtaggactggactgaagtatttgttcaatgataaagaaggatggcattttgacaatttaatttactattttctgttaagactttgctctgacaattatttgagttgacacatgctaatacctttcctggctaacactaatggtagcataaccctctaaataataataaagataatgcaactctccaacatcctttgttttatggagccttaagtacaaattgtctcaactgcatatcctaatctaactggatttaccattctgacaccgatgacagcaatagatttccaaagttcaaaagactcagacctgatcacaagatcttacagaagcaaaatgggtgaattttcaattagatggatacacagtgttcatggctatgtgtaactttccatagccaatctcaaaataacaacagacaagcaaaataacagacatcctctgctagccttagcataatataatcctgtaatttttgagggtgatttcttggcaagcatgactacaaaaaccatggtagacatttagaaagaaagacaatgattaaagccatggtttgtatttttttcttatctgaaaaacaatattctacaatgtaatgttacatgtcactgattttatttgttacagggggcgcaaaattgaggtaataatgagtagttttctcaaagagacatatttagaaacaacatgtggtagttacacctgtttgcccagttctaagttctggaaaatacttttctctccatttccctcactgttactcttagatgaaggctattttgcacccagaacataaatcatcaaataagaagcactttcttttctcaagtcttgctctatacttaaatatctaaagttatttgctcagtccagggatccatacataagattactcacaactaggacctgctcttggaaagtagctcttgctctcagcagcacagggtcatgattcatggttatcacttactctagagtgactcatctgtagacaagcagcaatgaaatcatcccttcttctgccctttggttcccatcattttcaatgctggtaaacatgagcatctgacagccttatctatgcctgcatccatttatgctcctgccaatcatttttaatgatgtgttagaattggaaaatgagataaatggatatttataaaaattttgcacttattttcaaatgatctgttcaagtatttgtcatactgagcttatctaataagaacaagtagaaatatcaaatgtggactacttttttcataatccccttgttcttaagctcccacaaggtgtccttctgatttatgcaaaaatcaactctcatccaggtaactgatgccatgaaccttaaagaaatgagacttctgcaagatgaatggactctttcatcaaagcttccattgaacacgccaagtatgactgatggcaccacatttaatgattccctagagaatcccagatgcttctgctttctccccactgtatattcttttatttggtaaagaaactactttactaagaatattaaccataactgcttttcggcaacctccttgtcacagctatattgaagtaagagggaagagaaagcttcactaccaacatccaccctatctgtcatgtgtttccttttaatatccttgatgagcagttgcacacaaatgccaactcatggctccctggattccagcatatgtgtgagtggatttgatcatgtgctcatgggaaagccatggtcccttcctctgcaatcacagcatgatattccaaagaagttttttttatatatattagttgaaatgatgtaacaaaaacttttatctgctctgacattcactttctccagttcactgactttcttacctctgcagtaaaacctggtagacaaatgtaattttttactttccacagaccctgaattgttaagaaccagttacatttagactctccatgttgtcttgctagaatgcaacaaacatgttatttgttctcttatacctttgaaagtcattttggttgatttaattgtactcattaattttcctaggattgtagcatgaattctaattgatattaataataaaaacatggagtcagatattgggttaaaactgaagatcagagaagcaaagcaacaagccactaaagagttctcacctctacccatgctcagactgcaagggcaaccctgtcctcaaactacatctccagactgcatgtgtctcagactgcactgaactctttctcctcccacattctattcctctctagtgctgggattaaaggcatggtatcccaagtgttgagatagcctttgtatgagatcttttttctctttagactagttcaattttgtatagctgagggtggtcttgaactaacagagatccctttgcatctgaatcccaaatgctgggtttaaaggtgtgtgccaccactgcctggcatctatggccagctagtgtggctagctttgcactctaatctttgggcaaacttgatttattagatcataaacaaaatatcaccacatttccccatttttgtctaaaataaaaaggttataactaatgtaagaaaatactgtataaaatatatacaggcaacaaatacatcaacaatgtctagtccacttgcattgaacaaattcagagaatatactccacatccattctatcttggtgattccaaagggtcatacctaatttactttctcttctaattttcattatcaaatcattgtatgtctctcaaccttttacactttacacctctttagttaactccaatatttgtctctgaggtttatattaagaacaattagaattcatgccacataggatttagagaccatacataatatttactttcatgttaaaattatctttcatccaatcactatatctacccctactactaatcaatactatttcctacattccatgttaactaatgctaccacaaaaaaattctaaatgaatgtcaaacattccaaaaggtgggatagttaaaatgctgcagatctaaagccaaattatcttgggattccccctataattagctgttttcttgtgagtgtgacctaacatccttataagtctaggtgactctttttggaatgtgcaaacagacttttagtatctgaagctcttagcagattcttccttgtttaacatggcctaaggtttccaacaatggatttgagaaattttttgatttatgactttctattttttgcaactaagaaaagaaaacttcaccaaattgttgtcactatggtgtagtatttgaggtaaactgaacctgtgttcttgggccatgttcacttaatttggctctagaattagttacctccaatttccttacaggagagaacttttgtggaatttcacaagtccaaacttacttgcatctatatgctataacaaaaagaaagacaggctgacaaaaacaaacaaacaaacaaacaaaaaacaaaaaccctttattggacaatcaaataaagcattgactagaatttttgcactttttggctgcttcacagtttgaagtgtttgcacctaaaacaaatgagagcaccatcaagagttgtgtcctcaattatttagaatttaggtgctgtatttttctttagttgaaagtcattgtgcatttcattttaagttattaaaatctcagttaaacaaatataaggattatgctcatcattcctagtatattgggtttacttatgcttatatattatatgtcaggggctttgaaagacacagtaggtaataactagtgttcaataggctcaacctaccagatgatctattctctgatgaagagccccacctgggaaggctgtggagttactggatgtggaaaccatttgctcctgtctgtagtttctctcatgagttacttcaattcttctctaagaatttcattgcttccctaagaatagttttgagtgttttcccactgcttatgtgtttatctcctgagaatatcccatctactgggcacacatatatctgtatgttgtcaagaagatgacttgtcatttacctgtataattttgatatatagaaaatatactgggacatgattcatagctgaatctatttgtcccatgaaactgtagacacctaaaggcctgctttgttctttggctcagactaactgtacacaattagctcacttttacctcagagaaagttcaaactagagtaaaaacttggtgtaaatacatcataagtttaaaaacttacagctatattcaaggtcagagttgatgatgtccaaccaatgttactacagaaaacaccctaggaaaaacataacaattcttcaattgccagtatgataacaatagacctttgtctcaaagtttgtcactgagcactgggccccactctggtctggttatagttttgttcctgaaatcttgaaatccttgtgttgccatggcaatggctcaactacttattgcttaccctaggaatgtgcttttgaccaaggagaagtaactctcggaatttaattattgtttcaagtctcctgggagaaagtttttaggctacaggaggagaagctggaggaaaaagctaggaggaattagaaataggacaggaaattagactatacatagaaaaataaagagatgtattcataaaagcacatagctagagaaaaaagtccttttacccattgtagtttctgattctgaaccctgaagagagtgcatagagatagtacacattctttagccaacctctctctttgtgtgtttgtgacacagactctatgtgctataatagacatctaacagtgcctatctcagaacacctgtgagatagtgaagctttagttcctgaccatcacaatcttgttcagtggtattgaaaagtaatcctggtgttaactgtgacagttttttcaaggcaaaaactaaataaaatggaaacaggaaagatgggaacatgtaaagtgtctatctttctatagatgaacttggaaaattgtcttactgatacccacaattaaaaaatagacaagataaaatagcacaatatcttagggagaatgtctcttgtctatgtaactatataaatacaatcaggcttagattacgaggaggagaggtattgaaatagctgtctaatttttatgtgggcaacagatgcttgactaactcaagatatcaacaaggctatgaaaccacaggctataatgctgtcccatgaggtgttacatctgggaattgaaaaaagatgcagctcactcaattgttagcttaactgtgtgaactgctgttgctattaaaacttgaattttgaaactttacctgatttatcacatcactccaaaagcttaaagtaagctaattctatttataaatttagagcgagccaggttttggtggcacatgcctttaatcccagcacccgagaggcagaggcaggcagatctctgtgagttggaggacagcctggtctctagattgagtgccaggataggctccaaagctacacagagaaaccctgtctcaaaaaaacaataaataaataaataaataaataaataaataaataaataaatttagagtgacacacactgaaattttaagagttctagtacttaagcagaattgaaaagataactctcagttatcaaaaattatagaaggagctcctgacctgccattttatcttggagggtgttactattcatttattcattcattcatttattcattcacccattgcagattcattctccttttttcccatttctggcttgtttcatcagtatgataatctaggtagatagatgatagatattccttttatatagagatagacacacgctgaagtgtgttacaagcactctctattttctggcctgacatgtcccgctgcccttctgaaccccaaagaaatacatggatgttgtattagttataaagctgttggccgtgggcttggatttcttattgaccagctctgtcttaattattaatccatttctattaattcatgtatttccatgtggtcttggcttacctgggaattcaagacctacaactcctttgccttttacaggatgacttctcagcctctccacagagaagagagtgatttcttgtttgtccctgcttatatcatgattctgcccagctatgtcacttcctgtctggccaatcagcctatcagtgttttattcattaacaaagaagagaaacatatatacagaagaacatcccccatcagaagtgtcattggaccatgtttaaaatctaagcctagtacttttaagcataatactatttcttccattatttcttttttttccatttatttaaagtagaaacaagattgttttacatgtcaatcccagtcctttctccctcctctcctaccctgaccccactaacaccctacctattccataccctttctgctccccaaggagggtgaagccttaacttagacttattagctcaagtgcatattagtagaaaatacagtattgagatactttaataaaccaaaatagcaatgctaaaataaaaatgcatgccagctaaactggtagagtatatttacacctgtcaaaatttgtttagaagttgggggtatctgatgtatctgatgtcttttttttttcatgagataaaagtagcatgttttacaacattacaaaattaagtcacacaaaagcaacatggtgagataaatcatattactacacaaaagcagagttttacccattgcctgagggaaaagaaacttaccttaacaattgcatgatgcctcagagcagtgaattttaagttgtgataaaaatcccttcttcagcctatcagaagaagttctcctgaggctcatgtgtgaatgggcttttaacaaatttctctcttgctttcaaattataaacaccactcctcacaccacatatttagtccaatattttcttaagcaacagctgtgcagactctttcctaatgtccactgcatatgagcaatgagaatttcaaggcatggatcattttgttaatgttcctgatgcatgtttgcttaccctcccaaattcaattcctggaaacatagttagcaggtttaatagcattcatggtgagttttatacacgtaagtgtgatcaggatccagatacatgttgccaaagtatgtctcacccagaagtccagaaaacagccaaagcacgccttaaaaagcatgtagagaaacttgctcactccttgtctcctgaaggagcctttaatcttcactgacctttctaagtaattgnnnnnnnnnnnnnnnnnnnnnnnnnnnnnnnnnnnnnnnnnnnnnnnnnnnnnnnnnnnnnnnnnnnnnnnnnnnnnnnnnnnnnnnnnnnnnnnnnnnnnnnnnnnnnnnnnnnnnnnnnnnnnnnnnnnnnnnnnnnnnnnnacagtctattctttagtttttttttcacctgtcatttgttatattggtcttttccatgagtgaagacatgaacacacaaatctttctttcccttataaaacagttcactgtaaattgatcatatagaagtttaagttactgttttgaagcattccaatgaaaatgaagtacatttacttagtcaaattatggttcatgattcttaattttttattttatcgtgtgtgtgtgtgtgtgtgtgtgtgtgtgtgtgtgtgtgtgtgctgaggtgtgtgtgtgtgtgtgctgagtgtaggtcatgcaaatgcaggtgtccatggagctcagaatgttggatcccatgtatctggagttataggcagttgtgggtgctgagaactgaaccttagtcctctggaagagaagttagtgctcttatccattgagtcatttctgagctccagtgtcacttctcaacataaagagattcaacagaaatgcactctggcaagcagaagaggataatcaaaagtccaaaagaatcttcaaatacatggtaaattacaagccagtctgtgcaacatgaaactttttccttaaaaaacaaaaagaaattcagtgtgaatattaaaattatccaatctggctagagcttagattctccaaatgcaacagctaagaactgcttaagaagaggtggtaaggtggacagtcttcaggacagagcctgtggtaatgactcatgtccttattgcagatcacagtgcttatgctgtgatttagttactgaaatagtgagcccactccccttgcatatacatcctcctctatgctgtcacaacttctcatgttacacagtatcaaggtcatttccagatatctctgcatatatcactagacttctcagctccagaaacaatagctgaatcagcctcacttctttacaaattgccttgtctactgtactctgtgacagcaatggaaaacaggtgaaggaaagacctgaaagtcatataactgaatggctcattgcacttgaatggcacgaaaactcttgaaaaccttattttaaataaaacaatacaatatgtcttggggattttactacagaagtcgtgacataaagttgcaaagagactcaattctttattggtgacatctatttctcttctataattctattacactactgagtttaaatgttttctttactcaaacccacaagcaggtaataatagaataggctttcagggatgatatccaaattaagatcagatatattgtagcttttaacttaaccagtgaagactgagcagatgaaaaagaaatctcctctctttctctgatgtcacccacagggcaataaccacatgcttcattctctgttcccaccaggactggaaagaatcgtttctaataagtgtaacatactcagatgtaagaaatagtcaggaaaaagagttggaattcctccttttgtccccatgtccttaatgtgaaagccaatcatcatcacttacacatctaggctgagaagccatacaatcaacaagttctcagaagcttgcttcaggctttctcagtgacgaacttcaaaatgtgtaacaacagtgtcctttgcactgtttcttccctcctggggagatttctattgagagcaggtgaatacttggggtgcctctgaggtcaattctaactcagggatgtgatgctatttgtctttagtcatgggatactgactttaacaaaccccaccaacccttgtacaagacctgatggaattcttatttcacatgaatttcaccgcctgtgagtttctgtttatttgtatctgagtaataggagcttcaactaaagtagaaaagcagacatgcaaatttttgtgttttacaatatgtatccattgctttcatttttgcatcttccattgcagtttctggctgccatatggctctctttagctaaatggttttaagatggctattggatatctacctcctcattatttctgtgagctgtctcccaacacccaacctttatatgatatatgcggctgttcaaacctggatataatcccaggcattgagcaaagtaaggttgtcataggtacatgtcttcaggaaagaaacaacagtgctaagagttgtcacaatcttagtcatactccaagtttcaatacactattaatgacaatgaaatttttctcattcatgctcttggatcagtgaaaataagtccataagcagatatacatacatacaatacagaaatgactacttatttaactagcacaaaaatttcaattaatatttctaaagcatgaagaaataaaaattgtgaagatatatggagctcaagagatggctcagtggttaagagcactgactgatctcccagaaaactttggttcacttcctagtacacatatggcagctcacaattgtctgttattccagttctagggacctgacacccatggcaaaacaacaatgcatataaaataacaataaacaaattttaaaaaatgtgaagatatctttccatctactaaaaatacaaaatcacagataaggaccagtgagatctcagtgggtaaaagcacttaccactcagtctagtgattgattttgatgccttgattcacatggtgaagggaggaacaatatgcacatgcacactaagttaaatacatttaacaaaatatttaaaatctaaaataggttcccatttacttttgttcttaatggtgtttatgttgtcatggttattatgcagttagaaaatgaaaaactcatttttggtttggccaactttactgaaaaattcaaggtttgattatattcactcaccagggttctcatatcaaatatctagcaatatccaatttcttttttgaatggttttaattggctggtctatatattttatagtttctgatggactaggagtgtaagtcccttctcagtagatattcagtttcttatccattgtatttatcagagaaattgtctgataaatccaaaaagacactatgataaatatccagcagtccattttatcatttttatccatttttatctccaaaaatctaataatgtaaatggagttgaatcatttccttaattgccagagttctcagttatcaaacatgaagcgacatcaaagg
